United States Patent Application Publication US 2024/0327476 A1 - sequence listing, part 63

SEQ ID NO: 119383 - DNA, 2073 bp, synthetic construct
  misc_feature 1..2073: note = Description of Artificial Sequence: Synthetic coding sequence
  source 1..2073: mol_type = other DNA
atgttctgcacaaagcttaaggacctgaagatcacaggcgagtgtccatttagtctgcttgcaccaggccaggtccccaacgagtcttcagaagaggctgccgggagctctgagtcgtgcaaggccacagtgcccatttgccaggacatccccgagaaaaacattcaggagtctctgccccaacgaaagaccagtaggtctcgtgtatacctgcataccctggcggagtccatttgtaagctgatctttcctgagttcgaaagactgaacgtggctctccaacggacactggcaaaacacaaaatcaaggaaagcagaaagtccctggagagggaggactttgaaaagaccattgcggagcaggcagtggcagccggggtgccggtggaagtgataaaagagtctctcggagaggaagtgttcaagatttgctacgaggaggacgagaatatattgggggtcgtggggggtacacttaaggattttctgaactctttttctactttacttaagcaatcctctcactgccaggaagcaggaaagagaggacggctggaggatgcctcaattctttgtctggataaggaggacgacttcctccacgtatactatttctttcctaagcgcactacttccctaattctccccgggataatcaaagcagctgctcatgtgctgtacgagaccgaggttgaagtgagtttaatgcctccctgcttccataatgactgcagcgagttcgtaaatcagccatatcttctgtacagcgttcacatgaagagtacaaaaccctccctttctccgtcaaagccgcagagttccctggtcattccaacctcgttattttgtaaaaccttcccatttcactttatgtttgacaaggacatgactatactccaatttggtaacggaatccgcaggcttatgaatagacgggacttccagggcaagccaaacttcgaggagtacttcgaaatcctcacgcctaagattaatcagacatttagcggcattatgaccatgctgaacatgcagtttgtggtccgggtgaggcgctgggacaactccgtaaagaagtcctcacgcgtgatggatcttaagggacagatgatctatatcgtcgagagcagtgcaatcctctttttgggctcgccatgcgtggacaggttagaggatttcacaggacgagggttgtacctttcagacatcccaatacacaatgctcttcgcgatgtcgtgctgattggagagcaggctagagcacaagacggcttgaagaagcggctgggaaagttgaaagccaccctcgagcaagcgcatcaagcattagaagaggaaaaaaagaagacagtcgacctcttgtgttctatctttccatgcgaagtagcccagcagttatggcagggccaagtggtccaggccaagaaattttcgaatgtcacaatgctcttctcagacatcgtcgggtttactgcaatatgctcacagtgtagtcccctgcaggtcatcaccatgctaaacgcgctttataccagattcgatcaacagtgtggagaactggacgtgtataaagtggagacaattggcgatgcttactgcgtcgcagggggcctgcataaggaaagcgatacccatgccgtgcagattgcacttatggccttgaagatgatggagctttcagacgaggtcatgagcccccatggagaacctattaagatgaggatcggacttcacagcggctctgtgtttgctggcgtggtgggcgttaaaatgcctcggtactgtctctttgggaacaatgtgacgctggccaacaagttcgaaagctgctcagtaccgcggaagatcaatgtgagcccaacgacttatcggctgcttaaagattgccctgggtttgtgtttacgccacgaagtagggaagaacttccccccaactttccatctgaaatcccaggcatttgtcattttctggatgcataccagcagggtacaaatagcaagccatgctttcagaaaaaagacgtggaggatggaaatgcaaacttcctgggcaaggcttcggggattgactag

SEQ ID NO: 119384 - DNA, 2073 bp, synthetic construct
  misc_feature 1..2073: note = Description of Artificial Sequence: Synthetic coding sequence
  source 1..2073: mol_type = other DNA
atgttctgcactaaactcaaggaccttaaaataaccggggagtgcccattcagtctgctggctcccggccaggtcccaaatgagtctagtgaggaagcagctggctctagcgaaagctgtaaggccaccgtgccaatatgccaggacatccccgaaaagaatattcaggagtcactgccacaaagaaaaacgagcaggtctcgtgtgtatctacacacccttgcagaatccatctgcaagcttatctttccagaatttgaacgtcttaatgtggccttgcagaggacactggccaaacataagatcaaggaatctcgcaagtcactagaacgagaggacttcgagaagaccatagccgagcaggctgtggctgctggagtgcccgtggaggtgatcaaagaatcgttgggcgaagaggtttttaaaatctgttacgaggaggatgaaaatatcctcggggttgtaggtggcaccctgaaagattttttgaattcattctccacactactgaaacagagctcccactgtcaggaggccggaaaaagagggagactagaagatgcttctatcctgtgtctcgacaaggaggatgattttctgcacgtgtactacttttttcccaaaaggaccacaagcctgatcttaccaggaatcattaaagccgcagcccatgtcctgtacgaaacggaagtggaagtgagccttatgcctccttgtttccacaatgattgtagcgagtttgtgaatcagccatacctcctgtactccgtgcatatgaaatccaccaaaccttccctttccccatctaagccacagagttcgctcgtgattccaactagcctcttctgtaaaactttcccttttcattttatgttcgacaaggacatgaccattctgcaattcggaaacggcattagacgcctaatgaatagaagagatttccaggggaaacctaattttgaagagtatttcgaaatactgacccccaagattaatcaaacgttctcggggataatgactatgctgaatatgcagtttgtcgtgcgggtgcgtaggtgggacaactcagtgaaaaagagtagccgggtgatggatcttaaggggcagatgatctatatcgtagaaagcagtgccattctatttttaggatccccttgcgtcgaccgcctggaagattttaccggccggggactttacttgtcagacatcccaatacataatgctctaagggatgtagtcctgattggggagcaggcacgggcgcaggatgggctgaaaaagcgcctgggcaagcttaaggctactttagagcaagctcatcaggccctggaagaagaaaaaaagaagacggtcgatctgttgtgcagcatcttcccttgtgaggtcgcacagcaactgtggcaaggccaagtggtgcaagcaaagaagttcagtaacgtcactatgctcttctcagacatagttggattcacagcaatttgtagtcagtgcagccctcttcaggttattaccatgttgaatgctctgtacacccgtttcgaccagcagtgcggagaacttgatgtatataaggttgagactattggtgatgcatactgcgtggctggcggactgcataaggaatccgatactcatgcggtgcagatcgccctaatggctctgaagatgatggaactgtctgatgaagtgatgagtccccatggggaaccaatcaaaatgcgaatcggtctgcactcggggagcgtttttgccggagtagtgggcgtgaagatgcctcggtattgcctgtttggcaataacgtgaccctagcgaataaatttgaaagctgtagtgtgccccggaaaatcaatgtatcgcctacgacatatagactgctgaaggattgtcccgggttcgtgtttactccacgatcacgcgaagaactgcctccgaatttcccaagtgagattccaggtatttgccactttctcgacgcataccagcagggtactaactccaagccttgttttcagaagaaagacgttgaggacggtaacgcaaacttccttgggaaggcttcggggatcgactag

SEQ ID NO: 119385 - DNA, 2073 bp, synthetic construct
  misc_feature 1..2073: note = Description of Artificial Sequence: Synthetic coding sequence
  source 1..2073: mol_type = other DNA
atgttttgtactaaattaaaagatcttaagatcaccggggagtgcccgttctctttgctggcaccaggccaggttcccaatgagagctctgaggaagcggctgggtcatctgaatcatgcaaggcgacagttccaatatgccaagatatcccagagaagaacatacaagagtctctcccccagcgaaagacatccagatctcgggtgtacttgcacacccttgcagagtccatctgtaaactcatttttcccgagtttgagaggctcaacgtcgcgttacagcggacccttgccaagcataagatcaaagagagccgcaagtcattagagcgtgaggatttcgaaaagacaattgccgagcaggccgtggctgctggagtcccagtggaggttataaaagaatcactgggagaggaagtattcaaaatctgctacgaggaagacgaaaacatattaggcgtggttggcggaaccctgaaggattttttgaatagtttcagtacgctgctgaagcagtccagtcactgtcaggaggccggaaaacgcggcagattggaagacgcaagcattttatgcctagataaggaggatgattttctacacgtgtattattttttccctaaacgtaccacatccctgatcttaccaggcattatcaaggccgccgcccatgtgctctacgaaacagaggttgaggtgtctttaatgcccccgtgttttcacaacgattgtagtgaatttgtcaaccagccctatctactttacagcgtgcacatgaaaagcaccaagccctccctttctccgtctaaaccacagagcagcctggtcatcccaacatcactgttttgcaaaacattcccatttcactttatgttcgacaaggatatgacaatcctgcagtttggaaacggaattagaaggctcatgaatcgcagggatttccaggggaagcccaatttcgaagagtacttcgagatactgacccccaagatcaaccagaccttcagtggcatcatgacgatgcttaatatgcagttcgtggtcagagtgcgccgatgggataactcggttaaaaagtcaagtcgcgtaatggacctgaaaggacagatgatctacatagtcgaaagctccgctattttatttctcggcagcccttgtgtggaccggctggaggacttcaccggcaggggcctttatctttcagatattccaatccataatgctttaagggatgtagttttgattggagagcaggcccgagcacaagacgggctcaagaagcggctcgggaaactcaaggccacacttgagcaggcacatcaggccctcgaggaggaaaaaaagaaaactgttgacctcctgtgcagtatcttcccctgcgaggtcgctcagcagctttggcagggccaggtcgtgcaggcaaagaaatttagtaacgtgacaatgctgtttagtgatatcgttggcttcaccgccatctgtagccagtgttcgccattgcaagtgattaccatgctgaacgcactgtatactcgattcgatcagcagtgcggagaacttgacgtatataaagtggaaactattggagatgcctactgtgtggccggcggtttgcataaagaatcagacacacatgccgtgcagattgcactgatggcccttaagatgatggagctgagtgatgaggtaatgagccctcacggtgagcccataaaaatgcgcattggcttgcactctggaagcgtctttgccggcgtggtgggcgtgaaaatgcctcgctattgtctgttcgggaacaacgtaaccctggccaataagtttgaaagttgtagcgttcctcgcaaaattaatgtttccccaacaacttatcggcttctaaaggattgccctggatttgtatttacacccaggtcccgtgaggagttgccaccgaacttcccgtctgaaatacccggcatctgccacttcctcgacgcatatcaacagggaaccaattccaagccttgctttcagaaaaaagatgtggaggacggcaatgctaactttctcggaaaagcgtcgggtatcgactag

SEQ ID NO: 119386 - DNA, 1860 bp, synthetic construct
  misc_feature 1..1860: note = Description of Artificial Sequence: Synthetic coding sequence
  source 1..1860: mol_type = other DNA
atgtatgggtttgtcaaccatgccctggaattgctggtgattcgaaattatgggcctgaagtttgggaggacattaagaaagaagctcaactagatgaggagggccagttcctagtgcgcataatctatgatgatagtaagacttatgatctcgttgctgcagcgtctaaggtactcaacctgaacgccggcgaaattttacagatgtttgggaaaatgttttttgtgttttgccaggaatccgggtatgacaccatccttcgcgtcctggggtcaaatgtaagggagttcttgcagaacttggacgcactccatgaccacctggccacaatttaccccggtatgagggccccatcctttagatgtactgacgcagagaaaggaaagggccttatactccactattactcggaaagggagggcttgcaggatatcgttatcggcattattaaaacggttgctcagcaaattcacggtaccgagatcgacatgaaagttattcagcagcggaatgaggaatgtgatcacacacaatttttgattgaagaaaaggaaagcaaggaggaggatttctacgaggatctggacagattcgaggagaatggcacacaagagtccaggatcagcccatacacgttttgtaaagcatttccctttcacatcattttcgacagggatctggtcgtcacacagtgcggaaatgccatatatagagtgctgccccagctgcaacctggtaattgctctctactgagtgtcttttccttggtcagacctcatatcgacatttctttccacggcatcctctcccatataaacaccgtctttgtgttacgaagtaaggagggcctcctggacgtcgaaaagttggagtgcgaggacgagctcacaggaaccgagattagctgtctaagactgaaaggccagatgatctatctgccagaagccgactcgatcctgttcttgtgcagcccttccgtgatgaatctcgacgatcttaccagaaggggcctttacctgtccgacattcccctccacgatgcgactcgggatctggtcctcctaggagagcagttcagagaggagtataaactcactcaggaactcgaaattcttaccgatcgactgcagctaactctgcgtgcgttggaggacgaaaaaaaaaaaacagatactctactctactctgtcttaccacctagcgttgccaatgagctgcggcacaagaggccagtgccagcaaagaggtacgataatgttacaattttgttcagtgggatcgtgggcttcaatgcattctgcagcaagcatgcctccggcgagggcgctatgaagatcgtgaacctcctgaatgatctgtacacacgcttcgacactctgactgactcacgaaagaatccatttgtttacaaggtcgagaccgtgggcgataagtatatgactgtcagcgggctgcccgagccatgcatacaccacgccaggagtatttgccatctcgcactggatatgatggagattgctggccaagtgcaagtggatggcgaatcagtgcaaatcaccattggtatccataccggcgaggtggtgaccggagtgattggacagaggatgccgcgctactgtctcttcggcaacacagtgaaccttacaagccgaaccgaaaccactggcgaaaaggggaaaattaatgtgagtgaatatacctatcgttgcctgatgagcccagagaattcggatccacaatttcacttagagcatagggggcctgttagcatgaaaggcaaaaaggagcctatgcaggtctggtttctcagccgcaaaaacaccgggacggaggagacaaaacaggacgacgactag

SEQ ID NO: 119387 - DNA, 1656 bp, synthetic construct
  misc_feature 1..1656: note = Description of Artificial Sequence: Synthetic coding sequence
  source 1..1656: mol_type = other DNA
atgtttggcaagatgttttttgtcttttgtcaggaatccggatatgacacgattctgagagtcctcggatctaatgtgcgggaatttctgcagaacctggacgccttgcacgatcacctcgccacgatttaccctgggatgcgggcgccatctttcaggtgtactgacgctgagaaggggaagggcttaattctacattactacagcgagcgggagggcctccaagatattgtgataggtatcatcaagactgtggcacagcaaattcacggaaccgaaatcgacatgaaagtgattcagcagcggaacgaagagtgcgaccatacgcaattcctcatcgaggagaaagagtccaaggaagaagacttctatgaagatctggaccggtttgaagagaatggaactcaggagagtcggatttcgccatacacattctgtaaggctttcccatttcacatcatattcgacagagatctggtggtgacgcagtgcggcaatgccatctaccgggtgttaccccaacttcagccaggtaattgttcactgcttagtgtattttcgcttgtgaggccgcatattgatattagtttccatggtattctgtcacacataaatacagtttttgtgcttcgctcgaaggagggtcttctcgacgtagagaaattggaatgtgaggatgagctgactggaaccgaaatatcatgtctgagactgaaaggccagatgatctatctaccagaggccgactcaattttgttcctgtgcagcccgagcgtgatgaacctcgacgatcttactcgaagagggctgtacctctcagatataccactgcacgacgccacacgtgacctcgtgctcctaggcgaacagttcagggaggagtataagctcactcaggaactggagattctgactgatagactccagcttacactgcgggcattggaagacgaaaagaaaaagacggatacattgttgtactccgtgctccccccttccgttgccaatgaacttcgacacaagcggcctgttcctgccaagcgctatgacaatgttaccattctgttctcaggcatcgtgggcttcaacgccttttgcagcaagcacgctagcggcgaaggggcaatgaagattgttaatttgctgaatgacttatacactaggttcgatactctcacagattcaagaaagaatcccttcgtttacaaagtggaaacggtcggcgataagtatatgaccgtgagtggtctaccagagccgtgcatccaccacgcacggtccatctgtcacctggcgctggacatgatggagattgcggggcaggtccaagtggatggcgaaagcgtccagatcacaattgggatccataccggagaggtcgtgacaggcgtgattggacagagaatgcctcggtattgtttgttcggcaacactgtgaatctaacctctagaactgagactacaggagaaaaaggcaaaattaacgtctccgagtatacttatagatgtctcatgtccccagaaaacagtgacccccagttccatctcgagcaccgcggacctgtgtcaatgaaagggaaaaaagaaccaatgcaagtgtggttcctttccaggaagaataccggcaccgaggagactaaacaggatgacgactag

SEQ ID NO: 119388 - DNA, 1800 bp, synthetic construct
  misc_feature 1..1800: note = Description of Artificial Sequence: Synthetic coding sequence
  source 1..1800: mol_type = other DNA
atgctaatgtgtttcataaaggaggcccaactagatgaggaggggcagttcctggttcggatcatttacgacgactccaaaacatacgatttggtcgcagcagccagcaaagttctgaacctgaacgctggagagattcttcagatgttcgggaagatgttttttgtcttctgccaggagagtggctatgataccattctgagggttctaggcagtaacgtgcgcgaatttctgcagaatctggatgcccttcacgatcatctcgcgaccatataccccggtatgcgcgccccttcatttagatgcactgacgctgaaaaagggaaaggactcattctgcactactattctgagcgggagggcctgcaggatatagtcattggtataatcaaaacagtcgcgcagcagattcatggaactgagattgacatgaaagtgatccaacagagaaacgaagagtgcgaccatacccagttccttatcgaggaaaaagagagcaaggaggaggatttctacgaagaccttgacagatttgaggaaaatggcactcaggagtcccgaataagtccatatacattctgcaaagccttcccctttcacataatattcgatagagacctggtagtgacacaatgtggaaatgctatttatcgggtgttgccacaactgcagcctggcaactgcagcttactttccgtcttttcattggtgcgaccccacatagatatttcctttcacggaatcctgagccatattaatactgtcttcgttcttcggtcaaaagaaggactgctggatgtggaaaaactcgagtgtgaagatgagctgacaggcactgaaataagctgcttaaggctaaagggccaaatgatctatctcccggaggctgactctattctatttctctgctcacctagcgtaatgaatctcgacgacctgacaagaagggggctctatctttctgacatccctttgcacgacgccactagggacctggttctactaggtgaacagtttagggaggaatataagttgactcaggagttggaaattctcaccgaccggcttcaactgaccctgcgagcgcttgaagacgagaaaaagaagactgacacattactgtactccgtactcccgccttctgtagccaatgagttgaggcacaagcggccggtaccagcaaaacgatacgacaacgtcactatactgttctcgggcattgtcggcttcaatgcattttgttcaaagcacgcctcaggcgagggtgccatgaagatcgtgaatctcctcaacgacctctacacacgttttgatacgctgacagattctcgaaagaatccgtttgtgtataaggtggagactgtaggcgataagtatatgactgtctccggcctaccagaaccatgtatccatcacgctcggtcaatttgtcatctcgcactggatatgatggagatagccggccaggtccaggtggatggggagtcagtgcagataaccatcggaatccatactggagaagtcgtgacaggcgttattggccagcgaatgccaaggtactgtttgttcggaaatacagtgaaccttacatcccggacagaaaccaccggcgagaaggggaagataaatgtgagtgagtatacatatcgatgccttatgagcccggaaaacagcgacccccagtttcatctggaacaccggggaccagtctcaatgaaaggcaagaaggagccaatgcaagtgtggttcctgagtcggaagaatacgggcacagaagagacaaaacaggacgatgattag

SEQ ID NO: 119389 - DNA, 1656 bp, synthetic construct
  misc_feature 1..1656: note = Description of Artificial Sequence: Synthetic coding sequence
  source 1..1656: mol_type = other DNA
atgtttgggaagatgtttttcgtcttctgtcaggagtcaggatatgataccatcttgcgcgtgctgggatccaatgtgcgggaatttttgcaaaacttggatgcattacacgatcacttggcaacaatctatccggggatgcgcgcgcctagtttccgctgcacggatgcggaaaagggaaaaggtttgattctgcactattattccgagcgcgagggcctccaagacattgtcatcggtattatcaaaactgttgcccagcagattcacggcactgaaattgatatgaaggtcatacagcagagaaacgaagaatgtgaccacacccagtttttgatcgaggaaaaggagtccaaagaagaggatttttacgaggaccttgaccggttcgaggagaatgggacacaagaatctcgcattagtccttataccttttgtaaagccttccccttccacattatattcgaccgggatctagtcgttacccagtgtggtaacgctatctaccgtgtattgcctcagctgcaaccaggcaactgtagtctattgtccgtttttagtctcgtccgcccacacatagatattagtttccacgggattctgtcccacataaatactgtgttcgtgctgcggagtaaggagggactgctggacgtcgagaagcttgagtgcgaggatgagctgactggcaccgagataagctgtctacgactgaagggtcaaatgatctatttgcccgaagcagactcaatcctgttcctctgctccccatcagtcatgaacctggatgacctcactcgccgcgggctgtacctcagcgatattcccctgcacgacgctacccgggaccttgtgctgctaggtgagcagttcagggaggagtataaactaacccaggaattagagatcctgaccgacagacttcaactgactctgagagctttggaggacgaaaagaagaaaaccgacaccctgttatattcagtccttccgccatccgttgcaaatgaactgagacacaagagacctgtgccagccaagaggtacgataatgtgaccattctgtttagcggaatcgtaggcttcaacgccttctgcagcaagcatgctagtggcgaaggcgccatgaagattgtgaacctcctgaatgatttatacacccgatttgacaccctcaccgacagccgaaagaatcccttcgtgtacaaagttgaaaccgttggcgacaagtatatgaccgtgtccggcttgcccgaaccgtgtatacatcacgctaggtctatttgtcatctggcattagatatgatggagatcgcggggcaagtacaggtggacggggaatctgtgcagattacgattggaatacataccggggaagtagtgaccggcgtgataggacagcgcatgccaaggtattgtctgttcggtaatacggtgaatctcacatccaggactgagacaacgggggaaaaaggcaaaataaacgtctctgagtacacctacagatgtttaatgagccccgagaactcggatcctcagttccatctggaacaccggggacctgtgtcgatgaaggggaagaaggaaccgatgcaagtgtggttcctgagtcggaagaacactggtactgaagagacaaaacaagacgacgactag

SEQ ID NO: 119390 - DNA, 3222 bp, synthetic construct
  misc_feature 1..3222: note = Description of Artificial Sequence: Synthetic coding sequence
  source 1..3222: mol_type = other DNA
atgaaaaccctgttgctggatctcgcactatggtctctgctattccaacccggatggttaagcttcagcagccaggtgtcacagaattgtcacaatggtagttacgagatttcagtgctgatgatgggaaattctgcatttgctgagcccctgaagaatcttgaagatgccgtaaacgagggcttagagattgtaagaggtaggctacaaaatgccggactcaacgtcacagtgaatgccacatttatgtatagcgatggactgatccacaactctggagactgccgctctagcacctgtgagggactcgacctgctgaggaagatatcaaacgcccagcgtatgggctgtgtgcttatcggcccatcatgtacgtattccacttttcaaatgtacctcgatacagagctgtcctatccaatgatttcagccggaagctttgggctgtcttgcgactataaggaaaccttgacaaggcttatgtctcccgcaaggaagctgatgtatttcctagttaacttctggaagacgaatgatctgccctttaaaacttacagctggtcaactagctacgtgtacaagaatgggacagagactgaggattgtttttggtacttgaatgctctcgaagcgtctgtgtcttactttagccacgaattgggcttcaaagtggtgcttcggcaggacaaggagttccaggatatcctgatggaccataatcggaagagcaatgtcatcattatgtgcggcggacccgaattcctttacaagttgaaaggcgatagagctgtggccgaagacatcgtgattattctggtcgatttgttcaacgatcagtatttcgaagacaacgttacagcccctgattacatgaaaaacgtgctcgttcttacattgtcccccggcaactccctcttgaacagctccttcagtaggaacctgagtcctaccaagagggacttcgctctcgcctatttgaatgggatcttgctcttcggtcatatgcttaagatatttctggagaatggagagaacatcaccaccccaaaattcgcacatgcatttaggaatctgaccttcgaaggatacgatggtcctgtgaccctggatgactggggagatgtagactcaaccatggtgcttctatatacaagcgtggatacaaagaagtacaaggttctcttgacttatgacacacacgtgaacaagacgtaccctgtcgacatgtcacccacgtttacctggaagaacagcaagctccccaatgatatcaccggtagggggccacaaatattaatgattgcagtgttcaccctcaccggtgccgtcgtactcttgctcctggtcgcactgttgatgttacgcaaataccgcaaagactacgaacttcggcagaaaaaatggagccacatccctcccgaaaatattttccccttggagactaatgagactaaccatgtgagtcttaagattgacgacgacaaacggagggacaccattcaaagactccgacagtgtaagtatgacaagaagcgggttattcttaaggatttgaagcataatgatggaaacttcactgaaaagcagaaaatcgaactgaacaagttgctgcagattgactactacaacctaactaagttctacggaaccgtgaagctagatactatgatttttggggtaatcgaatattgcgagcgcgggagtctgagagaggtgctgaatgataccatctcctaccccgacggcaccttcatggactgggaattcaaaatttcggtgctatacgacatcgccaaggggatgtcttatctccatagttcaaaaacggaagtgcacggtcgtctcaaatccaccaactgtgtggttgactcaaggatggtggtcaaaatcactgacttcggatgtaattccattctgcctccaaaaaaggatctgtggaccgccccggagcatctccggcaggctaacatctcccagaaaggagatgtgtatagttacggcattattgcacaagaaatcatcctgagaaaggagacgttctacacactgtcttgtcgcgacagaaacgaaaaaatcttccgggttgaaaatagtaatggcatgaaacccttccggccagatctgtttttggaaacagcagaagaaaaggaactggaggtatatttattagttaaaaactgttgggaagaggatcctgagaaaaggcctgacttcaagaagattgaaacaaccttagccaagattttcggactttttcacgaccagaagaatgagtcatatatggataccctgataaggaggctccagctctattccaggaatcttgaacatctagttgaggaacggacccaactgtacaaggccgaacgggacagagcagatcgcctgaatttcatgctcttacccaggttggtcgtcaagtctctgaaggagaaggggtttgtcgaacccgagttatacgaggaggtcacaatctatttctccgatatcgtcggcttcactacaatttgtaagtatagcacccccatggaggtcgtagatatgcttaatgatatatacaaatcctttgaccacatcgtagaccatcacgatgtgtataaagtcgagaccatcggggacgcctacatggtggccagcggattgcctaaacgcaacggaaacagacacgccatagatatcgcgaaaatggcccttgaaatcttatcctttatgggcacctttgagttagagcacttacccggactgccgatctggatcaggatcggtgtccactccggcccgtgtgcagctggagtcgtgggtatcaaaatgcctagatactgtttgtttggcgacactgtaaatactgcctcgcggatggagtctacgggcctgcctctgcgcatacatgtgtccggatcaacaatcgctattctgaagcgcaccgaatgtcaatttctttatgaggtcaggggtgaaacttaccttaagggccgaggcaatgaaacgacatactggctcacggggatgaaggaccagaagtttaaccttcccacaccccccacagtagagaatcagcaacggctgcaggctgagtttagcgatatgattgctaatagcctgcagaagagacaggccgctggaattcgctcacagaaacctagaagggtcgcaagttacaagaaaggcacactagaatacctacagcttaatacgaccgataaggagtccacctacttctag

SEQ ID NO: 119391 - DNA, 3312 bp, synthetic construct
  misc_feature 1..3312: note = Description of Artificial Sequence: Synthetic coding sequence
  source 1..3312: mol_type = other DNA
atgaccgcttgtgcccgtcgcgccggaggattacccgaccccggcctctgtggtcctgcctggtgggccccatccttgccacgactccctcgcgccctgccccgcctgccgctgttactgctattgctgcttttacagccacccgcactgagtgctgtcttcaccgtgggagtgttggggccatgggcctgtgaccccattttctcccgggcacgacccgatttagcagctcgactggccgccgcccgcctcaatcgcgatccaggcctggccggggggcctaggtttgaagttgctttactgccagagccttgtcgcacaccaggcagcttaggcgcagtatcttccgcactggccagagtatcaggtttagtaggacccgtcaacccagcagcatgtaggcctgccgagctattagccgaggaggctggtatagccctcgttccttggggctgcccttggacacaagcggagggcactactgctccagcggtgacgccagcagcagacgccctctatgcattgctgcgcgccttcggttgggcacgggtggcactggttacagccccacaggatctctgggtcgaggctggccgatcattgtctaccgcactcagagcaagaggattacctgtggcatccgtgacgtcaatggagcccctagatctgagcggcgccagggaggctctgagaaaggtgcgcgacggacctagagttacggctgtcatcatggtgatgcattcagtgctactggggggcgaagagcagcgttatttactggaagcggctgaggagcttgggctcaccgatggttctcttgtcttcctccccttcgacaccattcactatgccctaagcccaggccccgaggccctggccgcgttggcgaactcttcccagctgcggcgagctcacgacgcagtgctcactctgacccggcactgtccgtccgagggctccgttctagactccctccgtcgcgctcaggagcgcagagagcttcccagtgacttaaaccttcagcaggtgagcccactgtttggaacaatatacgacgccgtgtttttactcgcccgcggagtagctgaagcaagagccgctgccggtgggcgatgggtgtctggagccgcagtggctcgccacatccgggatgcccaagtgcccgggttttgtggagacttggggggtgatgaggagccccccttcgttttgctggacacagacgcggcgggagaccgcctgtttgccacctacatgctcgatccagccagaggtagctttctgtcagctggcacccggatgcatttccctcgaggcgggagcgcccctggccccgaccctagctgttggtttgatccaaacaatatttgcggtgggggactcgagccagggctggtgtttctgggctttctgctcgttgtgggaatgggcctcgccggcgcattcctcgctcactatgtgcggcatcgcctcctccacatgcagatggtgagcgggccaaacaaaatcatcttgaccgtagacgatatcaccttcctccatccgcatggcggcacgtcccgcaaagtcgcacaggggtctcgtagctcattaggagcacggtcgatgtccgatatacggtctgggccaagccaacatctggacagccccaacataggcgtgtatgagggagaccgagtgtggctcaagaaattccctggcgaccagcacatagccatcagaccagctacaaagacagccttttccaagctgcaggagctgcgacacgagaacgttgctctttatctcgggctttttttagcccggggggccgaaggccctgctgccctctgggagggaaatcttgctgtggtctcagagcactgtacacgagggtcactgcaggaccttctggcccagagggagataaagctggactggatgttcaagagctccctgcttctggacctcataaaggggattcgatatttgcatcataggggagttgcgcacggcaggctgaaatcccggaattgcatcgtggacggccggtttgtgcttaagataactgatcatggccatgggcgtcttctggaagcgcaaaaagtgctcccagagcctccacgagcagaggaccagttgtggactgcaccagagctgctgcgcgatcctgcactcgagagacgaggaactctagcaggggatgtgttttcccttgcgataatcatgcaggaggtggtctgcagatccgccccatatgctatgttggaactgactcctgaagaagtggtacagagggttcgatcgcccccccctctgtgcaggccgttagtgtccatggatcaggctcctgtcgagtgcatactcttaatgaagcagtgttgggccgaacaacctgagctccggccctcaatggatcatacattcgacttatttaagaatatcaataaaggccgaaagactaacataatagactcgatgttacggatgctggagcagtactcctctaaccttgaggatttgataagggagcgaaccgaagaactggagctcgagaagcagaagacagatcggctgttgacacaaatgctgccaccctcggtggctgaagccctcaagaccggcaccccagtcgagcccgaatactttgaacaggtcacactgtacttcagtgacatcgttgggttcaccaccatctcagcgatgagtgagcctatcgaagtggtggacctccttaacgacctctacacactgttcgacgctattatcggttcccacgatgtctataaagtggaaactattggggacgcatatatggttgcaagcgggctgccccagcgtaatggccagcgccacgctgccgagatagccaacatgtctctggacatcctgagcgcagtgggcacctttagaatgagacatatgcccgaggttcccgtgcggatccggatcggattacatagtggcccatgcgtcgccggtgtcgtcggactcactatgccccggtactgtttatttggcgacacagtgaacactgcttctaggatggagtccacaggcttgccatatcgtattcatgtcaacctttccactgtcggcatattgagagcattagacagtgggtaccaggttgagctgcgggggcggacagaactgaaggggaagggggctgaggacaccttctggctggtggggcgccgagggtttaacaagccaatacctaagccccccgacctgcaaccaggatctagcaatcacggcattagtcttcaggaaattcctccggagaggcgcagaaagctagaaaaggcccgcccagggcaattcagttag

SEQ ID NO: 119392 - DNA, 594 bp, synthetic construct
  misc_feature 1..594: note = Description of Artificial Sequence: Synthetic coding sequence
  source 1..594: mol_type = other DNA
atgaggaagtatcgatcgcattggtcccaaggcgatagagaaggataccaacggcgttccaactactacgagggccctcacacatcacatagcagccctgccgaccgaacccgcgaagaagtggtcacacctacgttgcccgaacatactgccactcgctcccagatggccacaagccttgatttcaagacatacgtcgaccaagcatgcagagccgctgaagaatttgtcaacatttactatgagaccatggacaagcggagacgcgcactcaccaggctttacttggataaggccacacttatctggaatggcaatgccgtttctggtttggacgcactcaacaacttttttgacacactgcccagctcagagtttcaggtgaacatgctagattgtcaacctgtgcacgagcaagctacgcagtctcagacaactgtgttagttgtgacaagcggcaccgtgaagtttgatggcaacaagcagcattttttcaaccagaattttctgcttaccgctcagagtaccccgaataataccgtgtggaagattgcctccgattgttttcgctttcaggactggtccagctcctag

SEQ ID NO: 119393 - DNA, 606 bp, synthetic construct
  misc_feature 1..606: note = Description of Artificial Sequence: Synthetic coding sequence
  source 1..606: mol_type = other DNA
atggggaacgtcatggaagggaagtccgtggaggagctttccagcaccgaatgccatcagtggtataagaaatttatgacggaatgtcccagtggtcagctgacactgtacgagtttagacagttttttggtctgaagaatttaagtccttcggccagtcagtatgtagaacaaatgtttgaaacatttgacttcaataaagatggctatatcgatttcatggagtacgtggcagctctgtccttggtcctgaaaggtaaagtcgagcagaagctccgttggtacttcaaattgtacgatgtcgatggcaacgggtgcatagacagggacgagctgttgaccattatacaagctattcgggcgataaacccctgtagtgacactaccatgacagctgaggagtttacagatactgtgttctccaaaatcgatgtgaacggggacggggaattgagtctggaggaattcatcgagggtgtgcagaaagatcaaatgctgcttgatacattgacacgatccctggatctgacccgcattgtcaggcggctgcagaatggagagcaggacgaggagggagccgatgaagccgctgaagctgccggctag

SEQ ID NO: 119394 - DNA, 606 bp, synthetic construct
  misc_feature 1..606: note = Description of Artificial Sequence: Synthetic coding sequence
  source 1..606: mol_type = other DNA
atggggaatgttatggagggcaagtccgtggaggagctgtcctccacagagtgtcatcagtggtataaaaagtttatgacagaatgtccctcaggacagctgactctttacgaatttcgacaattttttggtctcaagaaccttagtccgtccgctagtcagtacgtcgaacaaatgttcgagaccttcgatttcaacaaggacggctatatcgactttatggagtatgtcgcagctctgagcttggttcttaagggtaaggtcgaacagaagctgagatggtactttaagctgtacgacgtagacggaaacggctgtatagacagggatgagcttctaactatcatccaggccattcgggcaattaacccttgctcggacacaactatgaccgcagaggaatttaccgatacagtttttagcaagattgacgtcaatggagatggagagctatctcttgaagagtttatcgagggcgtccagaaagatcaaatgctcctcgacactctgacacgctcactggatcttacccggatcgtgaggcgcctgcagaatggcgagcaggatgaggaaggtgcagacgaagccgccgaggctgccggctag

SEQ ID NO: 119395 - DNA, 618 bp, synthetic construct
  misc_feature 1..618: note = Description of Artificial Sequence: Synthetic coding sequence
  source 1..618: mol_type = other DNA
atggaaggaaagtccgtagaagaattatcctccacggaatgccaccagtggtataaaaaattcatgactgagtgtccttcggggcagctcaccctctacgaatttcgacagttctttggcctgaagaacctttccccatcagcctcccaatatgtggaacagatgttcgagactttcgactttaataaagatggctatatcgacttcatggaatacgtggccgccctgtccttagtgttgaaggggaaggtcgagcagaagttgcgctggtacttcaaattgtatgacgttgatggtaacggctgcattgatcgagatgagctgttgacaattatacagttccctcaccagtatcagaaaaccgcaattcgcgccatcaatccttgctccgacacaacgatgactgccgaggaatttaccgacacagttttctccaagattgacgtgaacggcgacggggagcttagcctcgaagaattcatagagggagtacagaaggaccagatgctccttgatactctgactaggagtctggatctcaccaggattgtgcgcagacttcagaatggtgaacaggatgaagaaggggctgatgaagccgctgaagccgccggatag

SEQ ID NO: 119396 - DNA, 606 bp, synthetic construct
  misc_feature 1..606: note = Description of Artificial Sequence: Synthetic coding sequence
  source 1..606: mol_type = other DNA
atgggcaatgtcatggagggcaagagtgtcgaagaattgtcgagcacagagtgtcatcagtggtacaaaaagttcatgactgagtgtccttcaggtcagctgactctttacgagtttaggcagttcttcggactgaagaatttatcaccctccgcaagtcaatatgttgagcaaatgtttgagaccttcgatttcaataaggatgggtacatcgatttcatggaatacgtggccgccctgagcctggttctaaagggaaaggtggaacaaaaactccggtggtattttaaactgtatgatgtcgacgggaacgggtgcattgacagagacgaacttttgactatcatccaggccattagagcgattaatccatgttcagatacaacgatgacagctgaggaattcaccgatacagtattcagcaagatcgacgtcaacggcgatggagagctgtccctggaagaattcatcgagggagttcagaaggaccagatgctgctggatactctgacccggagcctggacctgacccggatagtgcgcagactgcagaatggtgagcaagacgaagagggagccgatgaggccgcagaggctgctggatag

SEQ ID NO: 119397 - DNA, 267 bp, synthetic construct
  misc_feature 1..267: note = Description of Artificial Sequence: Synthetic coding sequence
  source 1..267: mol_type = other DNA
atgggcaacgtgatggaaggcaagtctgtggaagagctcagtagcactgagtgtcatcagtggtataagaaatttatgaccgagtgtccaagcggacagctgacgctgtacgagttccgccaattcttcggtcttaagaatctgtcccccagcgcttcacagtatgtcgagcagatgttcgaaaccttcgactttaataaagacggctacattgactttatggaatacgtggctgctctttcgctggtgctcaaagggaaagtatag

SEQ ID NO: 119398 - DNA, 606 bp, synthetic construct
  misc_feature 1..606: note = Description of Artificial Sequence: Synthetic coding sequence
  source 1..606: mol_type = other DNA
atgggaaacgtgatggaggggaagtctgtggaggagcttagttccactgagtgtcaccagtggtataaaaaatttatgaccgagtgccccagtggccagctgactttgtacgagtttcggcaattcttcggacttaaaaatctgtctccttcagcgagccagtacgtggaacagatgtttgagaccttcgactttaataaggatggttacattgattttatggaatatgtggctgccctatcgctggtcctgaaaggtaaggtggaacaaaagcttagatggtattttaagttgtatgacgtggacggaaatggttgcatagaccgcgatgagctactgaccattatccaggccatcagggccattaacccctgtagcgacactactatgaccgctgaagaattcacagacaccgtgttcagcaagatcgacgtgaatggcgatggcgaattaagccttgaggagttcatcgaaggggtgcagaaggatcagatgctgctagacactctgactcgcagcctcgatcttactagaatagttcggaggctgcagaatggagagcaggatgaagaaggggcagatgaagccgctgaggctgccgggtag

SEQ ID NO: 119399 - DNA, 1020 bp, synthetic construct
  misc_feature 1..1020: note = Description of Artificial Sequence: Synthetic coding sequence
  source 1..1020: mol_type = other DNA
atggaccagaacaacagtctgcccccctacgctcaaggactcgcctccccacaaggagctatgactcccggcattcctatcttcagccccatgatgccatacgggaccggcctaacaccacagccaatccaaaatactaactcacttagcatactggaggagcagcaacgtcagcagcaacaacagcagcaacaacaacagcagcaacagcaacaacagcaacagcagcagcagcaacagcaacagcaacagcagcagcagcagcagcagcaacagcagcagcaagcagtagctgctgctgctgtacagcagagtactagccagcaggccacccaaggtacttccggccaagcacctcaactgtttcatagccagactctgactactgcgcccctgcccgggaccactcccctgtacccctctcctatgacacctatgacacccatcaccccagcaacccctgcaagtgagtcatccgggattgtgccccagctccagaacatcgtgagtaccgtgaacctgggctgcaagttagatctcaagactattgcactcagggcccgcaatgctgaatacaaccccaagcggttcgctgcagttatcatgcgaattcgggaacctaggaccaccgcgcttatatttagcagcggcaagatggtttgcactggcgccaaatccgaggaacaaagtagactggctgctcggaaatacgccagggtagttcagaaattgggattccccgccaagtttctcgacttcaagatccaaaatatggtcgggtcttgcgatgtgaagttccccattagactcgagggcctcgttttgacccatcagcaattttccagctatgaacctgaactctttcccggtctcatttaccgtatgattaagccacggattgtgctcctgattttcgtgagcgggaaagtggtgctcacaggagcgaaggttagagccgagatttacgaggccttcgagaatatttatcccatcctgaaagggttccgaaagaccacttag

SEQ ID NO: 119400 - DNA, 519 bp, synthetic construct
  misc_feature 1..519: note = Description of Artificial Sequence: Synthetic coding sequence
  source 1..519: mol_type = other DNA
atggggcaggagtttagttgggaggaagcagaagcagccggcgagatcgatgtcgcagaactccaggagtggtataaaaagtttgtgatggagtgcccttcaggcactctgttcatgcatgaattcaaacgctttttcaaggtgacagacgatgaggaggcctcgcagtacgtggaaggaatgtttcgtgcattcgataaaaatggagacaacaccattgactttctggagtacgtcgctgctctaaaccttgtcctccggggcacccttgagcacaaactgaagtggaccttcaagatatacgacaaggacggcaacggttgtatagatcggctggagttgctgaacatcgtggaatgtcggcgggagctacagacagaacaaggacagctgctcacgccggaagaagtggtggatcgcatctttttactcgtggatgagaacggggacggccagctgagcctgaatgaatttgtggaaggtgctcgcagggataacctgcttatgcccactctctag

SEQ ID NO: 119401 - DNA, 630 bp, synthetic construct
  misc_feature 1..630: note = Description of Artificial Sequence: Synthetic coding sequence
  source 1..630: mol_type = other DNA
atgggcaatggcaaatctatcgccggggatcagaaggcagtgcccacacaggagacacacgtatggtatcgcacattcatgatggagtacccatccgggctacagacacttcacgagtttaagacactgctgggccttcagggccttaatcaaaaagccaacaagcacatcgaccaggtgtataatactttcgacaccaataaggacggcttcgtagactttctggaatttattgcagcagtgaatctaatcatgcaggaaaagatggagcaaaagttgaagtggtactttaagctctatgacgcagacggcaacgggagcattgacaagaatgaactgctggatatgttcatggctgttcaggccctgaatggccagcagacattgtctcctgaagaattcattaaccttgttttccacaaaattgacattaataatgacggcgagctcacactggaggagtttatcaatgggatggcaaaggaccaggacttattggaaatcgtgtataagtcgtttgacttttctaatgttctgcgggtgatatgtaatggaaaacagcccgacatggagactgatagttccaaatctccagacaaagctggactgggaaaggtaaaaatgaagtag

SEQ ID NO: 119402 - DNA, 591 bp, synthetic construct
  misc_feature 1..591: note = Description of Artificial Sequence: Synthetic coding sequence
  source 1..591: mol_type = other DNA
atgggaaatggcaagtcaatcgctggagaccaaaaggccgtgccaactcaggagacacatgtgtggtatcggacttttatgatggagtatccatctggcttacaaactcttcatgaattcaagaccttactgggcttacagggcctcaaccaaaaggcaaacaagcacatcgaccaggtgtacaatactttcgataccaacaaggatggcttcgtcgacttcctggagtttatagccgctgtgaatctgattatgcaagagaagatggagcagaagctcaaatggtactttaagctctatgatgccgatggaaacggatctattgataagaacgaactgctcgacatgtttatggctgtccaagccctgaacggccagcaaaccctctcccccgaggaatttatcaacctcgtgtttcataagatcgacattaataacgacgggaacggagcaacactgtattggattacattcccaacaaaagggatcgattttcgaaggatctatcagtggcacggtaagaggtccggaagcccaggagattgtctgcaggaactccgactcctccagtgcgcagaatccaatctttag

SEQ ID NO: 119403 - DNA, 348 bp, synthetic construct
  misc_feature 1..348: note = Description of Artificial Sequence: Synthetic coding sequence
  source 1..348: mol_type = other DNA
atgaatgcctttttgctgagcgctctgtgcctactcggggcttgggcagccctcgctggaggcgtcaccgtacaggatggaaatttttctttttccttggaatctgtcaagaagctaaaagatctgcaggagcctcaggagcctcgggtgggtaagctgcgaaacttcgcgcccatacccggtgaaccagtcgtgccgattctttgttcgaaccctaacttccctgaggaactcaagccattatgcaaggaaccaaacgcacaagagatacttcagcggcttgaggagatcgccgaagatcctggaacctgcgagatctgtgcatatgccgcatgtactggatgttag

SEQ ID NO: 119404 - DNA, 339 bp, synthetic construct
  misc_feature 1..339: note = Description of Artificial Sequence: Synthetic coding sequence
  source 1..339: mol_type = other DNA
atgggatgtcgtgctgcttctggtctgttgccaggggtcgctgtggttctgctgctgctgcttcaatccacccagagcgtatatatacaataccagggctttagggtccagctggaatctatgaagaagctgtccgatttagaggcacagtgggctccctcccctaggcttcaagctcagagcctgctgcctgctgtgtgccatcatcctgctctccctcaggatcttcagcctgtctgcgccagccaggaggcaagtagcatttttaagaccctgaggaccatcgccaatgacgactgtgaattatgcgtcaatgtggcatgtaccggctgtctgtag

SEQ ID NO: 119405 - DNA, 594 bp, synthetic construct
  misc_feature 1..594: note = Description of Artificial Sequence: Synthetic coding sequence
  source 1..594: mol_type = other DNA
atgagcgggccccggcccgttgtcctcagcgggccctccggcgccggcaaaagtaccctcctgaagcggctgttgcaagagcatagtggcatctttgggttttctgtgtcgcacactacgcggaatcctcgcccaggggaggagaacgggaaagattactacttcgtcacccgtgaagtgatgcaaagggatatcgctgccggagatttcatcgagcatgctgagtttagcggcaatctctacggtacctctaaggttgcagtgcaggccgtacaggccatgaatagaatctgtgtgttagatgtagatcttcaaggggtacggaacattaaagccacagatcttaggcctatctacatctccgtacaaccccctagcctgcatgtgttagagcagagactccggcagagaaacaccgaaactgaggaatccctggtcaagaggctggcagctgcgcaggccgatatggaaagcagcaaagagccggggcttttcgatgttgtcatcataaacgacagtctggaccaggcttatgctgaacttaaagaggctctgagtgaagaaattaagaaggcacagcgcacaggcgcctag

SEQ ID NO: 119406 - DNA, 594 bp, synthetic construct
  misc_feature 1..594: note = Description of Artificial Sequence: Synthetic coding sequence
  source 1..594: mol_type = other DNA
atgtctggccccaggccggtagtcctctctggcccaagtggggcaggcaagtccacactcttaaaaagactgctgcaggaacactctgggatcttcggcttctctgtgagtcatacaacgcgcaacccgaggcccggagaggagaatgggaaggactactacttcgttacaagggaagtgatgcaacgggacattgcagcaggcgacttcatcgaacacgccgaattcagcggcaacctgtatgggacaagcaaggtggctgtgcaagccgtccaggcaatgaaccggatttgcgtactcgatgttgacctccaaggagtgagaaacattaaagcaacagacctgcgccctatctacatatccgtccagcctcccagcctgcacgttctggagcaaaggctgaggcaaaggaatacagagacagaggagagccttgtaaagagattggcagctgcccaggcggacatggaatcatcgaaagagcctggcttgtttgatgtagttattataaacgactctctcgatcaggcatatgcagagctcaaggaggcccttagcgaggaaataaagaaggcgcagcgaactggggcttag

SEQ ID NO: 119407 - DNA, 594 bp, synthetic construct
  misc_feature 1..594: note = Description of Artificial Sequence: Synthetic coding sequence
  source 1..594: mol_type = other DNA
atgtctgggcctcggcccgtggtcctgtctgggccttccggcgccggtaaaagcactcttctaaaaaggttgctgcaggagcacagtgggatcttcggctttagcgtgtcacatactacaaggaatcctagacccggggaagaaaatggaaaggactactatttcgttactagagaagtcatgcagcgggacatcgccgccggcgactttatcgagcatgctgaattttccggaaatctatacggcacttcaaaagtggccgtgcaggcggtacaggccatgaaccgcatttgcgtgctcgacgttgacctgcagggcgtccgaaacattaaggccacggacctgagacccatatacattagtgtccagccaccaagcctacatgttctagagcagcgattgcggcaaaggaacacagagaccgaggagtccctcgtgaaacgactggctgctgctcaggccgacatggaatcctcaaaagaacccggcctgttcgatgtagtgatcatcaatgacagtctggatcaggcatacgccgagcttaaagaggcattatccgaggagatcaagaaggcacagcgcacaggcgcctag

SEQ ID NO: 119408 - DNA, 600 bp, synthetic construct
  misc_feature 1..600: note = Description of Artificial Sequence: Synthetic coding sequence
  source 1..600: mol_type = other DNA
atgagcggacctcgcccagtggtcttatccggccctagcggcgccggaaagagtactcttttgaagagactgttgcaagagcactcagggatttttggctttagtgtctcccgcgagtccagggcactcgtcgaaggataccatgaagagcctgaagctcgccgcggagaacgtcagcgagaggtgatgcagcgggacattgccgctggggatttcatcgaacacgcagagttctccgggaatctctatgggactagcaaggtcgccgtacaggccgtccaggcaatgaataggatttgcgtcttggacgtggatcttcagggggtgagaaatattaaggccaccgacctgagaccaatctatatcagtgtgcagccacctagcctacacgtcctcgagcaacgattgcgccagagaaatacagagactgaagaatcactggtgaagagactggctgctgcccaggccgacatggaatccagtaaggagccaggtctctttgacgtcgtcattataaacgatagtcttgatcaagcttacgccgagttgaaggaagccctaagcgaggagataaagaaggcacagcgcactggtgcctag

SEQ ID NO: 119409 - DNA, 729 bp, synthetic construct
  misc_feature 1..729: note = Description of Artificial Sequence: Synthetic coding sequence
  source 1..729: mol_type = other DNA
atgagcggtccgcggcctgttgtactctcaggtccctccggcgcaggtaagagcacccttctgaaaagattgctccaggaacacagtggtatttttggcttctctgtgtcgcacacaacccggaatccccgtccgggagaagaaaacggcaaggactattattttgtgacaagggaagttatgcaacgggacatcgcagccggtgatttcatcgaacacgccgagttcagtggtaacctttacggtacttcaaaggtggccgtccaggcagtccaagccatgaaccgcatctgcgtgctggacgtcgacctgcagggagtgcgcaacatcaaggctactgacttacgtccaatctacatttccgtgcagccaccctccctgcacgtattacggttgagacagagaaacaccgagacagaagagtctcttgtaaagcggcttgcggctgcccaagccgatatggaaagcagtaaagaacccggtttgtttgatgtggtgattatcaatgacagcttggatcaggcttacgccgagctgaaagaagccctgagcgaggtggggccaagtctttgtctgcctgggcaaggccctagaggtgggctgggggctaggcctttactcagtatgcgacccctgagaaagagccggaagcttaaggggcccgcccccgaggcatgctgtctgttttcagctccaagggcacacacaggccctggacaacagcactag

SEQ ID NO: 119410 - DNA, 657 bp, synthetic construct
  misc_feature 1..657: note = Description of Artificial Sequence: Synthetic coding sequence
  source 1..657: mol_type = other DNA
atgttgagacgcccgctagccggtctcgccgccgcggctctgggccgcgcacctcctgacgggatgagcgggccacggcccgtcgtcctcagcggcccctcaggtgcagggaaaagcaccttgctaaagcggctgctgcaagaacactccggaatttttggattttctgtgtcacataccacaagaaaccctaggcctggagaagagaacggaaaggactattacttcgttacaagggaggtcatgcagcgtgatattgccgctggcgatttcattgagcatgctgagttttctggcaatctttatggcacatccaaagtggcagtgcaggcggtgcaggctatgaatcgaatctgtgtgcttgacgtagatttgcaaggggtacggaatattaaagcaactgacctgagaccaatctacatatccgtccagccaccatctctgcatgtactggagcagagactgcgacagagaaacaccgaaacagaagagagcctggtaaaaaggctggccgccgctcaagcagacatggaaagcagtccggccggcttggaatcttgtcccacggccgctgttcggacagctgccggccaatcccccgcatgtctgatgtggtcttcgctgaccactgcctggacacggcctacgcagagttag

SEQ ID NO: 119411 - DNA, 594 bp, synthetic construct
  misc_feature 1..594: note = Description of Artificial Sequence: Synthetic coding sequence
  source 1..594: mol_type = other DNA
atgtcaggtcctaggccagtcgttttgagtggtccctcgggagctggaaaaagtacgttactcaagaggctacttcaagagcatagcggtattttcggcttctctgtgtcccatacaacccgcaaccctcgcccaggggaggagaacggaaaggactactatttcgtgacgagagaggtaatgcaacgtgacatcgcagccggtgattttattgagcacgccgaattcagcggcaatctgtacggtacttcgaaggttgcagtgcaggccgtccaggccatgaaccgaatttgtgtcctggacgtggatctccagggggttcggaatattaaagctaccgatctgagacctatctatatttctgtgcagccaccgtccctgcatgttcttgaacagaggcttcgacaacgcaatacagagaccgaagagagcctagttaaaaggctggccgccgcacaggccgatatggagtcttctaaggagcccggtctgtttgacgtcgttatcatcaatgactctctggaccaagcctatgctgagttaaaagaggccttatctgaagagatcaagaaggcacaaaggaccggtgcttag

SEQ ID NO: 119412 - DNA, 726 bp, synthetic construct
  misc_feature 1..726: note = Description of Artificial Sequence: Synthetic coding sequence
  source 1..726: mol_type = other DNA
atgcttcgaagaccattagctggcttggccgccgccgccctcgggcgggctccgcctgacgggatgagtggaccccggccagtcgtacttagcggtccaagcggcgcaggcaagtctaccctactgaagaggttgctccaggaacactcagggattttcggattcagcgtctcgcacaccaccaggaacccccgcccaggcgaggagaatggtaaggactactacttcgtcacacgggaagtcatgcagagggacatcgcagccggagacttcattgaacacgcagagttctccggaaatctgtatggaacatctaaggtagccgtccaggctgtccaggccatgaaccgtatttgtgtgctggacgtggatcttcaaggcgtcagaaacatcaaagcgaccgacctgcgccccatttacatcagcgtccagccgcctagcctgcatgtcctggaacagcgtctaagacagcgtaataccgagaccgaagagtccctcgtcaaacgacttgctgcagcgcaggcagacatggagtcgagaaatcaggaatcaagtaaggaccggaggctgaggctggcagtctgttccagacaccctggtcctattcaggaccaggggtcttctattgagccccctccatggcaggctatcaggcagctctgcgctctgggccaacatgtcgagtggcggaggtgttgtccgtgtggatggaatattttgggctag

SEQ ID NO: 119413 - DNA, 594 bp, synthetic construct
  misc_feature 1..594: note = Description of Artificial Sequence: Synthetic coding sequence
  source 1..594: mol_type = other DNA
atgtcaggacccagaccagtcgtgctctctggcccttcgggcgccggcaaatctactttgctgaagcgcttgttgcaggaacacagtggcatctttggtttttctgtgagtcataccactaggaatcccagacccggtgaggagaacggcaaagactattacttcgtaacgcgggaagtaatgcagagggacatcgctgctggcgactttatagagcacgcagaattttccggcaacttgtacggcacctctaaggttgctgttcaagcggttcaggcaatgaatagaatctgcgtgctggacgtcgatctgcaaggcgttaggaacattaaagccactgatttaaggcccatctacatttctgtccagcctccgtcgctgcacgtgctcgagcagcggctccgccagcgaaatacagagacagaggagtctctggtgaagaggctggccgcggcccaggccgacatggagagttccaaagagcccggtcttttcgacgttgttataataaacgacagcttggatcaggcctacgctgagctgaaagaagctttgagtgaggagattaaaaaggcccaacgaaccggcgcctag

SEQ ID NO: 119414 - DNA, 657 bp, synthetic construct
  misc_feature 1..657: note = Description of Artificial Sequence: Synthetic coding sequence
  source 1..657: mol_type = other DNA
atgctgcgcagaccattggctgggcttgcggctgctgccttgggaagagctccacctgacggcatgtcggggcctagacccgtggtgctctccggccctagcggtgccggcaagtcaactctcctgaaaaggctgctgcaggaacacagcggaatcttcgggttcagtgttagtcacaccacgcggaacccccgcccgggcgaagagaacgggaaagactattactttgtgacccgtgaagtaatgcaaagagacattgccgccggtgattttatagagcatgctgaattctctggtaacctctacggaaccagcaaagtcgccgtgcaggccgtgcaggccatgaacagaatctgtgtgcttgatgtggacctccaaggtgtccggaacattaaagcgacagacttgagacctatctacatctcagtacaaccaccatccttgcacgtcctggagcaacggcttcggcagaggaatacagagactgaggaaagtctggtgaaaagactcgcggccgcccaggctgatatggagtcctccaaggagcccggcctctttgacgttgtgattataaatgattcgttggatcaggcttatgcggaactgaaagaggctttgtccgaggagatcaaaaaagcccagcggacaggggcctag

SEQ ID NO: 119415 - DNA, 762 bp, synthetic construct
  misc_feature 1..762: note = Description of Artificial Sequence: Synthetic coding sequence
  source 1..762: mol_type = other DNA
atggccggtagtcaaaaggaggaaatcatgccaccacagcagggggtgcccttccaggagagcgggtgctggggttccatgggcgcccagtccagggaaaggtctggaagagatcatagtggtacttggatttgtgcgggaggcagtcaggaaacatttcatctgggagcccccgtcgagaccacttgcctggctggcatgtcaggtccaagacctgttgtgctttccggtcccagcggagctggcaagtcaaccctgctcaagaggctcctgcaggagcattcgggaattttcggtttctcagttagccacactacgcgcaaccctaggccaggagaggagaatggaaaggactactactttgtgacaagggaggtgatgcagcgcgacatcgccgccggagattttatcgagcacgctgagttctccgggaatctgtacggaaccagcaaagtggccgtgcaggcagtccaggccatgaaccggatatgtgtcttggacgtagacctgcagggagtcaggaacatcaaggccacggacctgcgtccaatttacatttctgtacaaccgccatcactgcatgttttggaacaaagactgcgacagcgtaatactgaaacggaagaatccttggtgaaaagactcgctgccgcgcaggccgatatggaaagtagtaaagaacccggactttttgatgtggtgatcatcaacgacagtttggaccaggcgtacgcagagctaaaggaggcgctgtccgagtag

SEQ ID NO: 119416 - DNA, 516 bp, synthetic construct
  misc_feature 1..516: note = Description of Artificial Sequence: Synthetic coding sequence
  source 1..516: mol_type = other DNA
atgtccggcccacggcccgtggttctgagtggaccaagtggggccgggaaaagcacccttctaaagcgtctgcttcaggaacactcaggaatttttggcttctcagtctcacgcgagagcaacaccacacgaaacccaaggcccggggaggagaacggcaaagattattacttcgtgacaagggaggtgatgcagcgggatatagccgcaggagactttatagagcacgccgagttttctggaaacctatatgggacctccaaagtggctgtgcaggcggtgcaggccatgaataggatctgcgtcctggatgtggacttgcaaggagtccgtaacatcaaggctacagacttgaggccaatttacatttcagttcagccgcctagtcttcatgtcctggagcagagattaaggcagcgaaacacggagacggaggagtccttggtcaaaaggctggctgcagcccaggccgatatggaaagcgagattaagaaggcccagaggacaggggcatag

SEQ ID NO: 119417 - DNA, 819 bp, synthetic construct
  misc_feature 1..819: note = Description of Artificial Sequence: Synthetic coding sequence
  source 1..819: mol_type = other DNA
atggccggctcccagaaggaagagattatgccccctcagcaaggcgtgccctttcaggaatcaggttgttgggggtctatgggcgctcagtctcgggaacggagcggccgggatcactccggaacttggatctgcgcgggagggtcacaggagaccttccacttaggagccccagtggaaacgacctgccttgctgcctctctcctgaccccgcgccacgtgggcccacaggcctgtggcgccgagcgcgcttttggatcctgggaggagcacccggctgaagaggctgcacctggggctcaaagacatctgtggctgcagcgagtgccctatcacgaagaacccgaggctcgccgaggcgagcggcagagagaggtcatgcaaagggacatcgcagccggcgactttattgaacatgccgagttctctggtaacctgtacgggacttctaaggttgctgtccaggcagtccaagctatgaaccgaatttgcgtcttggatgtcgatctgcagggagtgaggaatatcaaggcgaccgacctgcgtccaatctatatctcagtacaacctccttccctccacgtactggagcagagacttcggcagaggaacaccgagactgaggaaagtctcgtcaaaaggttggccgcggcgcaagcggatatggagtccagaaatcaggaaagctccaaagatcgaaggctgaggctcgcagtatgctctaggcaccccggtcctatccaggaccagggctcatcgatcgagcccccgccatggcaagccattcggcagttatgcgcgctggggcagcacgtgtag

SEQ ID NO: 119418 - DNA, 654 bp, synthetic construct
  misc_feature 1..654: note = Description of Artificial Sequence: Synthetic coding sequence
  source 1..654: mol_type = other DNA
atgctgcgccggcctctggccggcctggcagctgctgccctcgggcgtgcccccccggacggcatgagcggcccgcgaccggttgtcttgtctggccccagcggcgctggaaagagcactctgcttaagcgattgctacaagagcactcagggatctttggcttttccgttagccatactaccagaaacccacggcccggagaggaaaatggcaaagactattatttcgttacgcgggaagttatgcagcgggacattgccgcgggcgatttcatcgaacacgcagaatttagtggaaatctgtatggaaccagtaaagtggccgtgcaggctgtgcaggcgatgaaccgcatttgcgtcctagacgttgatctgcagggtgtgagaaatatcaaagccacggatttgaggcctatatatatcagcgtgcagcctccttctctgcacgttctggagcagagattgcggcagaggaacacagagaccgaggagagtctggtaaaacgtctcgccgccgcccaggccgacatggagagtagtaaagagcccggcctctttgacgtggtgataatcaacgactccttagaccaggcgtacgctgagctaaaggaagcactttcagaggaaattaaaaaagcgcagagaaccggctag

SEQ ID NO: 119419 - DNA, 915 bp, synthetic construct
  misc_feature 1..915: note = Description of Artificial Sequence: Synthetic coding sequence
  source 1..915: mol_type = other DNA
atgaacagagctttcagtaggaagaaggacaaaacatggatgcacacgccagaggctctcagtaagcatttcattccgtacaatgccaaattcctgggaagcaccgaagtagagcagcctaagggaaccgaggttgtcagggatgctgtgcgaaagctaaagttcgcaaggcacatcaagaagagcgagggtcagaagatcccaaaggtggagctgcagatctccatttacggtgttaaaatcttagagcctaaaaccaaggaggtccagcacaattgccagctccatagaatatcattttgtgctgatgataagacggataaacgaatcttcaccttcatctgcaaggattcggaaagcaataaacacctgtgctacgttttcgattccgagaagtgcgcagaggagataactctgactatcggacaggctttcgatctggcctacaggaagttccttgagagcggaggtaaagacgtggagacgagaaagcaaattgcgggcttgcaaaagcgaattcaggaccttgaaaccgaaaacatggaactcaagaataaagtccaggaccttgagaaccagcttaggatcacacaggtgtccgctcctcctgccgggtctatgacaccaaaatccccctctacagatatttttgacatgatccccttcagccctatttcccaccagtcctcaatgcccactaggaatgggacccagcctccccccgtgcctagcaggtccaccgaaatcaaaagggacttgtttggagccgagcccttcgacccattcaattgcggggcggctgactttccccccgatatccagtcgaagcttgatgagatgcaggagggctttaagatgggcctgacactagagggcacggtcttttgcctggaccccctggattctcgttgttag

SEQ ID NO: 119420 - DNA, 915 bp, synthetic construct
  misc_feature 1..915: note = Description of Artificial Sequence: Synthetic coding sequence
  source 1..915: mol_type = other DNA
atgaatcgggccttcagtcgcaagaaggataaaacttggatgcacacgcccgaggctctttccaagcactttattccctataatgctaagtttttgggttcaaccgaggtggaacagccgaaggggaccgaggttgttagagacgccgtccgcaagctaaaattcgcccgtcatattaagaaatcagagggacagaaaattccaaaggtagagttgcagatctccatttacggagtaaagatactggaaccaaaaactaaggaagttcagcataattgccagctacatcgaatttctttctgcgccgatgataagacagacaagcggatttttaccttcatctgcaaagatagtgagagcaacaagcacttatgttacgttttcgactcggaaaagtgtgctgaagaaatcacactcactattggacaggcgttcgacctcgcctacaggaaattcctggagtccggaggaaaggacgtcgagactagaaaacagatcgccggcctgcagaaaagaatccaggatttggaaaccgaaaatatggagctcaaaaacaaagtgcaggacttggagaaccagctgcggatcactcaggtctcagcgccacccgcaggctcaatgactcctaagagtccgtctaccgacatcttcgatatgatcccattcagtccgatcagccatcagtcttccatgcctacgagaaacgggacacagccaccgcccgtaccgtccaggtcaacagaaattaagagagatctgttcggtgccgaacccttcgatccttttaactgcggcgctgccgatttcccgccggacattcagagtaaactcgacgaaatgcaagaagggttcaagatggggctgaccctcgagggaacggtgttttgcctcgaccccctcgacagtaggtgttag

SEQ ID NO: 119421 - DNA, 915 bp, synthetic construct
  misc_feature 1..915: note = Description of Artificial Sequence: Synthetic coding sequence
  source 1..915: mol_type = other DNA
atgaatagagcgttttctaggaagaaagacaaaacttggatgcacactcccgaagccttgagcaagcatttcatcccatacaacgcgaagttccttggttccaccgaggtagaacagcccaaagggaccgaggtcgttagagatgccgttagaaagttaaagttcgctcggcatattaagaagagtgagggacagaaaattcctaaagtagaactgcaaattagtatctatggtgtcaaaattctggaacccaaaacaaaagaggtgcagcataactgtcagctgcatagaatctctttctgcgcggatgataagacagacaaaaggatctttaccttcatctgcaaggattctgagtcaaataaacacctctgctatgtgtttgattccgagaagtgtgccgaggagatcacactgacaattgggcaggcattcgacctggcgtaccgtaaattccttgagagcgggggaaaagacgtagagacacgcaagcagattgcaggcctgcagaaaaggattcaggatcttgaaaccgagaatatggagctcaaaaacaaggtgcaagatctcgagaaccagctcagaatcactcaggtttctgcccccccagccggatcaatgactccaaagtcacctagtactgacatcttcgacatgattcctttttcacccatctctcatcagagctcaatgccaactagaaacggaacacaaccacctcctgtcccctctcgttcaaccgagataaaacgagacctgtttggcgcggagccgttcgatccgtttaactgcggagcagcagattttcctccggacatccagtctaagctcgatgagatgcaggaaggatttaaaatgggcctgaccctcgaggggaccgtgttctgtctggatcccctggacagtcgatgttag

SEQ ID NO: 119422 - DNA, 504 bp, synthetic construct
  misc_feature 1..504: note = Description of Artificial Sequence: Synthetic coding sequence
  source 1..504: mol_type = other DNA
atgaacagggctttttctcggaaaaaggataaaacctggatgcacacacccgaggccctctcgaagcatttcataccctacaatgccaagtttctcggttctaccgaggtggagcaaccgaaaggaacagaggttgtgagggatgctgtgaggaagcttaagtttgctcgacacattaaaaaatccgagggccaaaagattcctaaggtggaactgcagattagcatctacggtgtgaagatactcgagcccaaaactaaagaagtgcaacataactgccaactgcaccgaattagcttctgcgcagatgataagaccgacaaaagaatattcacattcatttgcaaagattccgaatccaataaacacctgtgttatgtgttcgatagcgaaaagtgcgtctctatacctgacgtggtaggttggtttgtgcttttttataaacccgggattgtgctgcttctggccttagctaaataccttaagatgaacaactttttgtag

SEQ ID NO: 119423 - DNA, 915 bp, synthetic construct
  misc_feature 1..915: note = Description of Artificial Sequence: Synthetic coding sequence
  source 1..915: mol_type = other DNA
atgaatcgggcattctcgaggaagaaggacaaaacatggatgcatactccagaagctctatcaaagcatttcatcccgtacaatgcgaaattcctggggagtaccgaagtagaacagccaaagggtacggaagttgtgcgtgacgcggtccgcaagctgaagtttgcgcgccacatcaagaagtctgaaggccagaagattccaaaagtcgagttacaaatctccatttacggggtgaagatacttgaaccgaaaaccaaagaggttcagcataattgccagctccacagaatcagtttctgcgcagatgataagaccgataaaagaatctttacctttatctgcaaagattctgagtccaacaagcacctgtgttatgtgtttgatagcgaaaagtgtgcggaggagataaccctgaccatcggacaggcctttgacctcgcctacaggaagtttctggagtcaggcggaaaagacgtcgaaactaggaaacagattgcgggcctgcagaagcggatccaggacctggagacagaaaatatggagcttaaaaacaaggtccaggacctggagaaccagctgcgaatcactcaggtcagtgccccacccgctggatccatgacccctaaatctccatcaacggatattttcgacatgataccattttcccctatctcccaccaaagctcaatgccgacaagaaatgggacccagcctccacccgtgcccagtcggtctaccgagattaagcgcgatcttttcggcgcggaaccattcgacccctttaactgtggtgccgcggattttccccccgacattcagagcaagctcgacgaaatgcaggaaggattcaaaatggggttgacacttgaggggactgtattttgcctggaccccctggactctagatgctag

SEQ ID NO: 119424 - DNA, 207 bp, synthetic construct
  misc_feature 1..207: note = Description of Artificial Sequence: Synthetic coding sequence
  source 1..207: mol_type = other DNA
atgaatagagccttttcccgaaaaaaggacaagacctggatgcacacacccgaagctctgagtaagcatttcatcccctacaatgctaagttcctgggatctacagaagttgagcagcccaaagggacggaggtcgttcgggatgccgtaagaaagcttaaattcgcacgccatataaagaagagcgaggggcagaaaattccctag

SEQ ID NO: 119425 - DNA, 504 bp, synthetic construct
  misc_feature 1..504: note = Description of Artificial Sequence: Synthetic coding sequence
  source 1..504: mol_type = other DNA
atgaatcgagccttctcccggaagaaggataaaacctggatgcacactccagaagcattatctaagcacttcatcccctacaacgctaaattcctggggagcactgaagtcgagcagcccaagggtacggaagttgtgcgagatgctgttcggaaactgaaattcgcaaggcatatcaagaaaagtgaaggacagaagatcccaaaggtcgagcttcagatcagcatctacggagtcaaaattctggaaccaaaaactaaggaggtgcagcacaactgccagctccaccgtatttccttctgcgcggatgacaagactgacaagcgcatctttaccttcatttgtaaagactctgaaagtaataagcatctgtgctatgtgttcgattcagaaaaatgtgtgagcatcccggatgtggttggatggtttgtccttttctataagcctggcatagtactgctgctagctctcgcaaaatatctgaaaatgaataacttcctgtag

SEQ ID NO: 119426 - DNA, 585 bp, synthetic construct
  misc_feature 1..585: note = Description of Artificial Sequence: Synthetic coding sequence
  source 1..585: mol_type = other DNA
atgactgagaatagtaccagcgctccggctgctaaacctaagcgggctaaggcctcaaaaaagagtacagatcatcccaagtatagcgacatgatcgtagcagctattcaggctgagaagaatcgcgccggttctagccggcagtccatacagaaatatataaaaagccactacaaggtgggcgaaaacgccgacagccagataaagcttagtattaaacgcctcgtgacaaccggcgtgttaaaacagactaaaggggtaggagccagcggttcctttagactggccaagtccgacgagcctaagaagagcgttgcatttaaaaagaccaaaaaggagataaagaaagtcgccacacccaaaaaagctagcaagccaaagaaggccgcctcgaaggctcctacaaagaaacccaaagcaacccccgtgaaaaaagccaagaagaaactggcggctacacccaaaaaagcaaagaaacctaaaacggtgaaggcaaagcccgtcaaggcctcaaagccaaaaaaggctaaacccgtgaagcctaaagccaagtctagcgcgaagcgcgcgggaaaaaagaagtag

SEQ ID NO: 119427 - DNA, 534 bp, synthetic construct
  misc_feature 1..534: note = Description of Artificial Sequence: Synthetic coding sequence
  source 1..534: mol_type = other DNA
atgacagaaaaaagtacagatcaccccaaatactccgatatgatcgtcgctgcaatccaggccgagaaaaatagagccgggtcttcacgtcaatcgattcaaaagtatatcaagtcgcattataaggtcggggaaaatgctgactctcagatcaagctgagcattaaaagacttgtgaccacaggtgtcctcaaacagaccaaaggagtgggtgcaagcggctcctttagacttgccaagagcgacgaaccaaagaagtctgtggctttcaagaagactaaaaaggagatcaaaaaggtcgcaacgccaaaaaaggcttccaagccaaaaaaggccgcttcaaaagcccctactaagaaacccaaagctacaccagtgaagaaggcaaagaaaaaactggcggcaacaccaaagaaggccaaaaagccaaaaacagttaaggccaaacccgttaaagcgagcaagccaaagaaggccaagccagtcaaaccgaaggcgaagtcatcagccaaaagagcaggcaagaagaaatag

SEQ ID NO: 119428 - DNA, 411 bp, synthetic construct
  misc_feature 1..411: note = Description of Artificial Sequence: Synthetic coding sequence
  source 1..411: mol_type = other DNA
atggctcgcacaaaacagactgcccgcaaaagtaccggtggtaaggccccccggaaacagttggcaactaaggccgctcgcaagagcgcccctagcacgggcggcgtgaagaaaccacacaggtaccgcccaggtactgtagcacttagggaaatccgccggtatcagaagagcacggagcttctgatccgtaagctgccgtttcagaggctggtacgggagatcgcccaagatttcaagacagacttgcggtttcaatccgcagctatcggagccctccaggaagcatcagaggcatacctcgtgggcctgtttgaggacacaaacttgtgtgcgatccacgcaaaacgtgtgaccatcatgcccaaggacattcagttggcccgaaggatcagaggagagagagcatag

SEQ ID NO: 119429 - DNA, 372 bp, synthetic construct
  misc_feature 1..372: note = Description of Artificial Sequence: Synthetic coding sequence
  source 1..372: mol_type = other DNA
atggccagaactaaacagacagcaaggaagtctactgggggaaaagcgccaagaaaacaactcgcaacaaaggcggccagaaaatctgctccaagcactggaggggtgaagaagcctcatcgatataggcctgggaccgtggccctacgcgaaattcggagataccagaaatccactgagctcctgataagaaagctgccgtttcaacgattggtgcgcgaaattgcacaagattttaaaactgaccttcgctttcagtccgccgccatcggcgcccttcaagtgaaatggtgggtgggtcgcttacgcgtgtgtatacccgtcgtttatcaggagcaatttcaaatcgtagcatgcgcatatatcatctag

SEQ ID NO: 119430 - DNA, 411 bp, synthetic construct
  misc_feature 1..411: note = Description of Artificial Sequence: Synthetic coding sequence
  source 1..411: mol_type = other DNA
atggctcgaactaagcagacagcaagaaaaagtaccggaggcaaagcaccaagaaagcagcttgccaccaaggctgcccgaaagagtgccccatccaccggcggggtcaagaagccacaccgctatcgcccaggaaccgtggcactgagagagattcgccggtatcaaaagtctacggaactgctaataaggaaacttcccttccagcgccttgtaagggaaattgcccaagactttaagaccgacctgcgattccagtctgctgcaataggtgcattacaggaggcctcagaggcgtatcttgtggggttgttcgaggacactaatctgtgcgctatccatgccaaacgggtgaccatcatgcccaaagatattcagctggctaggcggattagaggagagcgggcctag

SEQ ID NO: 119431 - DNA, 411 bp, synthetic construct
  misc_feature 1..411: note = Description of Artificial Sequence: Synthetic coding sequence
  source 1..411: mol_type = other DNA
atggccaggactaagcagactgcacgaaagagcaccggtggcaaagctccccgcaaacagctggcaacaaaagctgccaggaaaagcgccccttctacaggcggggtgaagaaacctcatcgataccgtccaggcaccgttgccctgagggaaatccggagatatcagaaaagcactgaactcttgatcagaaaactgcccttccagcgcctagttcgcgagattgctcaggacttcaagactgacttaagatttcagtcagcagcaatcggtgcattgcaggaagcatctgaggcatacctcgttggcctattcgaagacaccaatctgtgtgccatacacgctaagcgcgtcactatcatgccgaaggatatccaactcgcccgccggattagaggggagagagcctag

SEQ ID NO: 119432 - DNA, 411 bp, synthetic construct
  misc_feature 1..411: note = Description of Artificial Sequence: Synthetic coding sequence
  source 1..411: mol_type = other DNA
atggcaagaacaaagcagacagcacgaaagagcactgggggaaaggcaccacgcaaacagctcgctacaaaggcagctcgaaaatccgccccaagcaccggcggcgttaagaaacctcatcgctatcgaccaggcaccgtggctctgagggaaatcagacgctatcagaaatccacagagttgcttatccgaaagctgcccttccagcggttggtgcgcgaaatcgcccaggacttcaaaactgaccttcggttccagagtgctgccatcggggctctgcaggaggcctcagaagcctatctggtggggttattcgaggacaccaacctttgcgccatccatgctaagcgtgttactatcatgcccaaggacatccagctagcacggaggatcaggggtgagagagcctag

SEQ ID NO: 119433 - DNA, 1047 bp, synthetic construct
  misc_feature 1..1047: note = Description of Artificial Sequence: Synthetic coding sequence
  source 1..1047: mol_type = other DNA
atgcccgatgaactgaccgagcccgggcgcgccacccccgctagagccagtagctttttaatcgagaatcttcttgccgctgaagcaaagggagctgggcgggccacgcagggtgacggttcaagggaagatgaagaggaggacgacgacgaccccgaggacgaggatgcagagcaggcccggaggcgccgcctgcagcgaagacgccagctcctggcaggcacaggtcctggaggagaggcccgagcacgggcgctgctggggcccggcgccctcggcttaggaccccgtcccccacctggaccggggccacccttcgcgttggggtgtggcggcgctgctaggtggtaccccagagcacacggcgggtacggaggcggcctgtcccccgatacgagcgatagagacagcccggagaccggagaagaaatgggcagagcagagggcgcttggcctcgcggccctggtccgggcgccgtccagagagaggcagctgaacttgcggctcgcgggccggccgccggtacagaggaggctagcgaattggctgaagtacccgctgccgccggtgagactagaggcggggttggcgtcggtggaggtagaaagaagaagacccgcaccgtgttcagtcgctcccaagtcttccagcttgagagcacttttgaccttaagcgatacctgtcaagcgctgagcgcgccggactcgcggcctcccttcagcttactgagacgcaagtcaagatttggttccagaacaggcgaaataagtggaaacgccagctagcagccgagttggaggctgcctccctgtcaccgcctggagcccaacgcctggtgcgggtgcccgttctgtatcacgagtcgccacctgccgctgcagccgcaggccctcccgcaactctcccattccctctggccccagccgcgccggccccccctccgcctctcctcggcttcagtggcgccttggcataccccttggccgcatttccggctgctgcttccgttccctttctgcgtgctcaaatgccaggcctcgtatag

SEQ ID NO: 119434 - DNA, 822 bp, synthetic construct
  misc_feature 1..822: note = Description of Artificial Sequence: Synthetic coding sequence
  source 1..822: mol_type = other DNA
atgggctctaaggaagatgccggaaaaggctgcccggccgccggaggcgtgtcaagctttacaattcaatccatccttggaggggggccttcggaagctccacgcgagccagtgggctggcccgcccgaaaaagatctctgtcagtttccagcgaggaagaagaaccagatgacgggtggaaggcacctgcctgcttttgccctgatcagcacggccccaaagagcaaggtcctaagcaccaccctccgatcccctttccctgtctcggaacgccgaagggaagtggcggcagtggaccagggggtcttgagcgcacgccattcctgagcccctctcacagcgactttaaagaggagaaggagagactactgcccgccggatccccttcgcctggatcggagcgcccccgtgatggaggcgccgagcggcaggcaggagcagcaaagaaaaaaactaggacagtcttttcccgctcacaggtctatcagctggagtcaaccttcgatatgaagcgctacctctcctcttctgagagagcatgtttagccagctctttgcagctcacagaaacgcaggtgaaaacgtggtttcagaaccgccggaataaatggaaaagacagctatctgccgagctggaggctgctaacatggcacatgcgagtgctcaaactttggtcagcatgcctcttgtattccgggattcaagccttctcagagtacctgttccccgtagcctggcatttcctgccccgctgtattatccaggaagcaacctttcagccctgccgctttataatctttacaataaactcgactattag

SEQ ID NO: 119435 - DNA, 1074 bp, synthetic construct
  misc_feature 1..1074: note = Description of Artificial Sequence: Synthetic coding sequence
  source 1..1074: mol_type = other DNA
atgcccgagcccggcccagatgcggctggcaccgcgtcagctcagcctcagccccccccacctccacctccagcacctaaggagagcccattctctattaagaacctgcttaacggagatcatcacagacctccccccaaacctcagccgcctcccagaactctattcgcaccagctagcgccgccgcagccgcagccgccgctgccgctgctgcggcaaagggggccctggaaggggctgcggggtttgctctgtcacaggtgggagacctggcttttccgcgatttgaaatcccggcccagaggttcgctctgcccgcccattatcttgagcggtccccggcttggtggtacccgtatacactgacacccgcgggcggacacctgcctcggcctgaagcctctgagaaagccctcctgcgggattcttcccctgcctccggtacggatagagactcaccagaacccctgctcaaggcggatccagaccataaggagctggactcgaagtcccctgacgagataattctggaagagtcagacagcgaggagagcaagaaggagggtgaagccgcccccggcgctgcaggcgccagcgtgggagccgccgctgcgactccgggagctgaagactggaaaaaaggtgcggagagtccagagaaaaagcccgcctgcaggaaaaaaaaaacacgcacggtgttctcaaggtcccaagtctttcagttggagagcacctttgacatgaagaggtacctgagtagtagtgaaagagccgggttggccgcatctttacatcttacggagacccaagtcaaaatttggtttcaaaatcgcagaaataagtggaagagacagcttgcagcggaattagaagccgccaacctctcgcacgcagccgcccagcgaatcgtaagagtgcctattctatatcacgagaacagcgctgcagagggagcagctgccgccgctgctggagcccccgtgccagtgtctcagccccttttaacattcccccatcctgtctattactcccacccagttgtaagttcagtccccctgctccgcccagtttag

SEQ ID NO: 119436 - DNA, 3405 bp, synthetic construct
  misc_feature 1..3405: note = Description of Artificial Sequence: Synthetic coding sequence
  source 1..3405: mol_type = other DNA
atggagtctaccccctccttcctaaaaggcacccctacctgggagaaaaccgcgcccgagaacggaattgtacgtcaggaaccaggatctcctcctagagatggtctccaccatgggcccctgtgcttgggcgagccagcacctttttggcggggcgtgctatccactcctgattcttggttgcctcctggtttccctcaggggcctaaggacatgcttccccttgtcgagggcgaagggcctcagaatggcgagaggaaggtgaactggctggggtcaaaggaggggttaagatggaaggaggccatgcttactcacccactcgccttttgcggaccagcttgccctcccaggtgtggcccactaatgcctgagcattctggcggccatcttaaatctgatccagtcgcctttaggccatggcattgcccattcctcctggaaaccaaaattctggagcgcgcacctttttgggtccccacgtgcctgcccccttacctggtgtcaggcctgcctcctgagcatccctgtgattggcccctcacaccgcatccttgggtgtatagtggcggtcaaccgaaggtgccgtctgctttctcactagggagcaaagggttctactataaggatccctctatcccaaggctcgccaaagagcccctcgccgccgccgagcccggactgtttgggctcaattccggcggccatctacagagagctggggaggcagaacgcccatcactgcaccaacgcgatggagagatgggcgcgggccggcaacagaatccttgtcctctgtttctgggtcaacccgacaccgtgccctggacctcatggcctgcatgtccccctggcctggtgcacacacttggaaacgtatgggccggaccaggcgatggaaatctgggctatcagttgggtccgccagctacaccgcgctgcccttcaccagagccgcccgtgacccagagaggctgctgtagctcttacccacccactaaaggggggggcttgggaccgtgcggaaagtgtcaggagggcttggaaggcggcgcctccggcgcttctgaaccttcggaagaagtcaacaaggcctcaggccctagagcttgtccaccttcgcatcacactaaattaaagaagacttggttgactaggcattcagagcagttcgaatgtccccggggctgcccagaagttgaggagcggcctgtggccaggctgcgggctctgaagcgggcaggttcccctgaggtgcagggggccatgggatcacccgctcccaagcgtccaccagatcctttccctggcactgctgagcagggcgccggcggatggcaggaggtgagggacacctccatcggcaataaagacgtcgattccggtcaacacgatgagcagaagggcccgcaggacggccaggccagtctccaggatcctggacttcaggacatcccttgtctggctctgccagccaagctagctcagtgtcagtcttgcgcccaggcagccggcgaaggaggtggccatgcatgccactcccagcaggtcagacgaagtcccctggggggcgagctccagcaggaggaagatacagccaccaacagttcatctgaggagggccctgggagtggcccggattcacgtctcagcactggcctcgccaagcacctgctaagcggcctgggcgacagactgtgtagattgctccggagggagagagaagcactagcctgggctcaaagagagggtcagggccccgccgtcaccgaggactccccaggcatcccacgatgctgctccagatgtcatcacggactgttcaatactcactggaggtgccctcggtgcagtcataggttgtgcgtagcgtgtggacgcgtcgcgggcaccggaagggcccgagagaaagccgggtttcaggagcagtcggctgaggaatgcacccaggaggcgggccacgccgcgtgcagtttgatgctgactcaatttgtttcctctcaggctttggccgaactgagcacagctatgcaccaggtctgggtgaaatttgacattcgcggccactgtccatgccaggccgatgcccgcgtgtgggctccgggggatgccggccagcagaaagaatcaacccaaaaaacaccacctactccacaacccagctgcaatggtgatactcatcgtacgaagtcaattaaagaggagacacccgacagcgccgaaacgccggcagaagaccgggctggccggggacccctcccttgtcccagtctctgcgagttattggccagcacagccgtgaaattgtgcctcggccacgagagaattcatatggcgtttgcgcctgttactccagccctgccgtcagacgatcgcattactaacatccttgacagcatcattgcacaggtcgtggagagaaaaatccaagaaaaggccctcgggccgggcctgcgtgctggcccggggcttaggaaaggactagggttaccactgtcaccagtccgccccagattgccaccgcctggcgctcttctatggctgcaagaaccacagccctgcccacgaaggggctttcacctttttcaggaacattggcggcagggccagcccgtactcgtatccggtatccagcgaaccctccaaggcaatttgtggggcaccgaggcattgggggcgttgggagggcaggtgcaggcattgtctcctctggggcctccgcagccgagtagcctaggtagtaccacattttgggaaggattttcctggcccgagttgcgccctaaatccgacgaaggtagtgtcctcttactgcatagagccctgggagacgaggatacctccagagtggagaatcttgcagcaagcctgccgctgcctgagtattgtgctctgcacggcaagttgaatctagcgagctacctcccgccaggtctcgcccttagacctctggagcctcagctctgggctgcatatggtgtgtcaccacacagggggcacctgggcacaaagaatctgtgcgtggaggtcgccgatctcgtttccattcttgtccacgcagatactccgctgccagcttggcacagggcccagaaagatttcctatcgggcctcgacggcgagggcctctggagtccgggctcacaagtcagtaccgtctggcatgtctttagagctcaagacgcccagcgcattagacgattcctgcagatggtgcagggcctggtaagcaccgttagtgtcacccagcactttcttagcccagagaccagtgctcttagcgcacagctgtgccaccagggcccttctctgccacccgattgccatttattgtatgcccagatggactgggcagtttttcaggcagtgaaggtcgctgtggggactctccaggaagccaaatag

SEQ ID NO: 119437 - DNA, 3570 bp, synthetic construct
  misc_feature 1..3570: note = Description of Artificial Sequence: Synthetic coding sequence
  source 1..3570: mol_type = other DNA
atggagtccacgccctcatttctcaagggcactcccacctgggaaaaaaccgcccccgaaaatggaattgtgcggcaggagcccggcagcccacccagggacggactccaccacggcccactatgcctgggagagcccgctcccttttggcgaggcgtgttgtcaactccagactcttggcttccacccgggttcccacaggggcctaaggatatgctgcctttggtcgagggagaaggccctcagaatggggagaggaaggtgaattggctggggtctaaggagggccttaggtggaaagaagcaatgctgacacatcctctggccttctgtggtcctgcttgtccgccgagatgtggcccactcatgcctgaacatagtgggggccacttaaaaagcgaccccgtggccttccgcccatggcactgcccgtttctgctggagacaaaaatcctagagagagccccattttgggtcccaacctgtctgcccccatatctggtaagcggactgccaccagagcacccctgtgactggcctttgactccacacccctgggtgtattcaggaggacaacctaaggttcctagcgctttttcacttgggagcaaggggttctactacaaggacccctccatccctaggcttgctaaagaaccattggcagctgccgaaccaggactgtttggtctgaattcgggagggcacctccagcgcgcgggggaggcagaaagacccagtctgcatcagcgagacggagagatgggagctggccgccagcaaaatccctgccctctgtttctgggccagcctgataccgttccatggacgagttggcctgcgtgccctccggggctcgtccatactctcggcaacgtttgggccgggccaggagatggaaatctgggttaccagctgggaccgcccgcgacccctagatgcccctcaccagagcctcccgtaactcagcgcggatgttgctcaagctatccgccaaccaaagggggcggactgggaccatgtggcaaatgccaggaaggactcgaggggggtgcctccggggcttcagaaccaagtgaggaagtgaacaaggcgtccggcccacgcgcctgcccaccctcgcaccacactaaactgaaaaaaacatggttgacccggcactcagaacagtttgaatgcccccgtggctgtcctgaagtggaggaaaggcccgtggcgcgtctaagggccctgaaacgcgctggtagtcctgaagtgcagggtgccatggggagtcctgcccccaaaagacctccagacccttttccagggacggccgaacaaggcgctggaggatggcaggaggttagggacacctctatcggaaataaagacgtcgattccgggcagcacgacgagcagaagggccctcaggatgggcaggcctcactacaggatccaggtttgcaggatattccctgcctggccctgcccgccaagttggcccagtgccagtcctgcgcccaggccgcaggtgaggggggaggtcacgcttgccacagccagcaagtacgccgctcacctctgggtggggaactgcaacaggaagaagataccgcgaccaacagcagttccgaggaaggacccgggagtgggcctgacagccgcctgagtactggtctggccaagcacctgctgtccggactcggcgatcgcctttgtcgtctgttgcggcgagagagggaggcgcttgcctgggcccagcgagaaggccagggccctgcagtcactgaagacagtcctggcattcctcgctgttgttcacgatgccatcacgggttatttaacacccactggcgctgcccaaggtgttcacatcggctctgtgttgcttgtggccgagtggccggaacaggccgggcccgcgagaaagctggctttcaagagcagtccgcagaagagtgtacgcaggaagccggacacgccgcttgttccctcatgctgacgcagttcgtgagcagccaggcgctcgcagagttaagcaccgccatgcaccaggtgtgggttaagttcgatatccgggggcattgtccttgccaggcagatgcccgtgtctgggctccaggcgatgcgggccagcaaaaggagtccacccagaagacaccacctactccacagccttcctgcaatggggacacccaccggaccaagtcaataaaggaggaaactcctgactcagctgaaacacccgccgaggaccgggctggaagaggaccactgccttgcccaagcctctgtgaactgctagccagcacagccgttaagttatgtctggggcacgagcggatccatatggccttcgctcctgtgacccctgccttgccttcggatgatcggattacaaacatacttgacagtatcattgcccaagtggtcgagcgaaaaatccaagaaaaagccctcggtccaggactgcgcgcagggccaggactgcggaagggactggggctgcccctatctcctgtacgtccccgcctccccccgcctggcgctcttctgtggcttcaggagccacagccctgcccaagaagaggattccacctattccaagagcactggcgccaaggccagcctgttttggtctcaggtatccaacgtacgctgcaaggcaacctttggggaacagaagccctgggggcccttggtggacaggtccaggctctgagtcccctgggtccacctcaaccctcatcccttggttctacaactttttgggaaggcttctcatggcctgagctccgcccaaagtccgacgagggttcggtgctgctgttacacagggccctgggcgacgaggataccagccgggtggagaaccttgctgcatcattaccactccctgagtattgcgctctgcacggaaagctcaatctagcttcttaccttcctcctggccttgccctgaggcccctcgaaccccagctgtgggcagcctacggcgtcagtccacacaggggccacctcggtactaagaacctttgtgtggaggtggccgatctggtgagtatcctagtccacgccgatactcctctccctgcatggcatagagcacagaaggactttctttcaggccttgatggtgaaggcctgtggtcacctgggagtcaagtgtctactgtttggcatgtgttcagagcccaggacgcccagaggattagacgcttcctgcagatggtgtgccccgctggggccggtgccctggagccaggggccccaggctcatgctacctggatgccggcttaaggcgccgccttagagaggagtggggagtgtcctgttggacattgctacaggcgcctggtgaggccgttctcgtgccagctggtgccccacatcaggtgcaaggcctggttagtacggtcagcgtcactcagcactttttaagccctgagacatcagcacttagtgcgcagctctgtcatcaaggcccttcactgccaccagattgccacctgttatatgcccagatggattgggccgtttttcaagcggtcaaagtagctgttgggacgcttcaagaggccaagtag

SEQ ID NO: 119438 - DNA, 1410 bp, synthetic construct
  misc_feature 1..1410: note = Description of Artificial Sequence: Synthetic coding sequence
  source 1..1410: mol_type = other DNA
atggcatctccgcgggagctaacccagaaccccttgaagaagatctggatgccctactcgaacggtaggcctgctttgcacgcctgtcagcgaggggtctgcatgaccaattgtcccactttgatcgtcatggtagggcttcccgcccgaggcaagacatacatttccaaaaaactgaccaggtatctgaattggattggcgttccgactagagaattcaacgttggacaatacagacgggatgtagtgaaaacatataaatcatttgaattcttccttcctgacaatgaagaagggctcaagatcaggaagcagtgtgctctggccgccttaagggacgtgcgtcgattcttgtcggaagaaggcggccacgtggcggtttttgatgctactaacacgacacgggaaagaagggctactatttttaactttggcgaacagaacgggtacaagacctttttcgtcgaatccatatgcgtggatcccgaagtcatagccgcaaacatcgtacaggttaaactaggcagccccgactacgtaaatcgagatagtgacgaagctacagaagactttatgcgacgcatagagtgctacgaaaattcctacgaaagtctcgacgaggatctggatcgggatctgtcttatatcaaaataatggacgtaggccagtcttatgtggtcaatcgggttgccgatcacatacagtcccggatagtgtactacctcatgaatattcatgtgaccccccgctcgatctatctctgccgacacggggaatccgaacttaacctgaaagggcggatcggcggtgaccctgggctgagcccacgggggcgcgagtttgctaagagcctcgcccagttcattagtgaccaaaacatcaaagatctcaaagtatggacaagccagatgaaacgtaccatccagacagcagaggcgttgggggtgccatacgagcagtggaaagtcctcaacgaaattgatgccggcgtgtgtgaggaaatgacttacgaggagattcaggacaattatcctttagagtttgcgctccgggaccaggataagtacaggtacagataccccaagggagaaagctacgaggacctcgtccaaagactcgagccagtgattatggagctggagagacaagagaacgttctagttatctgccaccaagcggtgatgcgctgtctgttagcctatttcctcgacaaggctgccgagcagctgccttacctgaaatgtcccttacatacagttttgaagctgacccccgtggcttacggttgtaaggtggagagtatcttccttaatgttgcagcagtgaacacccaccgggacagacctcagaacgtcgatatcagcaggccacccgaggaggccctcgtaaccgtgccagcccaccagtag

SEQ ID NO: 119439 - DNA, 522 bp, synthetic construct
  misc_feature 1..522: note = Description of Artificial Sequence: Synthetic coding sequence
  source 1..522: mol_type = other DNA
atgggcctgccacgcagagccggtgacgccgctgagctaagaaaatcactcaagccacttctggaaaaaagacgcagagcccggattaatcagtccctctctcagctgaagggactcatcctgccattgctggggagagaaaacagtaattgctcaaagcttgagaaggccgacgtgctggagatgactgttaggttcctgcaagagctgcctgcaagcagctggccaacagcagcccccctgccatgcgattcctatcgcgaaggctattcagcgtgcgtcgcacgcctcgccagggttctgccagcgtgcagggtattagagcctgccgtgtcagcacggctgttggagcacctttggaggagagctgcatccgctacactggatggtgggcgcgcaggagacagctccgggccaagtgctcctgctccagcccccgcctcagccccggaacctgcatctgcccccgtgccttcacctccaagcccaccatgcggcccgggtctgtggcgcccgtggtag

SEQ ID NO: 119440 - DNA, 231 bp, synthetic construct
  misc_feature 1..231: note = Description of Artificial Sequence: Synthetic coding sequence
  source 1..231: mol_type = other DNA
atgggcctgcctagaagagctggggacgcggcagagctaagaaagtctctcaagcctctgctggaaaaaaggcggcgggcacgcatcaaccagtccttatcccaattaaagggtctcattctgcctctgctgggtagggaagacgcttccggctggcacacctggctgcccctgcacgcacagaattgcttccttctgtatatccaggctccagaacagcctcctgcctag

SEQ ID NO: 119441 - DNA, 231 bp, synthetic construct
  misc_feature 1..231: note = Description of Artificial Sequence: Synthetic coding sequence
  source 1..231: mol_type = other DNA
atggggttgccacgtagggcgggggacgccgctgaactaaggaagtccctcaagcctctactagagaagagacgccgcgctagaattaatcaaagtctctcccagctgaagggtctcatcttgccacttttagggcgagaggacgcctcgggctggcacacgtggctcccactccatgcgcagaattgttttctgctctatatccaggcccccgagcagccccccgcctag

SEQ ID NO: 119442 - DNA, 561 bp, synthetic construct
  misc_feature 1..561: note = Description of Artificial Sequence: Synthetic coding sequence
  source 1..561: mol_type = other DNA
atggagaagaagagacgggcccgtatcaatgtgtcactcgaacaacttaaatcactgctggagaaacattatagccatcaaattcgcaagagaaaactcgaaaaggcagacatacttgagctgtctgtaaagtatatgagatccctgcagaacagccttcaggggttatggcctgtgccacggggcgctgagcagccttccggcttcaggtcttgcctgcctggtgtctcccagctgttacggagaggcgacgaggtggggtctgggctccgttgtcctctcgtacccgaaagcgccgctggtagtaccatggattcagccggtcttgggcaagaagcccctgccctattccgcccctgcacacccgcagtttgggccccggcgcccgcggctggcggccctcgctcgcccccgcccctgttgctgctgcccgagtccctcccaggaagtagcgcttctgtgccaccgcctcagcccgccagcagtagatgcgctgagtcgccgggcttgggcctgcgagtgtggcgaccttgggggagtcctggcgatgatctgaactag

SEQ ID NO: 119443 - DNA, 666 bp, synthetic construct
  misc_feature 1..666: note = Description of Artificial Sequence: Synthetic coding sequence
  source 1..666: mol_type = other DNA
atggccgccgacactccaggaaagcctagtgcttccccaatggctggagctccagcctcagcgtcaagaaccccagacaaaccccgtagcgccgctgaacataggaagtctagcaaaccagtgatggaaaagaggaggcgggcacggattaacgagtccctggcccaactaaagaccttaatactggacgctctgaggaaagaatcatcaagacacagtaagctggaaaaagccgacatcctggaaatgacggtgcgccacctccgatcgttaagaagagtgcaagtaactgctgccctgtctgccgatccggccgtcctgggaaagtaccgtgcaggcttccacgaatgtctggccgaagtaaaccgcttcctggcgggttgtgagggtgtccctgccgatgtgaggtcccgactgctgggtcacctcgcagcttgtctgcggcagctagggccctcaaggcggcccgcaagcctgtcacctgcggcgccagccgaggcaccagcacccgaagtgtacgccggacggccactcctgcccagccttggaggtcccttcccccttcttgctccgcccttgctacctggcctgacccgcgcgctgccagccgcccccagagctggcccccaaggcccagggggcccctggcgcccatggctccggtag

SEQ ID NO: 119444 - DNA, 744 bp, synthetic construct
  misc_feature 1..744: note = Description of Artificial Sequence: Synthetic coding sequence
  source 1..744: mol_type = other DNA
atggccgcagacactccaggaaagccctctgcttcacccatggccggagcgcccgctagcgcctccagaactcccgataagccaagatccgccgcagagcataggaaagtaggatctcgcccaggagtgagaggcgctaccggtggccgagaagggcgaggcactcagccagtgcccgatcctcaatcttcgaaacccgtaatggaaaagcgccgacgcgcaaggattaacgagtcgctagcacagctgaagaccttgatcctggacgccctgaggaaggagtcgtcaaggcacagtaagcttgaaaaagcagatatcctcgaaatgacggtccggcatctgcgcagtctccgtcgagtgcaggtaacagctgcactgtcggcagatcctgccgtcctcggtaagtaccgtgctggattccacgagtgcctggcagaagtgaatcgctttctggccgggtgtgaaggagttccggcggatgtaaggagtcgactgcttggacacctggcggcctgtctgaggcagctcggtccatccaggaggcccgctagcctgagccctgcagctccagctgaggcccccgctcccgaggtatatgccgggcggcctctcctgccctcacttgggggccctttcccccttctggcgccccccctgcttcctgggctcacgagagccttgccagccgcaccgagggccggtccgcaaggccccgggggtccctggcggccttggttacgctag

SEQ ID NO: 119445 - DNA, 501 bp, synthetic construct
  misc_feature 1..501: note = Description of Artificial Sequence: Synthetic coding sequence
  source 1..501: mol_type = other DNA
atggccccttccactgtggcggtagagctcctgtcacccaaagaaaaaaatcgtctgagaaagcctgtggtagagaagatgaggcgagatcggattaattcttccattgagcaactcaaacttctgctcgagcaggaatttgctagacaccagccaaactccaagctggagaaggcagacattctggagatggccgtgtcttatctgaaacattccaaagcatttgttgcagccgctgggcctaagtcactgcatcaggactacagcgagggatattcctggtgtctgcaagaagccgttcagttcctcactctgcacgccgctagcgacactcagatgaagctgctttatcacttccagagaccacccgccgcacctgctgctccagcgaaagaaccgaaggcccccggagccgccccgcctccagccctaagtgcgaaggccaccgccgccgctgcggccgctcaccaacccgcatgcggtttgtggcgcccttggtag

SEQ ID NO: 119446 - DNA, 675 bp, synthetic construct
  misc_feature 1..675: note = Description of Artificial Sequence: Synthetic coding sequence
  source 1..675: mol_type = other DNA
atggcaccaccagcggcacctggaagagaccgcgtgggaagggaagacgaggatggctgggagactagaggggataggaaggcccgaaaaccactggttgaaaaaaaacggcgggccagaattaacgaaagtctccaggaactcaggctcctactggcgggggccgaggtccaggctaagttggagaatgcagaggttctcgaactcacggtgaggagggtccaaggcgtcttgaggggcagggccagagagagggagcagctgcaggccgaggcgtcagaacgattcgctgcaggatacatacagtgcatgcatgaggtgcatacttttgtatccacgtgccaggcaatcgatgcaaccgtggcagcagaactgttgaaccacttgttagaaagtatgccactcagagagggctcgagctttcaggatcttctgggcgatgccctggccggcccacctagagcacctgggagatccggctggcccgcagggggtgctcccggctcaccgatcccgagccccccagggcccggagacgacctgtgctcagacttagaggaggcccccgaggcagaacttagccaggcgccagccgagggcccagatctcgtgcctgcagctctcggttcattgacaacagcccagatcgccaggtccgtgtggagaccctggtag

SEQ ID NO: 119447 - DNA, 645 bp, synthetic construct
  misc_feature 1..645: note = Description of Artificial Sequence: Synthetic coding sequence
  source 1..645: mol_type = other DNA
atggctccccctgctgctccgggtagggacagagtcgggcgcgaggatgaggatgggtgggaaactagaggggaccgcaaggctcgaaaacccctagtggaaaagaagcgccgcgcgcgaattaatgaatcattgcaggagcttcgcctgttgctggccggtgctgaagtacaggctaagctggaaaacgccgaggttcttgaacttactgtgagaagggtccaaggtgtgctgcgtgggcgcgcccgtggggagtggcggcgcggtggacgcgggaggagaccccgggctccagtgacacccgcccgccgccgtacatctctccccgcccccctgtcatgccggaggcgagggctgcctcccgaacagggggctccacctcggctgctgggcgaaccaagaccacgtggacccgggggccttggccacgccgtcgctgcccaccgagccggacgcggtagcctgccaccgacactcggcccccgggctagggctgctgcgggaggatctgaacgcgcacttaggtgtcgactccatcctgtgcatgccaggggagcccatgtaagagtccacgtgcctggccataggcgataccgccgatgcagagctcccgaacctagcgcccgtgtgcacgctgctgcctag

SEQ ID NO: 119448 - DNA, 669 bp, synthetic construct
  misc_feature 1..669: note = Description of Artificial Sequence: Synthetic coding sequence
  source 1..669: mol_type = other DNA
atggctccaccagcggccccaggacgggacagggtgggtcgggaagatgaggatggatgggaaacacggggcgatcggaaagcccgaaagcctctagtggagaaaaaacggcgggcaagaattaacgagagtctccaggagctcaggctgctgctggctggcgcggaggccaagctggagaatgctgaagtgttggagctgacagtcaggcgggtccagggcgtccttaggggccgggccagagagcgtgagcagctgcaggccgaggcttcagagcgcttcgccgccggctatattcagtgcatgcacgaggtccacaccttcgtctcgacatgccaggcaatcgacgcgaccgtggccgctgagttgctgaatcacctattggagtccatgccactgcgcgaggggtcttcgttccaggacctccttggtgatgccctggctggtccaccgcgggcccctggaagatccggatggcctgcgggcggagcccctggcagccccataccaagccctcctggccccggagacgatctatgcagcgatctagaggaagctcccgaagcggaacttagccaagctcccgccgaaggccccgatctggtgccagccgcactgggtagcttaacaaccgcacagatagctcgctcagtgtggcggccctggtag

SEQ ID NO: 119449 - DNA, 678 bp, synthetic construct
  misc_feature 1..678: note = Description of Artificial Sequence: Synthetic coding sequence
  source 1..678: mol_type = other DNA
atggtgacgagagatagagcggagaacagagacgggccgaagatgctgaagccattggtggagaagaggcgccgtgatcggatcaataggagtctggaggagctgcggctgctgctgctagaaaggacgcgcgaccagaacctccgaaacccgaagcttgaaaaggccgaaatactggaatttgccgtgggctatctgcgagaacgttctagggttgaacctccaggggtgcctaggagcccagtccaggatgctgaggcattggcttcttgctacttgtccggattcagggaatgcctccttagactggcggctttcgcacatgatgcgagcccagctgcacgggcgcagcttttctccgcattgcatggctatcttcgccctaaacctcctagacccaagcccgtggaccctcgaccaccagccccgaggccttcgctcgaccccgctgcaccagcactcgggcctgccctgcatcagcggcccccggtgcaccagggccatccctcccctcggtgtgcttggtccccctcgctgtgttcacctagggcgggtgattctggggcccccgccccactgactggattgttgccgcctccgccccccccccacaggcaggacggagctccaaaggcccccttgcctccgccaccagctttctggcgaccttggccttag

SEQ ID NO: 119450 - DNA, 693 bp, synthetic construct
  misc_feature 1..693: note = Description of Artificial Sequence: Synthetic coding sequence
  source 1..693: mol_type = other DNA
atggtgactagggatagggctgaaaacagggatgggcccaagatgctgaagccactggtagaaaagaggcggagggacagaattaaccgttccctggaagagctgcggttactacttctggaacgcacacgtgatcagaacttacgtaacccaaaacttgaaaaggcagaaattttggaattcgccgtaggctacctgcgggagcgctctagagtcgagcctccagctgctgctgcccccggcgtcccacgatctccagtgcaagacgctgaggcattggctagctgttacttgagcgggttccgggagtgtctcctgagacttgcagctttcgctcatgatgcctccccggccgcaagagcccagcttttcagcgcccttcacggctatctcaggccaaaaccgccccgccccaaacccgtggaccccaggcctcccgcaccaagaccatctttggatcctgctgcccctgctctagggcctgcgttacaccaaaggcctcctgtgcaccaagggcatccgtcccccagatgtgcatggtccccgtctctatgctctcctcgtgctggggatagcggcgctcccgcccctctgaccggtctcctgccgcccccacctccaccccacaggcaggatggtgccccaaaagcacccttgccccctccccctgctttttggcggccttggccttag

SEQ ID NO: 119451 - DNA, 1014 bp, synthetic construct
  misc_feature 1..1014: note = Description of Artificial Sequence: Synthetic coding sequence
  source 1..1014: mol_type = other DNA
atgaagcgcccatgcgaagaaacaaccagcgaatccgacatggatgaaaccattgacgtcgggagtgagaacaactactccggccagagtacgagtagcgtaatccgcctcaactcccccaccaccaccagccagattatggcccggaaaaagcgtagaggcataatcgagaagagacgtagggatagaattaataactccctgagcgagcttagacgcttagtacccactgcattcgaaaagcaggggagcgcaaagttggagaaagcggagattctgcagatgaccgtggatcacctgaagatgctacaagcaacagggggcaaggggtatttcgatgctcatgccctcgccatggattttatgtcaattggtttcagagagtgcctgaccgaagtcgctcgctacctttcttctgtggagggactcgacagctctgaccctttgcgagtccgattggtgagtcatctgtccacctgtgcaactcagcgcgaagctgcggctatgacttccagcatggcgcaccaccaccaccctttgcacccgcatcattgggctgccgcctttcaccatttaccagctgcgttactgcaacccaatggtctgcacgccagcgaaagcaccccttgtcggctctccacaacatccgaagttccgcctgcccacgggtctgccctgttgaccgctactttcgctcatgctgattccgccttacggatgccatctaccgggtctgtggcaccatgtgtgccaccgctgtctactagcctgctgtctctgtccgctactgtacatgctgccgctgctgctgcaactgcagccgctcacagttttcccctctcgttcgccggcgccttcccaatgcttccaccgaacgctgccgcagctgtcgctgctgctaccgccatcagcccgcctctgtctgttagtgccacttcctctcctcaacagacctccagtggcaccaacaataaaccataccggccgtggggcaccgaagttggggccttctag

SEQ ID NO: 119452 - DNA, 876 bp, synthetic construct
  misc_feature 1..876: note = Description of Artificial Sequence: Synthetic coding sequence
  source 1..876: mol_type = other DNA
atggcacggaaaaaacggagagggattattgaaaagcgtagaagagatcgcatcaataactccctgagcgaactacgacgattggtgccaactgcattcgagaagcaaggctcagcgaagctggaaaaggccgagattctccagatgactgtggatcacctgaaaatgctgcaggcgactggtggcaagggctattttgatgcacatgctttagcaatggactttatgtccatcggctttagggagtgtctgacagaagtcgccagatatttatcgtcggtggaggggctggacagctccgaccccctgcgcgttcggttagtgtctcatctgagtacttgtgctactcaacgagaagctgcagcaatgaccagtagcatggcccatcaccaccatccgttgcacccacaccattgggccgccgcctttcatcacctgccagctgcccttctgcagccaaatgggctacatgcgagcgagagcacaccctgtcgattgtccaccacttcggaggtacctcccgcacatgggtccgcactactcacagcaacgtttgcccacgccgacagcgcactgcgtatgccctccacagggtctgtcgctccatgcgtgcctcctttgtcaacctctctgctttccctcagcgctaccgtgcacgctgcagctgctgccgctacagccgctgcacactcctttcccttgtcattcgcaggcgcatttcccatgcttccacctaatgccgccgctgccgtggcagcagcaaccgcaatttcgccacccctatccgtcagtgcaacgagcagccctcaacagacatcgtctggcacaaacaataagccctatcggccgtgggggacagaggtgggtgcattctag

SEQ ID NO: 119453 - DNA, 1221 bp, synthetic construct
  misc_feature 1..1221: note = Description of Artificial Sequence: Synthetic coding sequence
  source 1..1221: mol_type = other DNA
atgagtgcattaggagccgtgatagctctcctgctatggggacagctcttcgcagtggattcaggaaatgatgtgacagacatagccgacgacggatgccctaaaccccctgagatcgctcatgggtatgtggagcatagcgttagataccagtgcaagaactactataagctgcggaccgagggcgatggcgtttacacattaaacgacaagaaacagtggataaataaggcagtgggcgacaaactacctgaatgcgaagctgatgatggttgtcccaagccacccgagattgcccatggctatgttgaacatagcgttcgttatcagtgtaagaactattacaagttgcgtaccgagggtgacggagtctacacactgaataacgaaaaacaatggatcaataaggctgtgggcgataaacttccggagtgtgaagctgtgtgcggaaagccaaaaaatccggccaatcctgttcagcgcatactcggcgggcacctggatgccaagggatcttttccatggcaggctaagatggtatcccaccataatttgaccacaggagcgactcttatcaacgaacagtggcttctgacgaccgccaagaatctgtttctgaaccattccgagaacgctaccgccaaggatatagcgcccaccctgaccctgtatgttggcaagaagcagctggttgagatcgaaaaggttgtgttgcaccccaattactcccaggtggacataggtcttattaagctcaagcaaaaggtctccgtcaacgaacgggttatgcctatctgcttgccctccaaagattatgccgaggtagggagggtggggtatgtatctggctggggcagaaatgctaactttaagtttaccgatcacttaaaatacgtgatgttgccagttgctgaccaggaccaatgcatacgccattacgagggttctactgtccccgaaaagaagacgcctaagtctcccgtgggcgttcagccaattctcaacgaacataccttctgcgctggcatgtcaaagtaccaagaagatacttgctatggtgatgccggctccgcctttgctgtccatgacctcgaagaggatacctggtatgcaactgggattttatcattcgataaatcctgcgctgtggcagagtacggagtgtacgtcaaggttacaagcattcaagattgggtccagaaaaccattgcagagaattag

SEQ ID NO: 119454 - DNA, 1149 bp, synthetic construct
  misc_feature 1..1149: note = Description of Artificial Sequence: Synthetic coding sequence
  source 1..1149: mol_type = other DNA
gtctatgcatgcgtctgcgtttgcgtgtacatgcatgtgtgtgtagatgcatgcatgtgttgtgaagctggtcgacttgctttccactccagcctatcttcgctgtgctccgccttaggcgcagttattgctcttttgctctggggccagttattcgctgtcgatagtggaaacgacgtgactgacattgccgatgacggatgtcccaaacctcccgagatagctcatggctacgtggaacacagtgtgaggtaccagtgtaagaactactacaaacttaggaccgagggcgatggagtatacacactaaacgataagaaacagtggatcaacaaggcagtgggtgacaagttgcccgagtgcgaggcagtgtgtggaaagcccaagaatccggctaaccctgtccagagaattttgggaggccacctagacgcaaagggctcattcccatggcaggccaaaatggtgtctcaccacaacctaactaccggagctaccctgatcaatgagcagtggctgctgacgaccgccaaaaatttattcctcaaccattctgagaacgctaccgccaaggacattgcgccaaccctcaccctatatgtcggcaaaaagcagctggtggaaattgaaaaagttgtgctgcaccctaactactcccaggtggacattgggctgataaaactgaagcaaaaagtaagcgttaatgagagggtgatgcctatatgcctccctagcaaggattacgcagaagtgggccgagtgggatatgtgtccgggtggggtcggaacgcaaatttcaaattcactgaccacttgaagtacgtgatgcttcctgtggctgaccaggatcagtgtattagacattacgagggtagtactgtgccagaaaagaagacgccaaagtccccagtgggagtgcagcctatcttgaatgagcacacattttgcgcgggcatgtcaaaataccaggaggatacttgttacggcgacgccggaagcgctttcgcggttcacgacctcgaagaggacacctggtatgccacaggtatcctgtctttcgataaatcatgcgcagtggcagagtatggggtttacgtaaaggtgacttccatccaagactgggtgcaaaaaaccattgcggagaattag

SEQ ID NO: 119455 - DNA, 1044 bp, synthetic construct
  misc_feature 1..1044: note = Description of Artificial Sequence: Synthetic coding sequence
  source 1..1044: mol_type = other DNA
atgtcggcactgggcgcggtgattgccctactgctttggggacaattgttcgctgtggactcgggcaacgacgtcaccgatatcgccgatgacggctgcccaaaaccccccgagatcgctcacggctatgtggaacactccgtcaggtaccaatgcaagaattattacaaactcagaactgagggtgacggagtgtacactctaaacaatgaaaagcagtggattaataaggccgttggcgacaagctcccagaatgcgaggccgtgtgtggcaagccgaagaacccagctaatccagttcagaggattctcgggggtcatctcgatgccaaaggatcctttccctggcaggcaaagatggtgagtcaccacaatcttacgacaggtgctacgttgatcaacgagcagtggctcctcactaccgcgaagaatttgtttctgaaccactctgaaaatgccactgccaaagatattgccccgacactgactctctatgtgggtaaaaagcagttggtcgaaatcgaaaaggtagttctccatccaaactattcgcaagttgacattggtctaattaagctgaagcagaaggtgtctgtcaatgagagagtgatgcctatctgtctgccttccaaagactatgctgaggtgggaagggtcgggtacgtgtcaggttggggacggaatgccaactttaagttcacagatcaccttaaatacgtcatgctaccggtcgcagatcaggatcaatgcattaggcactatgaagggtcaacagtgcctgagaagaaaacgcccaagagcccagttggagttcagccaatccttaacgaacatacattttgtgccggcatgagcaagtatcaggaagatacctgctatggagacgccggatcagcatttgcagtgcacgacctggaggaagacacctggtatgccaccgggatactttcattcgataaatcctgtgcggtggcagagtatggcgtatatgttaaggtgaccagcatacaagattgggtgcagaaaacgatcgccgagaactag

SEQ ID NO: 119456 - DNA, 846 bp, synthetic construct
  misc_feature 1..846: note = Description of Artificial Sequence: Synthetic coding sequence
  source 1..846: mol_type = other DNA
atgtctaggatctcccaaatgaccgccgctcgaagcccaccccgactccatatggctatgtggtccacaaggttcgccacctccgttaggacaaatcccgtccagagaatcttaggagggcatctggacgcaaagggcagcttcccctggcaggccaagatggtcagccaccataacctgaccaccggagcgaccctgatcaacgagcagtggttactgaccaccgccaagaatctgtttttaaaccactccgaaaacgcaacagcaaaagacatagcccctaccctgaccctgtacgtcggtaaaaagcagttagttgagatcgaaaaagttgtgcttcaccccaactattcccaggtcgacattggcctgataaagctaaagcaaaaggtgtccgtgaatgagagagtgatgcctatttgtctgcccagtaaggactacgcagaagtcggccgggtcggctacgtcagcgggtggggccgaaatgccaactttaagtttacagatcacctgaaatacgtgatgctccctgtagccgaccaagaccaatgtatccgccactacgagggatcgactgtgccggagaagaaaactcccaagtcgcccgtcggagtgcagcctattctgaacgaacatacattctgtgccggtatgtctaagtaccaggaggacacatgctacggagacgctggatccgcattcgccgttcacgacctggaagaagacacctggtacgccactggaattttatcattcgacaaatcttgtgccgtcgccgagtacggcgtgtacgtcaaggtgaccagtatccaggattgggtacagaagaccatcgccgagaactag

SEQ ID NO: 119457 - DNA, 552 bp, synthetic construct
  misc_feature 1..552: note = Description of Artificial Sequence: Synthetic coding sequence
  source 1..552: mol_type = other DNA
atgtctgccgccagagagagccacccgcacggagtcaaaagaagtgcctctcctgatgacgatctggggtcctctaactgggaggctgctgatttggggaacgaagagcggaagcaaaaatttctcagactgatgggagctggcaagaaggagcatactgggagactggttattggtgaccacaaatcgacatctcactttagaaccggcgaggaggacaagaaaataaatgaggagctggaaagccagtaccagcagtctatggattcaaaattaagcggacggtataggaggcactgtggcctggggttctccgaagtggaagaccatgacggcgaaggggacgtcgctggagacgatgatgatgacgacgatgacagtccagaccctgagtctccagatgatagcgagtccgactccgagagtgaaaaagaagaatctgcggaggagttgcaagcagctgagcatcccgatgaggtggaggatccaaaaaataagaaggacgcaaagagtaactacaagatgatgttcgtgaagagttccggttcttag

SEQ ID NO: 119458 - DNA, 1047 bp, synthetic construct
  misc_feature 1..1047: note = Description of Artificial Sequence: Synthetic coding sequence
  source 1..1047: mol_type = other DNA
atgtcggatctgggggctgtcattagtctcttattgtggggacggcaactctttgctctatacagtgggaacgatgtcaccgacatttcagacgatagattcccaaagcccccggaaattgccaatggctacgtggagcacctgttcagatatcagtgtaaaaactattaccggctgcgcaccgaaggagatggcgtctacacacttaatgacaaaaagcagtggattaacaaggccgtgggtgacaagttgccagagtgcgaggccgtgtgcggaaaacccaagaatccagcaaaccccgttcaaaggatcctgggcggacacctggatgccaagggctccttcccatggcaggccaaaatggtgagtcatcacaatctaactacaggggccacgctgattaacgagcaatggctcctgacaactgcgaaaaacctgtttcttaaccattccgaaaacgccacggccaaggacatcgcgcctacactgaccctgtatgtggggaagaaacagcttgtcgaaattgagaaagtagtgctacatcccaactaccaccaggtggatatcggccttattaaactgaagcagaaggtcctcgtaaatgaaagggtcatgcccatttgcctccctagtaaaaactacgcggaagtaggtagggtaggttacgtgtctgggtggggacagtccgataattttaagctaacagaccatctgaagtacgtgatgttacccgtggccgatcagtatgactgcatcacacactacgaaggctcgacttgtcctaagtggaaagcgccaaaatcccccgtgggggttcagcccatcctgaacgagcacactttttgtgtgggaatgagcaaatatcaggaagatacctgctatggtgacgcgggctctgcattcgcagttcatgacctggaagaggacacctggtacgcggcagggattctctctttcgacaaaagctgcgcagtggccgagtatggcgtatatgtcaaggttacctcgatacagcattgggtccagaagactattgcagaaaactag

SEQ ID NO: 119459 - DNA, 1047 bp, synthetic construct
  misc_feature 1..1047: note = Description of Artificial Sequence: Synthetic coding sequence
  source 1..1047: mol_type = other DNA
atgagcgatctaggggccgtcatctcgctgctcctttggggccgccagttgttcgctctgtattctggcaacgatgtcaccgatatctctgacgaccggtttcccaagcccccagagatcgctaacggttatgtggaacacctctttcgctaccaatgcaaaaattactataggctccgaaccgagggggacggggtttacactctgaatgacaaaaaacagtggatcaataaagctgtaggggacaaactcccagaatgtgaggccgtgtgtggcaaacctaaaaatccagcgaaccctgttcagaggatcctcggaggccatctagatgcaaaagggagcttcccctggcaagccaagatggttagccatcataatctgacaaccggcgcgaccctgattaatgaacaatggctgctgacaactgcaaagaacttgttccttaaccacagcgagaatgcaaccgccaaagatatagcacccactcttacactgtacgtcggtaagaagcaactggttgagatagagaaggttgttctccatcctaactaccaccaggtcgatatcgggctgatcaagctgaagcagaaggtacttgtgaatgaacgcgtgatgcccatatgtttgccatctaagaattacgcggaggtaggcagggtgggctatgtctctggctggggtcagtctgacaatttcaaactcacagaccacttaaagtacgtaatgttgccagtggctgatcaatatgattgcatcacccactacgaaggttccacctgcccaaagtggaaagctcccaaatccccagtgggagtgcagcccattttaaatgaacatacattctgtgtcggcatgtcaaagtaccaggaagatacctgttacggagatgccgggtctgcctttgccgtgcacgatctcgaggaggatacctggtatgccgccggaatcctgtcatttgacaaatcgtgcgccgtcgcagagtacggagtgtatgtgaaggtcaccagtattcaacactgggtgcagaagactatcgcagagaactag

SEQ ID NO: 119460 - DNA, 615 bp, synthetic construct
  misc_feature 1..615: note = Description of Artificial Sequence: Synthetic coding sequence
  source 1..615: mol_type = other DNA
atggctgccgctaatccttgggacccagcgtcagctcctaacggagccggcctcgtgctgggccactttattgccagcgggatggtgaatcagaaaaatttggaaatcgagctgctcaaactggagaaagacactgccgatgtggtgcatccgttcttccttgctcagaagtgccacacactgcaaagtatgaacaaccacctggaggctgtgctgaaggagaagcgaagccttaggcagcggctgctaaaacccatgtgtcaggagaacctaccaattgaagctgtctatcatcggtacatggtccacctcctcgagctggcggtcacctttatcgaaagactcgagacccacctggaaaccatcagaaatattccacacctggccgcgaacttgaagaaaatgaaccaagctctggcaaaaatggatatcctcgtcactgaaaccgaagaactggctgaaaatattctgaagtggagaaaacaacagaatgaagtctcaagctgtatccccaagatcctggccgaggagtcttacctgtataaacatgatatcatcatgccacctctgccttttacatccaaagttcatgtgcagactattaacgctaagtag

SEQ ID NO: 119461 - DNA, 837 bp, synthetic construct
  misc_feature 1..837: note = Description of Artificial Sequence: Synthetic coding sequence
  source 1..837: mol_type = other DNA
atggagccacaagaggagcgggagactcaggtcgctgcatggctcaagaaaattttcggggaccatcctatcccacagtatgaagtgaacccccggaccaccgaaatcctacaccacctgtccgagcggaatcgagtgcgtgaccgggatgtctatttggtcatcgaggaccttaagcaaaaggcgtccgagtatgagagtgaggctaaataccttcaagacttacttatggaatcagtgaatttttctccagcaaacctgtcctcgacaggcagcaggtacctgaatgccctggttgactcagccgtcgcactggagaccaaggacacgtctcttgcctcttttatacctgccgttaatgatttaacctccgatctgtttcgcactaagagcaaatccgaggagattaagatcgagctagagaagcttgaaaaaaacttgaccgccacactagttctggaaaagtgtctacaggaggacgtaaagaaagctgagctacacctgagtacagagagagctaaggtggataacaggcggcagaatatggacttcctgaaagcaaagagtgaggaatttcgtttcggcatcaaagctgcggaggaacagttgtccgcccgaggcatggatgcaagcctgtcccaccaatcactcgtagctctctccgagaagttggcgcggctgaagcaacagacaattcccttaaagaaaaagctggaatcatacttggacctgatgccaaatcccagtctcgcccaggtgaagattgaggaggctaagcgagagctggatagtatcgaggccgaactaacccgacgtgtcgacatgatggagctttag

SEQ ID NO: 119462 - DNA, 708 bp, synthetic construct
  misc_feature 1..708: note = Description of Artificial Sequence: Synthetic coding sequence
  source 1..708: mol_type = other DNA
atggccgctgcgaacccttgggaccccgcctctgcgcccaatggcgcagggctcgtgctgggccacttcattgccagtggcatggttaaccaggagatgctaaacatgtcaaagaaaacggtgtcttgttttgtcaacttcacaaggctgcagcagattacaaatatccaggctgaaatatatcaaaagaatctcgagatcgagttactcaagctggagaaggatactgccgatgtagtccacccattctttcttgcacaaaagtgccatacgctccagagtatgaataaccatctcgaggctgtcttgaaggaaaaaagatccctgcggcagcggctcctgaaacccatgtgccaggagaacctgccaatcgaggcggtgtatcatcggtatatggtccatctactagagctggccgtaaccttcattgaacgcctcgagactcatcttgaaaccattcggaacatcccgcacttggctgccaacctgaagaaaatgaaccaggccctcgctaagatggacattctggttaccgaaaccgaggagctggccgagaatatactcaagtggcgaaagcagcagaatgaggtgtcatcttgtatccctaaaatactcgcagaagagtcatatctgtacaaacatgacataattatgccccctctgccatttacgagcaaggtacacgtccaaacaattaacgctaagtag

SEQ ID NO: 119463 - DNA, 615 bp, synthetic construct
  misc_feature 1..615: note = Description of Artificial Sequence: Synthetic coding sequence
  source 1..615: mol_type = other DNA
atggccgcagctaatccttgggacccagcttccgctccgaacggggccgggctggttttgggacacttcatcgccagcggaatggtgaatcagaaaaatctggagatcgagttgttgaaactcgaaaaagacacagcagacgtggtgcacccattcttcctcgctcaaaagtgtcataccctgcagtctatgaataaccatcttgaggctgtccttaaggagaagcgaagcctaaggcaaaggctgttgaaaccaatgtgccaggaaaacttgcccattgaggccgtctaccacagatacatggtacacctgctggagctagccgtgaccttcatcgagcgccttgaaactcacctggagacaatcaggaatatcccccacctagcggctaacctgaaaaagatgaatcaggccctggcaaaaatggacatcctggtgaccgagacagaggagctggctgaaaatatcctgaagtggagaaaacagcagaatgaggtttcttcttgtattccaaagatcctggcagaggaatcctacttgtacaagcacgatattatcatgccccccctccccttcacgtccaaagtgcacgttcagacaatcaatgctaagtag

SEQ ID NO: 119464 - DNA, 1812 bp, synthetic construct
  misc_feature 1..1812: note = Description of Artificial Sequence: Synthetic coding sequence
  source 1..1812: mol_type = other DNA
atgtcgtgcggtaatgagtttgtggagaccctgaaaaagatcggatatcctaaagctgataatctcaatggggaggacttcgactggctgtttgagggcgtggaagacgaaagcttcctgaagtggttttgtggcaacgtgaacgaacagaatgtgctgagcgaacgcgagcttgaagcgttctccatcctccagaaatctggaaaaccaattctggaaggcgctgcactggatgaggctttgaagacctgcaagacttcagatctgaagacaccgagattagatgataaggaactggaaaaactggaagacgaggtccagaccctgctgaagcttaagaatctgaagatacaaagaagaaacaagtgtcagctgatggcttcagtaacaagccataagtccttgcgattgaacgccaaagaagaagaagctactaaaaaattaaaacagtcccaggggattctcaatgccatgatcaccaaaatttctaatgagcttcaggccctgactgatgaagtcacgcaacttatgatgttcttccgccatagtaacctggggcagggtacaaacccccttgtttttttatctcagttcagcctggagaaatacctgagtcaggaggagcaatcgacggccgccctgacattgtataccaagaagcaattctttcaaggtatacacgaggtagttgagagttcaaacgaagataactttcagctgttagatatccagacgccatcaatctgcgataaccaagagattcttgaagagcgcagactggagatggcccgcctgcaactggcctacatctgtgcgcaacatcagctgatccatctgaaggcatctaattcttcaatgaagtcttctattaagtgggctgaggagtcgctgcactcgctgacgagcaaagccgtcgacaaagaaaatttagatgccaaaattagttcgctgacaagtgagatcatgaagctcgagaaagaggttactcagatcaaagaccgctcccttcctgccgtggttagggagaacgcccaactactgaacatgcctgtagtgaaaggggattttgatctgcaaatagccaagcaagactactacacggctcgccaggagctcgtgctcaatcaactaatcaagcagaaagcttcgttcgagttgttgcagctgagctatgagatcgaacttcggaagcatagggacatctaccgccagttggaaaacctggtgcaagagctgtcccaatcaaatatgatgctgtataagcagctggagatgctaactgacccctcagtctcacagcagattaaccctaggaacacaatcgatactaaagactatagtacccataggctgtaccaagtgttggagggagagaacaagaagaaagaattgtttctgactcacggcaacctggaggaggtggcagaaaaactaaaacagaatatttcactggtccaggaccaactggctgtgtcagcacaggaacattcattctttctatctaagcggaacaaagatgttgatatgctgtgtgataccctataccaggggggcaatcagcttctcttatcagaccaggagctgacagagcagtttcataaggtggagagccagcttaataagctcaaccatctgctgacagatatacttgctgatgtgaaaacgaagagaaaaacattggccaacaataagctacatcagatggagcgagagttctatgtctatttcctcaaggatgaggactacctcaaagacatcgtggagaacctggaaacccaaagcaagatcaaggcagtttccctcgaagattag

SEQ ID NO: 119465 - DNA, 1812 bp, synthetic construct
  misc_feature 1..1812: note = Description of Artificial Sequence: Synthetic coding sequence
  source 1..1812: mol_type = other DNA
atgtcttgtggtaacgagttcgtcgagaccttaaaaaagattggctacccaaaggccgataacttgaacggtgaggattttgactggctgtttgaaggcgtggaggatgagagctttctgaagtggttttgtggcaatgtgaacgagcagaacgttctctccgaacgcgagctggaagccttctcaattctgcagaagtcaggcaagcccatcctcgaaggagcagcgctggatgaggctctgaaaacatgcaagactagtgacctgaagacacccaggctcgacgacaaagaactggaaaaactggaggatgaagtacagacactcctaaagctgaaaaatcttaagattcagcgcaggaacaagtgtcagcttatggcgagtgttaccagccataagtctctgcgcctcaatgccaaggaggaagaggccaccaagaagctgaaacaatcccaaggcatcctgaacgccatgataaccaagatctctaatgagctgcaagcactgacagatgaggttacccagcttatgatgttcttccgacatagtaatctgggccagggaacgaacccacttgtgttcctatcccaatttagcttggaaaagtacttgagtcaggaggagcaaagcaccgctgccctgaccctttataccaaaaaacagttctttcaagggatccacgaggtggtagagtcttccaatgaagataacttccagctgctggatatccagaccccctccatctgtgataatcaggaaatactcgaggaaagacgcctggaaatggcgcgtctgcagctggcgtacatatgcgcacagcaccagctgatccacctaaaagcgtctaactccagcatgaaatcatcaatcaagtgggcagaggagagtctccattcactgacctccaaagctgttgataaggagaacctggatgcgaagatcagctctctaaccagcgaaattatgaagctggaaaaggaagtgacccaaatcaaggatcgcagcttgcccgccgtagtgcgggagaacgcacagttactgaacatgcctgtggttaaaggcgacttcgacctacagatcgcaaaacaggactactacactgcccgccaggaactcgtactgaatcagctgatcaagcagaaggcgtcgtttgagttgttacagctgagctatgaaatagaactgcgcaaacaccgggacatttaccgacaactggagaacctcgtgcaggaactgagccagagcaacatgatgctatataaacaattggagatgctgacagacccatctgtatcacaacagattaaccccaggaatacgattgacacaaaggactactcaactcacaggctgtaccaagtcctggagggggaaaacaaaaaaaaggagctcttccttacgcatggcaacctcgaagaggtggccgaaaagttaaaacagaacattagcctcgtgcaagaccagctcgcagtgtcagctcaggagcacagtttttttctctcaaaaagaaacaaagatgtggacatgctgtgcgatactctctaccagggaggcaaccagctcctgctgtccgaccaggagttgactgagcagtttcataaggtcgaaagtcaacttaataaactgaatcatttgctcacggacatccttgccgatgtcaaaacaaagaggaaaactctggctaataataagctccatcagatggagagggagttttacgtatacttcctcaaggatgaggactatctcaaagacatcgtggaaaacctggaaactcagagcaagatcaaggccgtgagtcttgaagactag

SEQ ID NO: 119466 - DNA, 33 bp, synthetic construct
  misc_feature 1..33: note = Description of Artificial Sequence: Synthetic coding sequence
  source 1..33: mol_type = other DNA
atgtcatgcggtaatgaatttgtagagacctag

SEQ ID NO: 119467 - DNA, 102 bp, synthetic construct
  misc_feature 1..102: note = Description of Artificial Sequence: Synthetic coding sequence
  source 1..102: mol_type = other DNA
atgagttgtgggaacgagttcgttgagaccctaaagaaaatagggtacccaaaggcagataacttgaatggtgaggactttgattggcttttcgaaggttag

SEQ ID NO: 119468 - DNA, 456 bp, synthetic construct
  misc_feature 1..456: note = Description of Artificial Sequence: Synthetic coding sequence
  source 1..456: mol_type = other DNA
atggggaaacggccgaaccttctcgctctgcagctttcagacagcactctcgctgacataatagcccggctgcaggccgggcagaagttgagcgggtcttctccgttttcttctgcgtttaatagcctctctctcgataaggagagcggtctgttgatgttcaaaggtgataagaagcctcgagtgtgggtggtaccgacccaactgcggcgagacctgatcttctcggtgcacgacatacctcttggcgcgcaccagcggccagaggagacctataagaagcttcggctgctcggttggtggcctgggatgcaagaacacgttaaggattattgtaggtcatgtctgttttgtatcccaagaaacctgatcggctccgaactgaaggttattgaaagcccacccgcctctgttttaagaggacaaggagtctgcaataggtcaggcacgcggtag

SEQ ID NO: 119469 - DNA, 957 bp, synthetic construct
  misc_feature 1..957: note = Description of Artificial Sequence: Synthetic coding sequence
  source 1..957: mol_type = other DNA
atggccagcggggacttctgtagcccgggagaaggcatggaaatcctccagcaggtatgctccaaacagctccctccttgtaatttgagcaaagaggacttgctccagaatccatacttttccaaacttctcctgaatctgtctcaacatgttgacgaatctggactgagcctgaccctggcgaaggagcaggcacaagcttggaaggaggtgcggctccataaaaccacctggctccgctcagagattctgcatcgtgtcatccaggaactgctggtggattactatgtgaagattcaagatacaaatgtcacctccgaagacaagaaagatttcgtgtggatgagagctagattacagcaggaggtcgaagaacagctcaaaaagaaatgcttcacgctactgtgttattacgaccccaacagcgacgctgattctgagacagtaaaggccgctaaggtatggaagctggctgaggtccttgttggcgaacagcagcagtgccaggacgccaaaagccagcagaaggaacagatgctcctgctggaaaagaagtccgccgcatactctcaagtgctccttagatgccttacactcctgcagcgtttgttacaggaacatagactgaagacccagtccgagttggaccggatcaatgcccagtacttggaagtgaaatgtggagcaatgatcttgaaactgaggatggaggagctgaagattctgtctgacacttacactgtggagaaagttgaagtgcaccggctaatccgcgaccgcctcgaaggagcaattcacttgcaggaacaggatatggaaaatagcaggcaagtcctaaattcttacgaagtgctgggcgaggagttcgatcgtctggtcaaagaatacacggtgctgaagcaagcaaccgagaacaagcgctgggctctgcaggagttctccaaagtatacaggtag

SEQ ID NO: 119470 - DNA, 714 bp, synthetic construct
  misc_feature 1..714: note = Description of Artificial Sequence: Synthetic coding sequence
  source 1..714: mol_type = other DNA
atggcaagcggggatttttgtagtcctggtgaggggatggaaatcctgcaacaggtttgctctaaacagctacctccatgtaacctgtctaaggaggatcttctccaaaatccttactttagtaaattgctgttgaatctcagccaacatgtcgatgaatccggtctcagcctgaccctggcaaaggagcaagcccaggcttggaaggaagttcggctccataagactacctggctgcgctccgagatactgcatcgggtgatccaagagctgctggtggactactatgtaaagatccaggatacaaacgtgacaagtgaagacaaaaaagttctgctgcgctgtcttacacttctgcagcggctgttgcaggaacatcggcttaaaacacagtctgaactcgatcgtattaacgcccagtaccttgaggtaaagtgtggcgcaatgattctgaagctgcgaatggaggagctcaaaatcttgtctgatacttacactgtcgaaaaagtggaagtccacagactgatcagagatcggctcgagggcgccattcacctgcaagaacaggatatggaaaactccaggcaggtgctcaatagctacgaagtgctcggggaggagtttgatcgattagtgaaggaatacacagttcttaagcaagctacggagaataaacggtgggcacttcaggagttttctaaagtgtaccgatag

SEQ ID NO: 119471 - DNA, 714 bp, synthetic construct
  misc_feature 1..714: note = Description of Artificial Sequence: Synthetic coding sequence
  source 1..714: mol_type = other DNA
atggctagcggtgatttttgttctcctggagaaggcatggagatcctgcagcaggtttgcagtaaacagctgccaccctgcaacctttcaaaagaggacttgttgcagaacccttatttctccaaattactgctgaatcttagccagcatgtcgatgaaagcgggctttctctcaccttggctaaagaacaggcacaagcctggaaagaagttagactgcacaaaactacctggctgcggagtgagatactgcacagggtcatccaggaactgctcgtcgactactacgtcaaaattcaggacacaaatgtgacttccgaggacaagaaagtactgttgagatgtcttaccctcctgcagcgcttgctgcaggagcatcgtctgaagacccagtccgaattggataggatcaacgcccagtatctggaggtcaaatgcggcgccatgatactgaaattaagaatggaggaattaaagatactttccgacacatacaccgtagaaaaggtagaggtgcacaggctcattagggataggctggagggggctatccaccttcaggagcaggacatggaaaattctagacaagtgttgaactcctatgaggtgctgggtgaagaattcgacaggttagtgaaggaatatactgtgctgaagcaggccaccgaaaacaaacggtgggccctgcaggagttctccaaggtttataggtag

SEQ ID NO: 119472 - DNA, 720 bp, synthetic construct
  misc_feature 1..720: note = Description of Artificial Sequence: Synthetic coding sequence
  source 1..720: mol_type = other DNA
atgaggcttcttggccccagtcaggaaagagagatacccccccttcttggactggagaaagcggatctcctggaactcatgccactgagcgaagactttgtgtggatgagagcccggttgcaacaggaggtggaagaacagctgaaaaaaaaatgctttacacttttgtgttactatgatcctaactctgacgcagactcggagaccgtgaaggcagcaaaagtctggaagttggcggaagtgttggttggtgagcagcaacagtgccaggatgccaaatcgcagcagaaagaacagatgctgctgctcgagaaaaagagtgcagcctactcccaggtcctcctccgatgcttgacattgctccagcgactgctgcaagaacaccgccttaagacccagagtgaactggaccgtattaatgcccaatatctggaggttaagtgtggggcaatgattctcaaactccgaatggaagaactaaagatcctgtccgacacatacaccgtggaaaaagtagaagttcataggcttatccgcgatagactcgaaggagccatccatctacaggagcaggacatggagaatagtagacaagtactgaatagttatgaagttcttggagaagaatttgatagactcgtgaaggagtacacagttttaaagcaggccacagaaaataagagatgggcgctccaagaattcagtaaggtctaccgctag

SEQ ID NO: 119473 - DNA, 1092 bp, synthetic construct
  misc_feature 1..1092: note = Description of Artificial Sequence: Synthetic coding sequence
  source 1..1092: mol_type = other DNA
atggcgagcggagatttctgcagcccgggagagggaatggaaatcttacaacaggtgtgcagcaagcaactgcctccatgtaacctgtcgaaggaagatctgctgcaaaatccatatttttctaagctacttcttaatttgtcacagcacgtcgacgaaagcggtctgagccttaccttggctaaggaacaggcccaggcttggaaagaagtgcgtctgcataaaaccacttggctgagatccgagattttgcatcgagtgatccaggagctgctggtcgattactacgtgaagatacaggacaccaacgttactagcgaagataaaaagtttcacgagacactggagcagaggctcctggtgacagagctgatgaggctgctcgggcctagccaagaacgcgagattccacctctccttggactggagaaggccgacctgctagaattaatgcccctgtccgaggattttgtgtggatgcgagcccgcttgcagcaggaggtggaggaacaattaaagaaaaagtgttttactttattgtgctactatgatccaaatagtgacgctgatagcgaaaccgtgaaggctgccaaagtttggaagctggctgaagtcctggttggcgagcaacagcagtgtcaagacgcaaagagccagcagaaggagcaaatgttattgcttgaaaaaaagtctgccgcgtacagccaggtgctgctgagatgtctgaccctcttgcagcgcctgctccaggaacataggctgaaaacacaatcggaattagatagaattaatgcccagtacctggaagtgaagtgtggcgcgatgattttaaagctgcggatggaagagctcaagattctgtcagatacctataccgtggagaaagtggaggtgcatcgactgatccgggaccgcctggagggagctatccacctccaggaacaagacatggaaaactctcgccaggtcctgaacagctatgaagtcttgggcgaagagtttgaccgtttagtaaaggaatatacagtattaaaacaggccaccgagaacaaacgatgggcccttcaagagtttagtaaggtttatcgctag

SEQ ID NO: 119474 - DNA, 54 bp, synthetic construct
  misc_feature 1..54: note = Description of Artificial Sequence: Synthetic coding sequence
  source 1..54: mol_type = other DNA
atgcgcctgctgggcccctcacaagagagagaaatacctcccctgttggggtag

SEQ ID NO: 119475 - DNA, 564 bp, synthetic construct
  misc_feature 1..564: note = Description of Artificial Sequence: Synthetic coding sequence
  source 1..564: mol_type = other DNA
atggcttcaggggatttttgcagcccgggtgagggcatggagattctgcagcaggtatgctcgaagcaactcccaccgtgtaacctttcaaaagaagacctgctccagaatccttactttagtaaactcctgctaaacctgtcacaacacgtcgatgagagcggtctaagtctgactctggcaaaagagcaagcccaagcttggaaggaagttcgcttgcataaaacaacatggcttcggagcgaaattctccatagggtcatccaggagcttctagtggactactacgtgaagattcaggatactaatgtcacttccgaggacaaaaagttccacgagacactggaacagagactgctggtcaccgagctgatgcgcctgctggggccttcccaggaacgtgagattccgcctctgctggggctggaaaaagcagatctccttgagctgatgcctttatccgaggactttgtctggatgcgcgccaggctgcagcaggaggtcgaagaacagctaaagaagaagtgctttactttgttgtgctactacgaccccaattcctag

SEQ ID NO: 119476 - DNA, 840 bp, synthetic construct
  misc_feature 1..840: note = Description of Artificial Sequence: Synthetic coding sequence
  source 1..840: mol_type = other DNA
atggcttctggcgacttctgttccccgggcgaaggcatggagatcctacagcaggtttgctcgaagcagcttcccccatgcaatctttccaaggaggatcttcttcagaatccctacttctccaagctactactgaatctgtcacaacatgtagacgaatctggcctcagcttgaccttggctaaggaacaggcccaggcctggaaggaggtgcgtctgcacaaaacaacctggttgcggagcgagatactgcaccgggtcatccaggagctcctcgtggattactacgtgaagattcaggataccaatgtgacgtccgaggacaaaaagttccacgaaaccttggaacaacgcctcctggtgactgaactgatgagattattaggcccttcccaggaaagagaaattccccctctcctggggctcgagaaggcagatctgctcgagcttatgcctctgtctgaagattttgtctggatgcgggcccggctgcaacaagaggttgaggagcagctgaaaaagaaatgctttacactgctctgctactacgacccaaattctgatgctgacagtgagacggttaaggcagccaaagtgtggaagctcgcagaagtactggtcggtgaacagcaacagtgtcaagacgctaaatcccaacagaaagaacagatgctcctgctcgagaagaagtctgccgcttactcccaggtattactacgctgtctcacactgctgcagcggctgttgcaggagcatcgcctgaagacccagtccgagctggaccgaataaatgctcaatatttggaggtcaagtgtggggctatgatcttaaaattatag

SEQ ID NO: 119477 - DNA, 957 bp, synthetic construct
  misc_feature 1..957: note = Description of Artificial Sequence: Synthetic coding sequence
  source 1..957: mol_type = other DNA
atggcctcaggcgatttttgtagtcctggcgaaggtatggaaatcttgcagcaggtgtgtagcaagcagctgccaccttgtaatcttagtaaggaggatctgctgcagaacccttacttttctaagcttctactgaatctgagccagcacgtcgatgagtcagggcttagtctgactctcgctaaagagcaggcgcaagcttggaaggaggtccgactgcacaaaaccacttggttgcgctccgaaattttgcatcgggtgatacaggaactgctggtggattactacgtgaagattcaggacacgaatgtgacttctgaggacaagaaggacttcgtatggatgcgtgctcgtttgcagcaggaggtggaagaacagttgaaaaaaaagtgcttcacactcctgtgctactacgatcctaactctgacgcagatagcgagacagttaaagcagctaaagtgtggaagctagccgaagtactggtaggggaacagcagcaatgtcaggacgctaagagccaacagaaagaacagatgctgctcctagaaaagaaaagtgctgcctactctcaggtcctgctaagatgtcttaccctcctgcagaggctcctgcaagaacaccgccttaaaacccagtcagagctcgatagaataaacgcacagtacctggaggtgaagtgtggggctatgattctgaagctccgaatggaggaactgaagattctcagcgacacttacaccgtcgagaaggtagaggttcataggttgattagagacagactggagggcgccattcatctccaggaacaggacatggagaatagccgccaagtgctgaactcatatgaagtgctgggggaagagtttgataggcttgtcaaagagtatacggtcttgaagcaagccactgaaaataagcgctgggccctccaggaattttcaaaagtgtaccgctag

SEQ ID NO: 119478 - DNA, 957 bp, synthetic construct
  misc_feature 1..957: note = Description of Artificial Sequence: Synthetic coding sequence
  source 1..957: mol_type = other DNA
atggcctctggggatttctgctcaccaggagagggcatggaaattctgcagcaagtgtgtagcaagcagctgccaccctgcaaccttagcaaggaggatctgcttcaaaacccttatttctctaaactgctactaaacctgagtcagcacgtggacgagagtggtctctctttgactttggccaaggagcaggctcaagcctggaaggaggtacggctgcacaagactacttggctcaggagcgagatccttcatagggtgatccaagagcttctggtggactactatgtgaagatccaggacacaaacgtaacctccgaggacaagaaggatttcgtgtggatgagggcccgtctacaacaagaagtagaagaacagctgaagaagaagtgctttaccctgctctgctattacgatccaaactctgatgccgactcagagacagtgaaagccgcaaaggtgtggaagctggctgaggtgctggtcggcgaacagcagcagtgtcaagatgcaaaaagccagcagaaggaacagatgttactgctggaaaaaaagtccgccgcctactcccaagtgttactgaggtgcctaactctcctccagaggctgctgcaagaacacaggctgaaaacacagtctgagcttgaccgcattaatgcccagtacctcgaggtgaagtgtggcgctatgattttgaagctgcgtatggaagagctgaaaatcttgtctgacacttacacggttgagaaagtagaggttcaccgcttaatcagagatcggctggagggcgctattcacttacaagagcaagacatggagaactcccgacaggtcctcaattcttacgaagtgctaggggaggagttcgaccggttggttaaagaatacactgtgctgaagcaggccacagagaataaaaggtgggccttgcaagagtttagcaaagtttatcggtag

SEQ ID NO: 119479 - DNA, 483 bp, synthetic construct
  misc_feature 1..483: note = Description of Artificial Sequence: Synthetic coding sequence
  source 1..483: mol_type = other DNA
atggccagcggggatttctgctctccaggagaaggcatggagatactgcagcaggtctgttccaaacaactccccccatgtaaccttagcaaggaggatctgctgcagaacccttacttctccaaactgctgttaaacttgagtcagcatgttgacgaaagcggcttgagcctgaccctggccaaggagcaggctcaagcctggaaagaagtgagactccacaagacaacttggctgagatcagagattctccatagagtgattcaggagttactggtggactactacgtgaagattcaagacactaacgttacctctgaagataaaaaatttcacgagacactggaacaaaggcttctggtcactgaactgatgagactacttggcccttcgcaagagagggagattccccctctgctcggactggaaaaggcagatctgctcgaactgatgcccctgtcagaagacttcgtgtggatgtag

SEQ ID NO: 119480 - DNA, 1902 bp, synthetic construct
  misc_feature 1..1902: note = Description of Artificial Sequence: Synthetic coding sequence
  source 1..1902: mol_type = other DNA
atggagttggcgcaagaagccagggagcttgggtgctgggcggttgaagaaatgggcgttcctgttgcggcaagagccccagaatcaaccctgcggcgactctgcctggggcagggagcagacatttgggcctacatactccagcatgtccatagccagcgaaccgtcaaaaaaatcaggggaaacctcctgtggtatggtcaccaggactcaccacaggtgagaagaaagctcgagctagaagcagccgtgaccagactgagagctgagattcaggaacttgaccaaagcttggagctgatggagcgtgacacagaagctcaggacaccgctatggagcaggcccggcagcacacacaagatacacagagacgagcactgttactaagagcgcaagccggcgccatgaggagacagcaacatacgctgagggaccctatgcagaggttacagaatcaactccgaagacttcaagacatggagcgcaaggcaaaagtggatgtgacattcggatcattgacttccgccgctctgggcctggagcccgtggtgcttagggacgtgcgcaccgcctgcacactccgcgctcagttcctgcagaatttgttgctaccccaggccaaacgcgggagtctcccaactccccacgacgatcactttggaacttcctaccagcagtggctcagttccgtcgagactctgctgactaaccaccccccaggacacgtgttagcggccttagagcacctggctgccgaaagagaggctgaaataaggtccttgtgtagcggagacggcttgggcgacacagagatatcaagaccccaagcgccggaccagagtgactcatcacagacattgccctctatggtacacctgatccaggagggctggcgtacagtgggcgttctagtgagccaaaggagtactctcttaaaggagcggcaagttcttacacagcgattacaaggactggtggaggaagtcgaacggcgggttctcggaagtagcgaacgccaggtcttgatactgggactccgccgatgttgcctatggaccgagttgaaggctcttcacgaccagtcccaagaattgcaggatgctgctggccatcggcagttactgctgcgggagttgcaagcaaaacagcagcggatacttcattggagacagctggtcgaagaaacccaagaacaagtgcgcctgctgatcaagggcaactcagcatcaaagactcggctgtgtcgctcacccggggaggtgctggctcttgttcagaggaaagttgttccgacattcgaggctgtcgctccccagtcccgggaactcctccgctgcctcgaggaagaagttcgacacctacctcacatcctactgggaaccctgctgagacaccgccctggagaactcaagccacttcctaccgtcctgcccagcatacatcagttacaccctgcatcgccacgtggttcatcattcattgccttatcccataaacttggtttgcctcccggaaaggcaagtgagcttttactccccgctgctgcctccctccgccaagatctcctcctactccaagatcagcgtagtttgtggtgttgggacttactgcatatgaagactagccttcctcctggtctgccaactcaggagctgctgcaaatacaggcttcacaggaaaaacaacagaaagagaaccttggacaggcacttaagcggttagagaagttgctaaaacaggctcttgagcgtattcctgagttacaaggcattgtgggagattggtgggaacaacccggccaggcagctctgtccgaggagttatgtcagggactcagcctgccccagtggagattacggtgggtccaggcccagggcgccctgcaaaagctctgtagttag

SEQ ID NO: 119481 - DNA, 873 bp, synthetic construct
  misc_feature 1..873: note = Description of Artificial Sequence: Synthetic coding sequence
  source 1..873: mol_type = other DNA
atggaactggctcaggaggcccgtgaactgggctgttgggcagtcgaagagatgggggttcctgtggctgcccgcgccccagaatctaccctccggaggttgtgtttgggccaaggagccgatatttgggcatacattctgcaacacgtacacagccaaagaactgtaaaaaagatccgcgggaacctactctggtatgggcatcaggacagccctcaggtcaggcgcaaacttgagcttgaagctgctgtcacacgccttagagccgagattcaagaattggatcagtcccttgagttgatggagcgcgataccgaggctcaggatactgcaatggaacaggcccgacagcacacacaggatacccagcgaagggccctgctgctcagagcgcaggccggcgctatgcgcagacaacagcacaccctccgtgatccgatgcaaagacttcagaaccagctaaggcggctgcaggacatggaacgcaaggccaaagtggatgtgactttcggttccttaacatctgctgccctgggcctggagcctgttgtgttaagggacgtgcgcacagcatgtacattgagggcacaattcctccaaaatcttctgttgcctcaggctaagcgcggttcattgcccactccacatgatgatcattttgggaccagctaccagcagtggttgagctctgtggagactctcctgacaaaccatcccccgggtcacgtgttagcggctttggagcatctggccgctgagcgggaggcggaaatccggagtctgtgcagtggcgatggcctgggtgacaccgaaatcagtcggagggctggcggcctctgggtatgctggagtccctccggggctccctcatag

SEQ ID NO: 119482 - DNA, 2409 bp, synthetic construct
  misc_feature 1..2409: note = Description of Artificial Sequence: Synthetic coding sequence
  source 1..2409: mol_type = other DNA
atgaaatatatcaaatccaactccaagaactcttcccaccactttgtggagacgttcaacatcaaaccccaggacctgcacaagtgtatagcccggtgtcacttcgcgcgctcccgcttcctccaaattctccagcggcaggattgcgtgactcagaaataccaggagaatgcccagctcagtgtgaagcaggtacgcaatctcagaagcgaatgcatcggtctcgaaaaccagattaaaaagatggagccgtacgacgaccactcgaacatggaggaaaagatacagaaggtcagaagcctctgggcaagtgtaaatgagactctgatgttcctggagaaggagagagaggtggtctcttctgtgttgtccctggtgaaccagtacgccctagacgggactaacgtggcgatcaatatcccgcggctgttactcgataaaatcgagaagcagatgtttcagttgcacatcggcaatgtgtacgaagcgggcaagttgaaccttcttacagtgatccagctcctcaatgaggttctgaaggtgatgaagtatgagcgttgtcaggctgatcaagccaggttaacagttgatctccattacctcgaaaaggagacaaagttccagaaggaacggttaagtgatctcaaacacatgaggtatcgaattaaagatgacctaactaccataaggcattcagtggtggaaaaacaaggagaatggcataagaagtggaaagaattcctggggctgagccctttcagccttattaagggctggacacccagcgtagatcttctgccccctatgagtcccctgtcgtttgaccctgccagcgaagaggtatacgcgaagtcaattctctgccagtatccagcatcattgcctgacgcccataagcaacacaaccaggagaacgggtgcagaggggattccgatacactgggcgctttacacgatttagctaactcccctgcatcctttcttagccagagcgtttctagcagtgaccggaattctgtgactgtgctcgagaaggacactaagatgggaacccctaaagaaaaaaacgaggctatctctaagaaaattccagagtttgaggttgagaactcccctctcagcgatgtggccaagaacaccgagagcagcgccttcggcggctctctgccagccaagaagtccgatccattccagaaggaacaggaccacctggttgaagaggtcgcgagggcggtgctgtctgattcaccccagctgtccgaaggaaaggagatcaaattggaggagttaattgactccctgggatccaatccctttctgactagaaaccagatcccccggacacctgaaaacctcataacagagatccgctcttcatggaggaaagctatcgaaatggaagaaaaccggactaaagagcctatccagatggacgccgaacaccgtgaggttttgcccgaaagcctccctgtgcttcataatcagagagaattcagtatggctgattttcttttggaaacaacagtatccgactttggccagagccatctgacagaggagaaggtaatcagcgattgtgagtgcgtgcctcagaaacacgtcctcacaagtcacattgacgaacctcccacacagaatcagtcggatctgctgaataagaaggtcatttgcaagcaagatctagagtgtctcgcattcactaaactgtctgagacaagccgcatggaaacattttctcccgcggtaggaaatcggatcgacgtcatggggggatcagaagaagagtttatgaaaatccttgaccaccttgaggtgtcttgcaacaaaccctccaccaataaaactatgctctggaactcgttccagatctcgtctggtatctctagcaaatccttcaaagacaacgacttcggcatcctgcatgaaaccttgcctgaggaggtggggcatctgtccttcaactctagctccagctctgaagcaaatttcaagctggagcccaattcgcctatgcatggtggcacactattggaagacgttgttgggggtcgtcagaccacacccgaaagcgacttcaacctgcaggcccttaggtcgcgctacgaggccctcaagaagtccctgagtaaaaagagggaggagtcgtacttgtccaactctcagactcctgagcggcacaagcccgaactgtcccccacccctcaaaacgtgcaaacagatgacacactcaatttcctagatacctgcgatcttcacacagagcacatcaagccaagtctgagaacatcaatcggggagcgcaaaagatcactgtccccactaataaagttctcccctgtagaacaacgtctcagaactaccattgcttgtagcctgggagagttgcccaacctcaaggggaaggtatag

SEQ ID NO: 119483 - DNA, 2868 bp, synthetic construct
  misc_feature 1..2868: note = Description of Artificial Sequence: Synthetic coding sequence
  source 1..2868: mol_type = other DNA
atgtctagcgcctctgtcacagcgttcgagaaggagcacctgtggatgtacctgcaggctttgggcttcgaaccggggccggctactatagcttgcggcaaaattgtgagtcatacccaccttggcgtaaacatgttcgacaaactcaaccgtgacgctttccacatcatttcctattttctatttcaggtgttggatcagtcactcaccaaggaagtcttcaagttctgctggccacccttcgaccagaaaagcgacacagaatttcggaaacattgctgtgagtggatcaagcgtatctcaggcgagtgcgggtcaagcttcccccaggttgttggctcactgttcctctctccgggaggccccaagttcatccaccttatgtaccactttgctaggttcgtagcgatgaagtacattaaaagtaattccaaaaatagctcccaccactttgtggagaccttcaatattaagccccaggatcttcataagtgtatcgcacgatgccacttcgctcgcagtcggtttctgcaaatcctgcagcggcaggactgtgtgacgcagaagtatcaggagaatgcgcaactttctgtcaagcaggtgcggaatctgcggtctgaatgcatagggcttgagaatcagattaagaagatggaaccgtacgacgatcactctaacatggaggaaaagatccagaaagttagatccctgtgggccagtgtcaacgagaccctaatgtttttggaaaaggaacgcgaggtggtctcctcagtgctctcgttggtgaaccagtacgcattggacggcacgaacgttgctatcaacattccgcggctgctgttagacaagattgagaagcaaatgttccagctgcacatcggtaacgtatacgaggccggaaagttgaatctcctcaccgttatccagctgctgaatgaggttctcaaagtaatgaaatacgagaggtgccaagctgatcaggccagactgactgttgacctccattacctagaaaaagaaaccaagtttcaaaaggagagactctccgacctcaagcacatgcgttatcgtatcaaagacgaccttaccacgatccggcattccgttgtggaaaaacagggagaatggcataagaagtggaaagagttcctggggctctctcctttttccctcataaagggttggactccctctgttgatctcctgcctccaatgtctccattgagtttcgatcctgcatccgaggaggtgtatgccaagtctattctttgtcagtacccggccagcctgccggatgcccataaacaacataaccaggagaatggatgcagaggggacagtgacacacttggcgccctgcacgatctggctaattcacctgcctcatttctctcacagtcggtgtcctcttccgatcgtaattctgttacagttctggaaaaagacaccaaaatgggaaccccaaaggaaaaaaatgaggcgattagcaagaagattcccgaatttgaggtcgagaactctcctttgagcgacgtagccaaaaacacagaatccagcgcgtttggtggctcactgcctgcaaaaaaatctgacccattccaaaaagagcaggatcacctggtggaagaagtggcacgggccgtcctgagtgattcgccccaactgtctgagggaaaggagatcaagttagaggagcttattgactctctcggtagcaatccattcttaaccagaaaccagatccccagaacacccgagaaccttattacagagatcaggagctcctggcgtaaggcaatcgagatggaagagaacagaacaaaagaaccaatccagatggacgccgagcacagagaagtgctgccagagagtctgccagttctccacaatcagagagaattctcaatggcggacttcctccttgaaacaacagtgagcgattttgggcagagtcacctgaccgaagagaaggtgattagcgattgcgagtgtgttccccaaaaacacgttttgacgtcccatattgacgaaccgcccacccagaatcagtctgacctgctgaacaagaaggtcatatgcaaacaggacctggagtgtctagctttcaccaagctgtccgagacctcaagaatggaaaccttctctcctgctgtcgggaatcggatagatgttatgggggggagtgaagaggagttcatgaaaattctcgatcacctggaggtatcttgtaacaaaccctcaacaaataagaccatgctgtggaactcatttcaaatttccagcgggatctcaagcaaatcttttaaggataatgattttggcattctgcatgaaacactcccggaagaggtagggcatttgtcatttaattcaagtagttcctctgaggcgaatttcaaattggaaccgaactcacctatgcatgggggaactctgttggaggacgtggttggggggagacaaacgactcctgaatccgactttaacctgcaggctcttcgcagtaggtacgaggccttgaaaaaaagcctctcaaaaaagagggaggagagctatctgtcaaactcacaaactcccgagcgccacaaacctgagctctcaccaactcctcaaaatgtccagactgatgacacactcaatttcctagacacttgtgatttacatacagaacacataaaacctagcctgcggacctcaatcggagagagaaaacgctctctctctcccctgatcaaattttctcccgtagagcaacgactccgaacaacgatcgcgtgttccctgggagagctgcccaacctgaaggaggaggacatactgaacaagtcccttgatgccaaggagccaccttcggacctgaccagatag

SEQ ID NO: 119484 - DNA, 552 bp, synthetic construct
  misc_feature 1..552: note = Description of Artificial Sequence: Synthetic coding sequence
  source 1..552: mol_type = other DNA
atgggaacccccaaggaaaagaatgaggcaatctccaagaagatacccgagtttgaagtggaaaattctcccctatctgacgtggctaagaacacggagtcaagtgcgttcggaggaagcctgccagccaagaaatcggacccatttcagaaggagcaggaccatcttgtggaggaagttgctagggcggtattgagtgatagcccacagttgtccgaaggaaaagagatcaaactggaagagttgattgacagtctcggcagtaacccctttctaacccggaaccaaattccacgaacccctgagaacctgattactgagatcagatcgtcttggcggaaggccattgagatggaggaaaaccgaacaaaagaaccaatccagatggacgctgagcatagggaagttctacccgagtccttgcccgttcttcataatcagagagaatttagcatggcagacttcctcctggaaactactgtgtccgactttgggcagagccatctgacagaagaaaaggttatttccgattgcgaatgtgtaccacagtag

SEQ ID NO: 119485 - DNA, 1077 bp, synthetic construct
  misc_feature 1..1077: note = Description of Artificial Sequence: Synthetic coding sequence
  source 1..1077: mol_type = other DNA
atggccggacaagacgcaggatgtggcaggggcggagacgattatagtgaagacgagggggattcttccgtgagtcgcgccgcagtggaagtgtttggtaaactcaaggacctgaactgtcccttcctggaaggtttgtatatcactgaaccaaaaaccattcaggaattgctctgttctccttcagagtacagacttgaaatcctcgaatggatgtgcaccagggtctggcctagtctccaggatagattcagtagtctgaagggagtaccaactgaagtgaagattcaggaaatgacaaagctcggacacgagctgatgctgtgcgctcctgacgatcaagaactcctcaagggctgtgcctgtgcacaaaagcagcttcatttcatggatcagctcctggacacaattaggagtttgaccattggatgctccagctgcagcagtttaatggaacactttgaggacactcgcgaaaagaacgaggcacttctgggagagttgttttcctcccctcatttacagatgctgctgaatccagagtgtgatccttggcctcttgacatgcagcctctgttgaataagcaaagcgacgactggcagtgggcatctgcctctgccaaatctgaggaggaggagaagctagctgagctggctcgccagctgcaggaatctgctgccaagctgcacgctctgcggacagagtacttcgcgcagcatgagcagggcgccgcggctggagccgctgatatctcgaccctcgaccagaaactgaggctggtgacatcagatttccatcagctgattttagcctttctgcaggtgtacgacgatgaactgggcgaatgttgccagaggccgggtcccgatttgcatccgtgtggccccatcattcaggccacccatcagaacctcacttcctacagccagcttttgcaggttgtaatggccgtggcagacacatctgcaaaagccgtagagactgtgaagaaacagcagggcgagcagatctgttggggaggaagcagcagcgtgatgagcttggctacaaaaatgaacgagctgatggaaaagtag

SEQ ID NO: 119486 - DNA, 1284 bp, synthetic construct
  misc_feature 1..1284: note = Description of Artificial Sequence: Synthetic coding sequence
  source 1..1284: mol_type = other DNA
atgggaggtgctcgactcggcgcccggaatatggctgggcaggatgcaggttgcggtcggggcggcgatgattacagcgaagatgagggtgatagctccgtgtcccgagccgcagtagaggtatttgggaaactcaaggacttgaactgtcctttcctggagggactgtacataacagaacccaagacaatacaggaactgctgtgttctcctagcgagtaccggctggagattctggagtggatgtgtaccagggtatggcccagcctacaagatcggttctcttccctgaagggcgtaccaactgaggtgaaaatacaggagatgacaaaactgggacatgagcttatgttgtgcgctccagacgatcaagagctcctcaaggggtgtgcctgtgcccagaaacagttgcacttcatggaccaactgctggataccatcagatccctgaccattggctgctcaagttgttcttctctgatggagcatttcgaagacacacgcgagaaaaacgaggcattattaggagagctgtttagttctccacacctgcagatgctgctgaaccccgagtgtgacccctggcccctcgacatgcagcctttgctgaataaacaatccgatgactggcagtgggcgagcgcttctgccaaaagcgaggaggaggaaaagttagcggaattggccagacaattgcaggagtccgccgcgaagctgcacgcccttcgcaccgagtactttgcccagcacgagcaaggggcggcggcaggggccgccgatatttctacattggatcagaaactgagactggtgacaagcgatttccaccagcttattctagccttcctgcaggtgtatgatgatgagctgggggaatgctgccagcggcccggtccagatttgcatccctgcggaccaatcatacaggccactcaccagaacctgacatcatacagtcagatacccagaggccagccaaaaaagcctgccctggtcacaatgactactgtcccaacatgcgcaacactgccacttgcccagggcttccgcgacgtgcacttcgggtttctttccgagcgcctgcgggcgtttcagccactcacgggctggtcatgcgagacaccaagatcgggcatgctactccaagtcgtgatggccgtggccgatacgtccgccaaggccgtcgaaactgtcaagaaacagcagggcgaacagatctgctggggtggctccagttcggtaatgtcattggctactaagatgaatgaacttatggagaaatag

SEQ ID NO: 119487 - DNA, 1107 bp, synthetic construct
  misc_feature 1..1107: note = Description of Artificial Sequence: Synthetic coding sequence
  source 1..1107: mol_type = other DNA
atggggggagctagactgggggctagaaacatggcagggcaagacgccggttgcggaagaggcggcgacgattactccgaagacgagggcgacagctctgtgagccgagccgcagtggaagtcttcgggaagctgaaggacctcaattgtccattcctggaaggtctgtacatcactgaaccgaagaccatccaggagcttctttgttctccatccgagtatcgcctggagattttggaatggatgtgtactcgtgtctggccatcacttcaggatcggttctcttccttgaagggcgtgccgaccgaggtcaagatccaagagatgacaaagctgggccacgaactgatgctctgcgctcccgacgaccaagagctgttaaaaggttgcgcatgcgcacagaagcagctgcactttatggatcagctcctggacaccatcaggtcactgacaattgggtgcagcagttgttcctctttgatggagcatttcgaggatactagagaaaaaaacgaggcgctgctgggagaactcttttcatcaccacacctgcagatgctgttgaaccctgaatgtgatccctggccattggatatgcagcccctgctgaacaaacagtccgacgattggcagtgggcgagcgcttccgccaaatcagaggaagaggaaaagctggctgagcttgcccgtcaactccaagagtctgcagcaaaattacacgcgctccggaccgagtattttgcacagcatgaacagggagcagctgccggcgcagctgacatctctacgcttgaccagaagttaaggctcgtaaccagtgactttcatcaacttatactggcattccttcaggtctacgacgacgaattgggcgaatgctgccaaagacctggtcccgaccttcacccatgtggccccataatacaggcgacccatcaaaatctgacctcgtatagtcagttacttcaggttgtcatggctgtagccgacacaagtgctaaggcagttgaaaccgtgaaaaagcagcagggcgagcagatctgttggggtgggagctcatctgtcatgtccctcgccactaagatgaatgagttgatggaaaaatag

SEQ ID NO: 119488 - DNA, 411 bp, synthetic construct
  misc_feature 1..411: note = Description of Artificial Sequence: Synthetic coding sequence
  source 1..411: mol_type = other DNA
atggaccagctgttggataccattagatcactcacaatcggctgctctagctgctcctccctgatggagcacttcgaagatacacgcgagaagaacgaagccttgctgggagaactctttagctctcctcatcttcaaatgctcctgaatccagagtgtgatccttggcctctcgacatgcaaccactgctgaataagcagtccgacgactggcagtgggcatcagcctctgctaaatccgaagaggaggagaaactggccgagctagccaggcaattgcaggagagcgcagccaagttgcacgctctccgcacggagtcgacaactactagctgggcttcagccgcttcggcccaagcactcacttccacccgggccgcaccatcttccaggcctcgcacccgtatttag

SEQ ID NO: 119489 - DNA, 516 bp, synthetic construct
  misc_feature 1..516: note = Description of Artificial Sequence: Synthetic coding sequence
  source 1..516: mol_type = other DNA
atggttaagagaaggagatcaccagctttgggcgaagagcgctttagtccttctagcattcttcacccaagattacctctcgttttactcgggacacgggtgcccctctctgggggcgggcccggtgagccagaccaaggaaggtctgccccatcatggaagagtcttgcgtctacgcaccaccattcccggccagcagcaggagccactcccgctcggccggcgactcaaagccaactgggaccctttgcacctcccctgcccggcgtgaggccagcgcccttccccgctgtcgaggtctttgggaaactaaaagatctgaactgtcccttcctggagggcctgtatattaccgagcctaagaccatccaggagctcctctgcagtccatcggaatatagactcgaaatccttgaatggatgtgcacacgtgtttggccatctctgcaggacaggttcagctcgctgaaaggagtgcctacggaagttaagatccagggactgttagccggatag

SEQ ID NO: 119490 - DNA, 1233 bp, synthetic construct
  misc_feature 1..1233: note = Description of Artificial Sequence: Synthetic coding sequence
  source 1..1233: mol_type = other DNA
atggcagatagctctggaaggggggcgggtaaacccgccacaggaccaactaacagctcatctgcaaaaaagaaggacaagcgggttcagggagggcgagttattgagtctaggtatttacagtacgagaaaaaaactacccagaaagccccggcaggagacgggtcccagacacggggaaagatgtcagaaggggggaggaagagcagcttactgcagaagtcgaaggcagactccagcggtgttggtaagggagacttacagagtactcttcttgagggacacggcacagctccccccgacctcgatttaagcgccatcaatgataagtcaattgttaagaagacaccgcaactcgccaagacaatctcgaagaagccagagagcaccagttttagcgcgccccgcaaaaaaagccctgacctgagcgaggcgatggaaatgatggagagtcaaactctgctcttaacgctgctgtccgtgaaaatggaaaacaacttggcagagttcgagcgccgggccgaaaagaacttactgatcatgtgcaaggagaaggagaagctccagaaaaaggcccacgagctcaagcggcggttactcctgtcacagagaaaaagggaacttgcagacgtgttagacgcccagattgagatgctgtcaccattcgaagccgtggctacacggttcaaagagcaatatagaacattcgcgaccgctctggacaccactcgccacgagctgcctgttaggtcaatccatttagagggtgacgggcagcagttgttagatgcattgcagcatgagctagtgactacccaacgcttgcttggcgagcttgatgtgggcgatagcgaggaaaatgtgcaggtacttgacctcctcagtgagctcaaagatgtcactgcaaaaaaagaccttgagctgaggcggtccttcgcgcaagtactggaactgagtgctgaggccagcaaagaggccgctctcgctaaccaggaggtatgggaagaaacccaagggatggccccaccgagcaggtggtacttcaatcaggatagcgcctgccgggagtccggaggcgcacctaagaacacaccgctgagcgaggacgataaccccggtgctagcagtgctcccgctcaggctaccttcattagtccctcagaagattttagctctagtagtcaagctgaagtaccccccagtctgagtcggagcggcagggacctttcttag

SEQ ID NO: 119491 - DNA, 1230 bp, synthetic construct
  misc_feature 1..1230: note = Description of Artificial Sequence: Synthetic coding sequence
  source 1..1230: mol_type = other DNA
atggccgatagctctgggcggggtgcaggtaaacctgctacgggccctaccaatagttcttcagctaagaagaaagacaaacgagtccaaggcggtagggtgatcgaaagcaggtacctgcagtatgaaaaaaaaacaactcagaaagccccagccggagacggcagccagacaagaggtaagatgagcgaaggcggacggaaatccagcctgttgcaaaagagcaaggattcaagcggcgttggtaagggggatttgcagagtacactgctcgagggacacggaaccgctcctcccgatctggatttatccgccatcaacgataagtccatcgttaagaagacccctcaattagccaagaccatatctaaaaaaccggagtcaacctcctttagcgcaccacggaagaagtcccctgatctgtcagaagctatggaaatgatggagagccagaccctgctgctgaccctgttgtccgttaagatggagaataacctagctgagttcgagcggcgcgctgagaaaaatcttctcataatgtgtaaggaaaaagaaaagctacagaagaaagcccacgaactgaagcggagactgctgctgagccaacgcaagagggagctagccgacgtgctggatgctcaaattgaaatgttgtctcccttcgaggcggtggctacacgattcaaggagcagtatcggacgttcgcaacagcgctggataccaccagacatgagctgccagtgagatctatccatcttgagggcgatggtcagcagctcctggacgcccttcagcacgaacttgtgacaacccagcgactcctaggcgaactcgatgttggcgattccgaggaaaacgtgcaggttctggaccttttgtctgagctgaaagatgtgaccgctaaaaaggatcttgaactgaggcgcagcttcgcccaggtcctagagctctccgcggaagcgagcaaggaagccgctctcgccaaccaggaggtgtgggaggaaacacaggggatggcacccccatcgcgctggtatttcaaccaggactcagcctgtcgggagagtggaggagctccaaagaacacaccactcagcgaggatgataatccaggtgctagttctgcgccagctcaggcgaccttcataagccccagcgaagacttcagcagttcttcacaggcggaggtgccccccagtttgtcaaggagtggccgagatctctcatag

SEQ ID NO: 119492 - DNA, 1899 bp, synthetic construct
  misc_feature 1..1899: note = Description of Artificial Sequence: Synthetic coding sequence
  source 1..1899: mol_type = other DNA
atggcccggcaccgcaacgtgaggggctacaattatgatgaagactttgaggacgacgacctctatggacagagcgtcgaggatgattattgtatttccccgtccaccgccgcccaattcatctacagccggagagataaaccctctgtcgagccagttgaagaatatgactacgaggacctgaaggaatcgagtaattcagtctccaaccaccagctgtccggctttgatcaggcacgcctttactcttgtctggaccatatgagggaggtgctgggtgacgcagtccctgatgaaatccttatcgaagccgtgctaaagaataaattcgacgtccagaaggcactttccggcgtgctcgagcaggaccgagtgcaatccttgaaggataagaacgaggcgaccgtcagtaccggtaagattgctaagggggtcctgttcagcagctcagaggttagtgcggataatgtccagtcctcatatccccagtcagcgaaccatttggattactcaagtaaaccgttcgacttcgcgtctagcgtgggaaagtacgggctgtcgcataattcaagcgtaccgacacactgtctgctgcaccgcaagaagaaactcgatacccgaaagtctgaaaagaaacttgagagctgcaagctcacaaaggagttatctcttgccaatctaatccatgacatgagtcgcgactcctgcgaaagccagccctcagttcggctcagtagtaccgattccctggagagtctgttgagtaagaatctggatgctgatctgttgcgcccgcatgcctccgaatgcatttcaaaagacgacagtgccttcaaggagattcccgatctgaaaaccattataattaaagggaccacccccaataacagtctctatattcagaataactcattgagcgacttccagaatatcccggtacaggactctttggggagctccaataaccccttatacctgaccagctcactggaaaacatgaccgtcgacaatcttaatgccagcaaggagacagaggtgggcaatgtgtctctggtcgaacagagtgcaaagaatcacaccttcaaaaacgataatctgcagttcagtcagtgtgaaagccccagcctgacagaactgttccaagaacataaagagaacaatattagccagtgttttaccctgtctgatctgtgcaatcaaagcagcgcctctttcactgacttgtctttgggctcttttccgctgtcacagttggccaaccgttgtcagagttctcctgggattagtgagctgaccgggtcactgagcagcctggccttccataaggctagtccgacaagggacctggagaatctgtccttgagtgagcttatcgccgagaccatcgacgtcgacaacagccaaataaagaaagaatcttttgaagtgagtctctcagaagtacgatccccagggatcgacagtaacatcgacctgagcgtactaatcaagaatcccgattttgtacccaaaccagtcgtggatcctagcatcgcgccttctagtcggacaaaggtgctcagctccaagctcggaaaaaattctaactttgcgaaagataacaagaagaacaacaagggctccctcacaagaaaacctccctttagtctgtcatggacaaaggccctggccgcgagaccctcagccttcgcttctaccctctgcctaagatatcccctgaagtcatgcaaaaggagaacactggatctctacaagacctttctttatagcaggcaggttcaggacgttaaagacaaggagatctcccccctcgtggccatcaccccctttgattttaagtcagcctcacccgacgacattgtgaaggcaaaccagaaaaaagctttcacccgcgaatag

SEQ ID NO: 119493 - DNA, 1563 bp, synthetic construct
  misc_feature 1..1563: note = Description of Artificial Sequence: Synthetic coding sequence
  source 1..1563: mol_type = other DNA
atgacagtctccggcaaaaaacagacaatggggtttgaagtacccggcgtgagttctgaggaaaatggccactctttccacacaccccagaagggaccccccattgaggatgctatcgcaagcagcgacgtgctcgagacggcttccaaatctgcgaacccacctcatacaatacaggctagcgaagaacagtcgagcacgccagcccccgttaaaaaatctggaaagctaaggcagcaaatcgacgttaaggcggaattggaaaaaaggcaaggaggaaagcagctgctgaatctggttgtgatcggccacgtggatgcaggaaagagcactttgatgggtcatatgttgtatctcttgggaaacatcaataaacgtactatgcacaagtatgagcaggagagtaaaaaagcgggcaaagctagcttcgcctatgcttgggttcttgacgaaactggagaggaaagagaacgcggcgttactatggatgtcggcatgactaaatttgaaactaccaccaaagtcatcacccttatggatgcaccaggtcacaaggacttcatccccaacatgattaccggcgctgcgcaggcagacgtcgctgtactcgtggtcgatgcctctagaggggagtttgaagcaggattcgaaactggtggacaaacccgcgagcatgggctcctcgtgcgctcgctgggcgtgacccagctagccgtggctgtgaataaaatggatcaggtcaattggcagcaagaacgcttccaagagattaccggtaagctgggacactttctgaagcaggctggttttaaggagagcgatgtgggctttatcccaacatccggcttatccggcgagaacctgataactcgcagccagagcagtgaactcaccaagtggtataaaggcctgtgtctgctggagcagatcgattcgttcaaacccccgcaacgttccatcgacaagccatttcggctttgtgtctcggacgtgtttaaggaccagggttcagggttctgcattacagggaagattgaggccggctacattcagaccggggatcggttactggccatgccccctaacgaaacctgtacagtcaaggggatcaccctgcatgacgaacccgtggactgggcagccgcaggagatcatgtctccctcacacttgtgggcatggacataatcaagattaacgttggctgcatattctgcgggcccaaagtacccatcaaggcttgcacgaggttcagagctagaatattaatcttcaacattgagatccctattacaaaaggcttcccagtgctgctgcattatcagacagtctctgaaccagccgtaataaaaaggctgatctccgtgctgaacaaaagcaccggtgaggtgaccaagaagaaaccgaaattcctcactaagggccagaatgccttagtggagcttcaaactcaacgcccaatcgccctagagctatacaaggattttaaggaactcggccggttcatgctccggtatgggggcagcaccattgctgccggggttgtaaccgagattaaggaatag

SEQ ID NO: 119494 - DNA, 1929 bp, synthetic construct
  misc_feature 1..1929: note = Description of Artificial Sequence: Synthetic coding sequence
  source 1..1929: mol_type = other DNA
atggctcgtcaccggaatgtcagaggctataactacgacgaagacttcgaggacgacgacctctatgggcagagcgtggaagacgactactgcatttctccttccaccgcccggctgtattcttgcctggaccacatgcgcgaggttctaggagatgccgtcccagatgagatcttaattgaagccgttcttaagaataaattcgacgtgcagaaagccctgtctggggtgttggagcaggaccgcgtgcagtcactcaaagacaaaaacgaagccacagtgagcaccggaaagatcgccaaagggaagcccgtcgatagccagacctcacgttcagaatcggaaatagtgccaaaggtggctaagatgacagtctcaggtaagaagcaaactatgggctttgaggtgccaggggtgtcgagcgaagaaaatggccattcctttcatactcctcagaaaggacctcccatcgaagatgccattgcctcatctgacgtgctggaaacggcctcaaaatcagcgaatcccccccataccattcaagcttctgaggagcaatcctctacacccgccccagtcaagaaatccggaaagctccgacagcagattgatgtgaaagccgagctcgagaaaagacagggcggtaaacagttacttaaccttgtcgtcattgggcatgtggatgcgggaaagtccaccctgatgggacatatgctttatttactgggcaatatcaataaacgcaccatgcataaatatgaacaagagtcgaaaaaggccggcaaggcctcatttgcatacgcctgggtgctggacgagacgggagaggaacgggagcgaggagtcacaatggacgtcggtatgacaaagtttgaaactaccacaaaagtgatcacattgatggatgcacccgggcacaaagatttcattcctaatatgattacaggcgccgctcaggctgacgtggctgttctggtggtggacgcctccaggggagagttcgaggcggggtttgaaacaggagggcagacacgtgagcatggattgctcgtgcgatccctcggcgtgacccagttagctgtggccgtcaataaaatggatcaggttaattggcagcaggagcgctttcaggagatcacggggaagctgggtcacttcttgaagcaggctggcttcaaagagtcagacgttggcttcatccccacctctgggctgagcggggagaacttgattacacggtctcagtcgtcagagctgaccaaatggtacaagggactgtgcttgttggaacaaatagattcattcaaaccccctcaacgctcaattgacaagccctttcgactctgtgtaagtgatgtgtttaaggaccaggggtctggcttttgtattacaggtaaaatcgaggccggctatatacagaccggcgaccggctcctggccatgcctcctaatgagacctgtactgttaagggtatcactctccatgatgaacccgtcgattgggctgcagctggggaccatgtttccttgaccctcgtgggaatggacataataaagattaacgtggggtgtatattctgtgggccgaaggtacccattaaggcctgcacacggtttagggcccggatcctgatcttcaacattgagattcccataacgaaaggatttcctgttctgttgcactaccaaacagtttctgagccggctgttatcaaacgtctcatttcagtgttgaataagagtaccggtgaggtgaccaaaaagaagcctaaattcctcactaaaggtcagaatgctctcgtcgaactacagacccaaaggccaattgcgctcgagctgtacaaagatttcaaagagcttggccggtttatgttgcggtatggaggcagtacaatagctgccggagtggtgaccgagataaaagaatag

SEQ ID NO: 119495 - DNA, 2055 bp, synthetic construct
  misc_feature 1..2055: note = Description of Artificial Sequence: Synthetic coding sequence
  source 1..2055: mol_type = other DNA
atggcccgccacagaaacgtgcgaggctacaattatgacgaggattttgaggacgacgatctgtatggccaatccgttgaggatgattattgtatctccccaagcacggcggcgcagtttatctattcacgacgagataaaccatctgtcgaacctgtagaagaatatgactacgaagacttgaaggagtcttcaaattccgtctctaatcatcagctgtccggattcgaccaggcacgactgtattcctgcctagaccacatgcgcgaagtcctaggcgatgctgtcccagacgagattctgattgaagcggtactcaagaacaagttcgatgtccagaaggctctgtccggggttctggagcaggatcgggtgcagagcctgaaggacaagaatgaagctaccgtgtctacaggtaaaatcgctaaaggtaagcccgtggatagccaaacgtctaggtccgaatcggagattgtccccaaggtcgccaaaatgaccgtttccggcaagaaacagacaatgggctttgaggtccctggcgtgagtagtgaggagaacggccattcctttcacacaccccaaaagggaccccccatcgaggacgctattgcatctagcgacgttctggagacagcgagcaaaagtgcgaaccctcctcacaccattcaagccagtgaagagcagtcttcaaccccagccccagtaaagaagagtgggaagctccgccaacaaattgatgtcaaagccgagctggagaaacgccagggaggcaaacagctgttaaatctagtcgttatcggacacgtagatgctggtaagtctacgctgatgggacatatgctgtacctcctgggaaacatcaacaaaaggactatgcacaagtacgagcaggaatccaagaaggccgggaaggcgtcatttgcatatgcttgggtgctggacgaaactggcgaggaaagggaacgtggtgtgaccatggatgtgggaatgaccaagttcgaaaccaccactaaggtcatcacacttatggacgcaccaggccataaggattttatcccaaatatgatcacaggggcagcgcaggccgatgtggccgtgctcgtggtggacgcctctcgaggagaattcgaagccggttttgagacagggggtcaaactcgcgagcacggcctgttagtgagaagtctcggcgttacacaattagccgtggccgttaacaagatggaccaggtgaactggcagcaagagcgtttccaagaaattactggaaaactggggcactttctgaagcaggccggcttcaaggagagcgatgtcggattcataccaacctccggcctcagtggagaaaatttaattactcgcagtcagagttccgagcttaccaaatggtataaagggctgtgtctcctcgaacaaatcgattcatttaaaccacctcagcggagtattgacaagcccttccggctgtgcgtgtcagacgtgttcaaggatcagggctctggattttgtataacaggtaaaatcgaagctggctacattcagactggtgatcggttattagctatgcctcctaacgagacatgcacagttaaaggcattacgttacacgatgaacctgttgactgggccgccgctggcgatcacgtgtccttaaccctcgttggaatggacataatcaagataaacgttggatgcattttctgcggtcccaaggtgcccattaaggcctgcactaggtttagagctcgcatcctgatcttcaatatcgagatccccataaccaaggggttccctgttctgttgcattaccagacagtaagtgagccagcggtgattaaacggctgatatcggtattgaacaagtccaccggcgaggtgaccaagaagaagccgaagtttctcaccaagggccagaacgccctcgtggaactgcaaacacaacgccccatcgcgctggagttgtataaggactttaaggaactgggaagatttatgctgaggtacggaggttccacaatcgctgcaggagtggtgacagagattaaagagtag

SEQ ID NO: 119496 - DNA, 1227 bp, synthetic construct
  misc_feature 1..1227: note = Description of Artificial Sequence: Synthetic coding sequence
  source 1..1227: mol_type = other DNA
atggggcacatgctctatctacttggaaacataaataagcggactatgcacaaatatgaacaagagtccaagaaagcagggaaggcatctttcgcctatgcttgggtcctggacgagaccggggaagagagggaacggggggttaccatggatgtgggcatgaccaaattcgaaaccacgaccaaggtaatcactttaatggacgctcctggacataaagacttcattccaaatatgatcaccggtgcagcccaggcagatgtagctgttctcgtagtggacgcctccagaggcgaatttgaggccggttttgaaaccggggggcagacccgcgaacacgggttgttggtgcgctccctgggagttacgcagctggctgttgctgttaataaaatggatcaggtcaattggcaacaggaacgctttcaagagattactggcaagctgggacatttcctgaaacaggcgggattcaaagaaagtgacgtaggctttattccaacatctgggctgagcggcgagaacctgatcactcggagtcaatcttctgagcttacaaaatggtataaaggcctttgccttctggagcagatagactccttcaaacctcctcagcgctccatcgataaaccctttcgattgtgcgtttcggacgtgttcaaggaccaggggtccggattctgcatcaccggaaaaatcgaagcaggctatatacagacaggcgaccgcctcctggcaatgccacccaatgagacatgtaccgttaagggcatcacattacacgacgagcctgtcgactgggccgccgcaggcgatcacgtaagtctgacgctagtcggaatggacattatcaaaattaatgtaggctgcattttttgtggtcctaaagtgccgattaaggcgtgcacaaggttccgcgctagaattctgatattcaacatagagataccgatcaccaagggctttcccgtgttgctccactaccagactgtcagcgaaccagcagttatcaaaaggttaatctctgtgctgaacaagagcactggcgaggttactaagaaaaagccgaaatttctgacaaaaggtcagaatgcactggtggaactacaaacccaacgcccgattgccctggaactgtataaggactttaaagaacttgggcggtttatgttgcggtatgggggaagtacaattgcagccggtgtagtaacagaaattaaggagtag

SEQ ID NO: 119497 - DNA, 840 bp, synthetic construct
  misc_feature 1..840: note = Description of Artificial Sequence: Synthetic coding sequence
  source 1..840: mol_type = other DNA
atgtccctgttcgacctgtttcggggattttttggtttccccggacccagatcccaccgagacccatttttcggggggatgacccgggatgaagatgacgatgaagaggaggaggaggaaggtggctcatgggggaggggcaatccaaggtttcactctccgcagcatcctcccgaagagttcggctttgggttttctttctctcctggcgggggaatcagatttcatgataattttggtttcgatgacctcgttcgggattttaacagcattttctccgacatgggagcatggacgctgccttcgcatcctccagagcttccaggacccgagtcagagacgcccggggaacggctcagagagggacagaccttaagagactcaatgcttaagtatcccgactcacaccagccaaggatatttgggggagtgttagaatcagatgcccggtcagagtctccacagccagcgccagactggggaagccagcggccgttccacagatttgacgacgtgtggccaatggacccacacccccggacacgagaggataatgacctggattcgcaagtgtcccaagagggtttgggccccgtcctgcagccgcagccaaaaagctactttaagtccatcagtgtcaccaagattaccaaaccagatggcattgtggaggagaggcgaactgttgtcgactcggaggggagaaccgaaacaacagtcacacgccacgaggcagactcatcccccagaggagatcctgagtcccctcggccccccgccctcgatgacgccttttccatcttggacctgttcctgggccggtggttccgaagccggtag

SEQ ID NO: 119498 - DNA, 696 bp, synthetic construct
  misc_feature 1..696: note = Description of Artificial Sequence: Synthetic coding sequence
  source 1..696: mol_type = other DNA
atgagcctttttgacctctttagaggcttttttggattccctgggcccaggagctttagtcccggcgggggaatacgctttcatgacaacttcggtttcgatgacctagtacgggacttcaatagtattttcagcgatatgggtgcctggaccttacccagtcaccccccggagctccctggccctgagtccgagactcccggcgagcggttgagagaagggcaaaccctccgagactctatgctcaagtacccagacagccatcagccaaggatatttgggggcgtgctagagtctgacgcaagaagcgagtccccgcaacccgcacctgactgggggtcccagcggcccttccatagattcgatgacgtgtggccaatggaccctcacccgcgcacgagggaagacaatgatctcgatagccaagtgagtcaggagggactcgggcctgtgctgcagcctcagccaaaaagctatttcaagtccatttcagtaaccaaaatcacaaagcctgatgggatcgtagaggagagacgaactgtggtcgattcggaagggcgcactgaaacaaccgtcacccgccacgaagcggatagttctccacgcggggatccagagtctccccggcccccagcactggatgacgctttctctattctggaccttttcctcggcaggtggtttcgatcacgctag

SEQ ID NO: 119499 - DNA, 864 bp, synthetic construct
  misc_feature 1..864: note = Description of Artificial Sequence: Synthetic coding sequence
  source 1..864: mol_type = other DNA
atgagtctatttgatttgtttcgggggttttttggtttccctggtcctagaagccatagggatccctttttcggcggcatgaccagagatgaggacgacgacgaggaggaggaggaagagggcggctcttgggggagaggtaacccacgctttcactcacctcagcatccccccgaagagtttgggttcggcttttccttttccccaggtggtgggattcgctttcatgacaattttggattcgatgacctagtgcgggatttcaactccattttttcagacatgggagcatggaccttgccttcacatccgcccgccaatacatgccacctatccgctgagcttccgggccccgagtctgaaacacctggggagcgcttaagagaaggtcagacactgcgcgatagtatgctgaaataccccgacagccaccaacctcgaatcttcggaggtgtcttagaatcggatgcgcgtagtgagagcccccaaccagccccagactggggaagccagaggccattccacaggttcgatgatgtgtggcccatggaccctcatccacggacacgtgaagataatgatttggactcccaggtttcccaggagggactgggccccgtactgcagccacagcctaaatcttatttcaagtcaatctctgtcactaaaatcactaaacccgacggtatcgtcgaggagagacgaacggtggttgattccgaggggcgaactgagactactgttactcgccacgaagccgactcatctcctcgcggggaccccgaatcccctcgcccccccgctctggatgacgccttttcaattttggatctattcctgggcaggtggtttaggagccggtag

SEQ ID NO: 119500 - DNA, 1179 bp, synthetic construct
  misc_feature 1..1179: note = Description of Artificial Sequence: Synthetic coding sequence
  source 1..1179: mol_type = other DNA
atgcaaagcccagcagtgctggtcacttcacggcgacttcaaaacgcccacactggactcgaccttactgtcccacagcaccaggaagtgagggggaaaatgatgtcggggcatgttgagtatcagattcttgtggtgactaggttggctgcctttaaaagtgccaaacaccgcccagaggacgtagtccagtttttagtgagtaagaaatactctgagatcgaggagttctatcagaagctgtcatctcggtacgcggcggccagccttccgccgttgcctcgcaaggtcttgtttgtgggtgagtcagatattcgcgagcgaagggctgtgtttaacgaaattctgaggtgcgtgagcaaagacgctgagctcgctgggagtcccgaactgctcgagttcctgggcactcgctcccctggcgcagcagggttgacatctcgcgacagctcggtgctagatggtacagatagtcaaactgggaacgacgaagaggccttcgacttcttcgaggaacaggatcaggtcgcggaggagggaccaccagtccagtcattgaaaggggaagatgccgaagagagtttggaggaagaagaagccctggacccactgggcatcatgcggagcaaaaagccgaagaaacatcctaaggtggctgtcaaagccaaaccatcccctcgcctcacaatcttcgatgaggaagtggatcctgatgagggactgttcggccccggacggaaactgagccctcaggatccctctgaggatgtctcctccgtagacccccttaagctcttcgacgacccggacttaggaggggcgatccctctgggcgacagcctcctgctcccagccgcatgtgaatccggcggcccaactccctccctgtcccaccgggacgcctctaaggagttgttccgtgtagaagaggatttggatcagattctgaatttaggcgcggaacctaagcccaaacctcagctgaagcccaaaccccccgtggcggctaaacctgtgataccgcgcaagccagccgtcccccctaaggccggacccgctgaggctgtggcgggccagcaaaaaccacaggaacagatacaggcaatggacgaaatggatattctgcagtatattcaggaccacgacactccagcacaggctgcaccttccctgttctag

SEQ ID NO: 119501 - DNA, 654 bp, synthetic construct
  misc_feature 1..654: note = Description of Artificial Sequence: Synthetic coding sequence
  source 1..654: mol_type = other DNA
atgtccctcgtgggcggttttccacaccatcccgtggtccatcatgaagggtatccttttgccgcagccgccgccgccgctgctgcagccgcggcttccaggtgttcccacgaagaaaatccatactttcacggttggcttatcggacaccccgaaatgtcccctcccgattatagcatggccctgtcctattctccagagtatgccagtggtgccgctggtctcgaccatagtcactatgggggggtaccccccggggcaggccccccagggttgggtggaccgcgaccagtcaaacggaggggtaccgctaaccgcaaagagaggcgacggacacaatctattaacagcgcctttgccgaattgagagaatgcatccctaacgtgccggccgatacaaagctcagtaaaattaagactttgcgtttggcaacctcctatattgcctacctgatggatctgctggcgaaagacgaccagaatggtgaggccgaggcattcaaggctgagatcaagaaaaccgacgtgaaagaggaaaagcggaagaaagaattaaatgaaatcctgaaatccactgttagttcaaacgataaaaagactaagggacgtacaggatggcctcagcacgtttgggctctggagttgaaacagtag

SEQ ID NO: 119502 - DNA, 561 bp, synthetic construct
  misc_feature 1..561: note = Description of Artificial Sequence: Synthetic coding sequence
  source 1..561: mol_type = other DNA
atgtccctcgttgggggatttccacaccaccccgtggtgcatcatgagggctacccctttgctgctgccgcagccgccgcagctgcggctgccgcatcaagatgtagccatgaagagaacccctattttcacggctggcttattgggcatcccgaaatgagcccccctgactatagtatggcactgtcttacagtccagagtacgctagcggtacggccaaccgcaaagaacgcagaaggactcaatccattaattccgcttttgcagaattaagggagtgcattcctaatgtgccagccgatacaaagctcagcaaaattaagacccttcgtttagccacatcctatattgcttacctcatggacctactggccaaagatgaccagaacggggaggcagaggcatttaaagctgagatcaagaaaactgatgtgaaagaggagaagaggaaaaaagaacttaacgaaatattgaagtctaccgtgtctagtaacgataagaagaccaagggccgaacaggatggcctcaacacgtttgggcgctggaactgaaacaatag

SEQ ID NO: 119503 - DNA, 498 bp, synthetic construct
  misc_feature 1..498: note = Description of Artificial Sequence: Synthetic coding sequence
  source 1..498: mol_type = other DNA
atgtcacctccagactatagtatggccctctcatacagcccagagtacgcaagcggagcggcgggcctggatcacagtcattatggcggcgttccacccggagcagggccccccggactcggcggacccaggcccgtcaagaggcgaggcaccgccaaccgcaaagaacggcggagaacacagtccattaattccgctttcgccgagctgagggagtgtataccaaacgtgcccgccgacactaagttgtctaaaatcaagactctgaggttagcaactagttatatcgcttatctcatggatctgcttgcaaaagatgatcagaatggcgaggcagaggctttcaaggcagaaattaagaaaaccgacgtgaaagaagagaagcggaagaaagaacttaacgagatcttgaagtcgactgtttcatctaatgataaaaagaccaaggggcgtaccggctggccccagcatgtttgggccttagagctgaagcagtag

SEQ ID NO: 119504 - DNA, 2577 bp, synthetic construct
  misc_feature 1..2577: note = Description of Artificial Sequence: Synthetic coding sequence
  source 1..2577: mol_type = other DNA
atgtcagttgtgggcctggacgtcggcagtcagtcctgttatatcgcagtcgcacgcgccggggggatagagacaattgcaaacgaattctctgacagatgcacaccgtctgtgatctctttcggaagtaaaaaccggaccattggtgtagcagccaaaaaccagcaaatcacccatgctaataatacggtgtcaaacttcaagcgtttccatggtagagctttcaacgatccctttattcagaaggagaaggaaaacctctcttacgacctggtgcccctcaagaatggaggagtcggaataaaagtgatgtacatgggggaagagcacctgttcagcgtggaacagattacggctatgcttctgactaagttaaaagaaactgcagagaactctctcaagaagcctgtcacagattgcgtgataagtgtgcccagttttttcacggatgccgaaaggcggagtgtgctggacgccgcacagatagttggcctgaactgtttgaggctgatgaacgatatgaccgcagtggctctgaactatgggatctacaagcaggatctcccctctctggatgagaaaccccgaattgtagtctttgtggatatggggcatagtgccttccaggtgtccgcttgcgccttcaacaaagggaaactaaaggtacttggtacagctttcgatcccttccttggcggtaagaatttcgacgagaagctcgtggagcacttctgcgccgagtttaaaaccaaatataagctggacgcgaagtcaaaaatacgagcccttcttcggctttatcaggaatgtgagaagcttaaaaaactgatgtctagtaactctacagacttaccgctcaacattgaatgtttcatgaacgataaggacgtgagtgggaagatgaaccgctcacagttcgaggagctgtgtgctgaactcctgcagaaaatcgaagtgccactgtactcactgttagagcaaacccacctcaaagtcgaggatgtgtccgctgtggagattgtgggcggagccactaggatccctgcagtcaaagagcgaatagcaaagttttttggcaaggatatctcgacgacgctgaacgctgacgaagcagttgcacgaggatgtgcgttgcaatgtgccatactgtcacctgcttttaaagttagggagtttagtgtcacggatgccgtaccttttcctataagtttgatctggaaccacgacagcgaagacacagaaggagtgcacgaggttttctccagaaaccacgctgcgcccttctcaaaggttctgactttcttaagacgggggccattcgagctggaagccttttactctgatcctcagggggtgccgtatccggaggcaaagatcggcagattcgtcgtccaaaacgtgagcgcccagaaggacggcgagaagtctagagtgaaggtgaaggtgcgagtgaacacccacgggatctttaccatttccaccgcttccatggtggagaaagttcctaccgaggagaacgagatgtcttcagaggctgatatggaatgtctcaaccagcgccctcctgagaatccagacacggataaaaatgtccagcaggacaattcggaagcaggcacccagccccaggtgcagaccgatgctcaacagacgagtcaaagcccccccagtccagaattgaccagcgaggaaaacaagatccccgacgcggataaagccaatgagaaaaaagtggatcagccacctgaggccaaaaaacccaagatcaaggttgttaatgttgagctacctattgaagcaaacctggtttggcagttgggcaaggatttactgaatatgtacattgagacggaggggaagatgataatgcaggacaaattggaaaaggagaggaatgatgcaaaaaatgccgtcgaggagtacgtgtatgaatttcgagacaagctctgtggaccttatgagaaatttatttgtgagcaagaccatcagaactttctgaggctgctcaccgagacggaggactggctgtacgaggaaggggaagaccaggcaaaacaagcctacgtggacaaactggaagaacttatgaaaatcggaacacccgtcaaggtacgcttccaggaggcagaagagcgccctaaaatgttcgaagagctgggacagagactgcaacactacgcgaaaatcgccgcggactttcggaataaggacgagaagtataatcacatcgatgagagcgagatgaagaaggtggaaaagtccgtgaacgaagttatggaatggatgaacaatgtgatgaacgcccaggctaaaaaatccctggaccaggaccccgtcgtgagggcacaggaaatcaagacaaaaatcaaggagctgaataacacttgtgagccggttgttactcagccaaagccaaagatcgaaagtcccaagctagagcggaccccaaacggacctaacatcgataagaaggaagaagacctcgaggacaagaacaacttcggcgcggagccgccgcaccagaatggcgagtgctacccgaacgagaaaaactctgtcaacatggatcttgattag

SEQ ID NO: 119505 - DNA, 414 bp, synthetic construct
  misc_feature 1..414: note = Description of Artificial Sequence: Synthetic coding sequence
  source 1..414: mol_type = other DNA
atgttcgaagagttgggacagagactgcagcattacgctaaaatcgcagctgacttcagaaataaggacgagaagtacaatcatatagacgaatctgagatgaaaaaggtcgaaaaatctgtgaatgaggtcatggagtggatgaataatgtaatgaatgcccaagctaaaaagtctctagaccaggatccagtagtcagggcacaggagattaaaacgaagattaaagaactgaataatacttgtgagcctgtggtgacccagcctaagccaaaaattgagagcccaaaattggaacgaacaccaaacgggccaaatatagataaaaaagaagaagatctcgaagataaaaataatttcggcgcggagcccccacaccagaacgacagctgcggaattgtgaactcttactag

SEQ ID NO: 119506 - DNA, 2034 bp, synthetic construct
  misc_feature 1..2034: note = Description of Artificial Sequence: Synthetic coding sequence
  source 1..2034: mol_type = other DNA
atgtacatgggggaggagcacctgttttcggtcgagcagataactgccatgctcctgacaaagctgaaggaaaccgccgagaactctctgaagaagccggtaaccgattgcgtgatctccgttctgggaactgcctttgacccttttctgggaggtaaaaacttcgatgagaaactagtggaacatttttgtgctgaatttaaaactaagtataagctcgacgccaagtccaagatcagagctctccttaggctctaccaggagtgtgagaagctaaagaagctaatgtcgagcaacagtactgacctgccgcttaacattgaatgtttcatgaatgacaaggacgtgtccgggaagatgaacaggtcgcaatttgaggaactgtgcgccgaactgctccagaaaattgaagttcctctgtactccctgctggaacagacccacctgaaggtggaggacgtgagcgccgtcgagatcgtgggaggcgcaactagaattcccgcagtcaaagagcgtattgccaagttctttggtaaagacatatcaaccactttgaacgccgacgaggcggtggcacgggggtgtgcattgcagtgcgccatcctcagtccagcctttaaggttcgggagtttagtgtgactgatgctgttcccttccccatctctctgatctggaaccacgattccgaggacacagagggggtgcatgaggtcttcagtagaaaccatgccgcccccttcagtaaagtgctcacttttttaaggcgggggcccttcgagctcgaggccttctattctgacccgcagggagtcccatatccagaagctaagatcggacgctttgtggttcagaacgtttcagcccagaaggatggcgaaaaatctagggtgaaggtcaaggtccgcgttaacacccacgggattttcacaatcagtacagcgagcatggtggaaaaggtccccacagaagagaatgaaatgtcctccgaagccgacatggagtgtctgaatcagaggccccccgagaatcctgacacagacaaaaatgttcaacaggataacagcgaggctggtacccagccacaggtgcagacggatgcccaacagaccagtcaatcacctccatctcccgagctgacatccgaagaaaacaagattcctgacgcagataaagcaaacgagaagaaggtcgatcaaccccccgaagccaagaaacctaaaataaaggtcgttaacgtggaacttcctatcgaggcaaaccttgtgtggcagctcgggaaagacctccttaatatgtatatcgaaactgagggaaaaatgattatgcaggacaagttagaaaaagaaagaaacgacgctaagaacgcggtggaagaatacgtgtatgaattccgggacaagctctgtggaccctatgagaaatttatctgtgaacaggaccaccagaactttttgcgtctgcttacagagaccgaagactggctgtatgaggagggtgaagatcaggcgaaacaggcctacgtggacaagctcgaggaactcatgaaaatcggcactccagtgaaagtgcggttccaggaagctgaggagaggccaaagatgtttgaagagctcggacagagactgcagcattacgccaaaatcgcggctgattttcgcaataaggatgaaaaatataaccacattgatgaatcagagatgaagaaagtggaaaagagtgttaatgaggtgatggaatggatgaataacgtgatgaacgcccaggcaaagaaatctctggaccaggacccagtggtaagagctcaagagatcaagactaagataaaggagctgaataacacttgcgaaccggtggtgacccagcctaagccaaaaatcgagtcacccaagcttgaaagaacccccaatggccctaacattgacaaaaaagaggaggacctggaagataaaaataactttggcgccgagccaccacatcagaacggtgaatgctacccgaacgaaaaaaatagcgttaacatggacttggattag

SEQ ID NO: 119507 - DNA, 1920 bp, synthetic construct
  misc_feature 1..1920: note = Description of Artificial Sequence: Synthetic coding sequence
  source 1..1920: mol_type = other DNA
atggcccgagagcgcccatgtcggtgccacggtaacgggggtaggtctccaggcacaggatgtcctctgggtcgaatcttccctgagggcagtaggcgtagaaagaggaaatggcatgtggagggccctgtcgaagcgccccggaatgggcaaactccccgggcgggtgcggagaggggacagggccgcaagcggagacaggagaagcaggccggcggaatagaaacgattgccaatgagttttcggatagatgtacccccagtgtgattagtttcggaagtaagaatcgtaccatcggagtcgctgcaaagaaccagcagattacacatgcaaataacacagtgagtaatttcaaacgatttcatggccgcgcatttaacgacccctttattcagaaggaaaaagagaacctgtcatatgacttggtcccccttaagaacggcggcgtcggaattaaggtgatgtatatgggggaggagcacctctttagcgtcgaacaaatcacagccatgctcctcacaaaactgaaggagactgctgaaaactctctgaaaaagcccgttactgattgtgtgatctctgttccttcatttttcaccgacgcagaaagacgcagcgtcctggatgccgcccaaatcgtaggtctgaattgtctgcgtctgatgaacgatatgacggctgtggccctcaattacgggatttataaacaggacttaccctctctcgatgagaagcctcgcatcgtcgtattcgtcgacatgggtcactctgcgttccaggtgtcggcctgtgctttcaataaaggaaagctgaaagtgctcgggacagcttttgatcctttcctgggcggcaaaaattttgatgaaaaactcgttgaacacttctgcgccgaattcaagaccaaatataagctggacgcaaaaagtaagatccgcgccttactgaggctgtaccaggaatgcgaaaagcttaagaagctgatgagcagtaactcgacggacctgcccctcaatatcgaatgtttcatgaacgacaaagatgtctccggaaaaatgaaccggtctcagttcgaggagctatgtgcagagctccttcagaaaatcgaagtgccactttattcattgctcgaacaaacccatctcaaggtcgaggacgtcagtgccgtcgagatcgttggtggcgctacccgtattcctgccgtgaaggagcgcatcgcaaagttcttcggcaaggacattagtaccaccttgaatgctgacgaggcagtcgcccgtggctgtgccctacagtgcgctatcctgagcccagcattcaaagtccgggaattttctgtgacggacgctgtgccattcccgatctctctaatctggaaccacgatagcgaagatactgagggggtccatgaggtcttcagcagaaaccatgctgcaccattctccaaggtgctgacctttcttaggagaggcccctttgagctggaggctttctattccgatcctcagggggttccataccctgaagccaagattggtaggtttgtcgtgcagaacgtttccgctcagaaggacggcgagaaaagtcgcgtaaaggttaaagtgagagtcaacacacatgggatcttcacaatctctacggcttctatggtcgagaaggtgccgacagaggaaaatgaaatgtcttcagaggccgatatggagtgcctgaatcaacgtccccccgaaaatcccgatacagataaaaacgtgcagcaggataacagcgaggcaggcacacagccccaggttcagaccgacgcccagcagacttctcagtcccctcctagccccgaactgacgtctgaggagaacaagattcctgacgcagataaacagatgaagaaaaagctcacatccctgcaaaagctgaaaagtccaaaatag

SEQ ID NO: 119508 - DNA, 2583 bp, synthetic construct
  misc_feature 1..2583: note = Description of Artificial Sequence: Synthetic coding sequence
  source 1..2583: mol_type = other DNA
atggccacggctgccgtccttcgaggccctgccgcacactgggttgagagctttcagaaggctcgggaggaaggttccggtagcggcacttggagagggcggtggcgaaggagatccgtgatttcttttggaagtaagaacagaaccatcggggttgccgcaaaaaatcagcagatcacccatgcaaacaacactgtctcaaattttaagcggtttcatgggcgcgccttcaatgatccctttattcagaaggagaaggagaatctgtcctatgatttggtgcctctcaagaatgggggggtcggtattaaagttatgtatatgggagaggagcacctgttctctgtggagcagattacggcaatgctgttaacaaagcttaaagagaccgctgagaactctctaaagaaacccgtgacggactgcgtaatcagcgtcccatccttcttcactgacgctgagcgacgatccgtcctggacgccgctcagatcgttggcctcaactgtcttaggctgatgaatgatatgacagcggttgccctgaactatggaatctacaagcaagacctgcccagccttgatgaaaaacctcgcattgtggtgttcgtggacatgggtcacagtgccttccaggtatccgcttgcgcattcaacaagggcaagctcaaagtcctcgggacagctttcgatccgtttctgggggggaagaattttgacgagaagctcgttgagcatttttgcgccgaatttaagacaaaatataaattggacgctaaatcgaagatcagggccctgctccggctataccaggagtgcgaaaaactgaaaaaactgatgtcaagcaactcgactgacttacccttgaatatcgaatgtttcatgaatgataaagatgtgagtgggaagatgaatagaagccaattcgaggagctttgtgccgagctgttgcaaaaaatcgaggtccccctgtactcactcctggagcagacccacctgaaggtcgaagacgtcagcgcagtggagatcgtgggcggggctacccgaattcccgctgtgaaagagcgcatagcaaagttctttggcaaggatatttcaactaccctaaatgccgacgaggcagtcgcccggggatgcgccctccagtgcgcgatcctgagtccagcttttaaagtgagggaattctctgtaaccgatgcagtgccctttcccatctcccttatatggaaccatgattccgaggacaccgaaggagttcatgaagtgttttcaaggaaccacgccgcccccttttctaaggtcctgaccttcctgcgccgcggacctttcgaactggaggctttttactctgatccccagggagtgccataccccgaagcaaagattggcaggttcgtcgttcagaacgtatccgcccaaaaagacggcgaaaagagcagagtaaaggttaaagtccgggtcaacacacatgggatttttacaatctcaactgcttcaatggtggagaaagtccctacagaagaaaatgagatgtcaagtgaggccgacatggagtgtctgaaccagcgccctcctgaaaatcctgatactgacaagaacgttcagcaagacaacagcgaagccggcacacagccacaagttcaaacggatgctcagcagacaagtcaatcaccgccctctcccgaactcaccagcgaggaaaacaagataccagatgccgacaaggctaacgagaagaaggtcgaccagcctcccgaggcaaaaaaacccaagattaaagtagtaaatgtagaacttccaattgaagcaaacctggtgtggcagctggggaaggatctgctgaacatgtatatagagacagaggggaaaatgatcatgcaggacaagttggagaaggagagaaacgatgctaaaaatgccgtggaggagtacgtgtacgaattccgagacaaactttgtggaccttatgaaaaatttatctgcgaacaggatcaccagaacttcctgcgtttgctaaccgagaccgaagactggctttatgaagagggggaggaccaggctaaacaggcgtacgtggataagctagaagagctcatgaagataggcaccccagtcaaggtgagatttcaggaggctgaagaacggcccaaaatgttcgaggaactgggtcagcggctgcagcactacgctaagatcgctgcagatttcaggaataaagacgagaaatataaccatattgatgaatccgagatgaagaaggtggaaaagtctgttaatgaggtgatggaatggatgaacaatgtgatgaatgctcaagccaagaagagcctggatcaggaccctgttgttagagcccaagagataaagaccaaaatcaaagagctaaacaacacctgtgagccagtggtgacacaaccaaagcccaaaatagagagtcctaagttggagcgaacacctaacggcccgaacattgacaagaaagaggaggatttggaggataaaaataattttggggccgagccccctcaccagaacggcgaatgctacccaaatgagaagaacagcgtgaacatggacctggactag

SEQ ID NO: 119509 - DNA, 582 bp, synthetic construct
  misc_feature 1..582: note = Description of Artificial Sequence: Synthetic coding sequence
  source 1..582: mol_type = other DNA
atggattctacactagcagtgcagcaatacatccagcaaaatataagggcagattgtagtaatattgataaaattcttgaaccaccagagggccaggacgagggggtgtggaagtacgagcatctgcgccaattctgcttggagctgaacggtctcgcagtgaagctgcagagtgagtgtcatccagacacgtgtacccagatgaccgcaaccgagcaatggatttttctgtgcgcagctcacaaaacccccaaggagtgcccggccatcgattacacgcgacatactcttgacggtgcagcttgcctgttaaattcaaacaaatactttcccagccgagtgtccatcaaagagtcaagcgtggcgaaattaggctcagtgtgcaggcggatatacaggatcttttcccacgcatacttccaccatcgccagattttcgacgaatatgagaatgaaacattcctgtgtcatcgattcacaaagttcgtcatgaagtataatctcatgtccaaggacaatctgattgtccccattttggaggaggaggttcaaaacagcgtcagtggggaatctgaagcgtag

SEQ ID NO: 119510 - DNA, 306 bp, synthetic construct
  misc_feature 1..306: note = Description of Artificial Sequence: Synthetic coding sequence
  source 1..306: mol_type = other DNA
atggctggacaagccttcagaaaatttctcccactgtttgacagagttctcgtagagcggtcggccgccgagactgtgacaaagggagggatcatgctccccgagaaatcccagggcaaggtgctgcaggccaccgtggtagcggtggggtccggctctaagggcaaaggcggcgaaatacaacctgttagtgtgaaggtgggcgacaaagtgcttctgccggagtacgggggcaccaaggtagttctcgatgacaaagtctgtaaactcaacaattctaaaaaaaaatccgatatctgtaactag

SEQ ID NO: 119511 - DNA, 144 bp, synthetic construct
  misc_feature 1..144: note = Description of Artificial Sequence: Synthetic coding sequence
  source 1..144: mol_type = other DNA
atggggggagagatccagcccgttagtgttaaggtgggagacaaggtgctgctgcccgagtacggaggcaccaaagtggtgctggatgataaggactactttctcttccgagatggggacattctcggaaagtatgtcgattag

SEQ ID NO: 119512 - DNA, 591 bp, synthetic construct
  misc_feature 1..591: note = Description of Artificial Sequence: Synthetic coding sequence
  source 1..591: mol_type = other DNA
atggctgacggacagatgcctttctcctgccactatccatcaagactgcgtcgggatcccttccgggacagtccactgagtagtcgactattggacgatggctttggtatggatccattcccagatgatcttaccgcatcatggccagactgggccctgccaaggctgagtagtgcatggccaggaaccctgagaagtggaatggttcctagagggcccacggccaccgcacgcttcggggtgccagccgaagggagaactcccccaccatttcccggggagccttggaaagtgtgcgtcaacgtgcatagctttaaaccagaggagcttatggtcaaaacaaaagacgggtatgtggaagttagcggcaaacatgaagagaaacagcaggagggcgggatcgtgtccaaaaatttcacaaagaaaatccaacttcctgctgaggtggaccccgtgactgtgtttgccagcttatctcccgaaggcttgctcattatcgaagcgccccaggtacccccttactccacttttggagagagcagtttcaacaatgaacttcctcaggactcccaggaggttacgtgcacatag

SEQ ID NO: 119513 - DNA, 453 bp, synthetic construct
  misc_feature 1..453: note = Description of Artificial Sequence: Synthetic coding sequence
  source 1..453: mol_type = other DNA
atggccaagatcatcctgaggcatcttattgagatacccgtgcgataccaggaggagttcgaagcccgtgggttggaggattgccggctggatcatgccctgtacgctttgcccggacccaccattgtagaccttcggaagacgagggcagcccagtcccctcctgtggatagcgccgcagagacccctcctcgggaaggtaagagtcactttcagatcctcctggacgtggtgcagtttttgcccgaggacatcatcatacagacgtttgaagggtggttgctgattaaggcacagcacggaactcgaatggacgagcacggatttattagcaggtccttcacaaggcagtataagctccccgatggagtggagatcaaggacctgagcgcagtgctgtgtcatgatggaatactggttgtggaggttaaggaccccgtgggaaccaagtag

SEQ ID NO: 119514 - DNA, 513 bp, synthetic construct
  misc_feature 1..513: note = Description of Artificial Sequence: Synthetic coding sequence
  source 1..513: mol_type = other DNA
atgtcacatcgcacaagtagtacttttcgcgccgagcgtagcttccactcatcatcttcgtcatcgtcatcttcgacgtcctcgtctgctagtcgagccctgccggctcaggatccaccaatggaaaaagccctgtctatgttctcggacgactttggaagcttcatgcggccccactcagaacctctggcattcccagccaggccaggaggcgccggcaacattaagacactgggggacgcttacgaatttgccgttgatgtccgcgacttctcacctgaggacatcatagtgaccacgtccaacaatcacattgaagtgcgcgcagaaaagctggccgccgacggcacagtgatgaacacctttgcgcataaatgccagctgccggaagatgttgatcctacaagcgttacgtcagccctacgcgaggacgggagtctcactattcgagctcgcagacacccacataccgaacacgtacagcagaccttcagaaccgaaattaaaatctag

SEQ ID NO: 119515 - DNA, 792 bp, synthetic construct
  misc_feature 1..792: note = Description of Artificial Sequence: Synthetic coding sequence
  source 1..792: mol_type = other DNA
atgtccggttgtgaactttccccccttggactgcgagtcggactgagcgccggtcccgcccatgggcggcggttcccggcgccgagtggcccatggcgaggcctcaacctggcatcccggcaaggtgctggcccaaagccacgcgactctcggccttacaaggcagccgctgttggggcgtggcacgccagacccgaggcatgtgcacacacactgtcctgtcccgcgcttgcccgtttggggagggctcggcgtaggccatggatgtcccataggaccagtagtacttttcgggcagaaagaagtttccattccagctccagttcttcatcttcctcaacatcaagttcagcctctagagccctgcctgcccaagaccctcctatggaaaaggccctttccatgttcagtgacgactttggaagctttatgagaccccacagcgaaccattggcgtttcccgccgcgcatccaacagcgagacccggcggtgccggcaatatcaagaccctgggggatgcttacgaattcgcagtggacgtaagagacttctccccagaggatatcatcgtgactacatccaacaaccacatcgaggtacgggccgaaaagctcgcggccgacggcactgttatgaacacgttcgcacataaatgccagctgccggaggacgtggaccccacaagtgttacaagtgctctgcgggaagatggttcccttaccatccgagctaggcgacatccgcatactgaacatgtccagcagacattccgcacggagatcaaaatttag

SEQ ID NO: 119516 - DNA, 528 bp, synthetic construct
  misc_feature 1..528: note = Description of Artificial Sequence: Synthetic coding sequence
  source 1..528: mol_type = other DNA
atgagtcatcgcacatctagtacattcagggccgagcgttcctttcactccagttcttccagctccagctcgagcacaagtagcagcgccagccgcgccctgccagcccaggacccccccatggagaaggcactgtctatgtttagtgacgatttcggatcttttatgcgtccccattcggagccactggcttttccagcggctcaccctacagcccgccctggaggcgcaggaaatatcaagacactgggcgacgcctatgagttcgccgtggacgttcgcgactttagcccagaagacattattgtgacgaccagtaataatcatatcgaggtcagggcagaaaagctggccgcagacggcactgtgatgaatacatttgcacataagtgtcagttacctgaagatgtggaccccacgagtgtcacaagcgccttacgcgaagacggcagcctcactatcagagctaggcggcaccctcacaccgagcacgtgcagcagacctttcgtactgagatcaagatctag

SEQ ID NO: 119517 - DNA, 207 bp, synthetic construct
  misc_feature 1..207: note = Description of Artificial Sequence: Synthetic coding sequence
  source 1..207: mol_type = other DNA
atgtcccaccgaaccagttctacgtttagagcggaacggtcatttcactcatcatcttctagctcctcttcgtctacctcgagctccgcctcgagagccttgcccgctcaggaccctcctatggaaaaggcactgtctatgtttagtgacgatttcggtagctttatgcggccacattcagagcctctagcattcccaggcaagtag

SEQ ID NO: 119518 - DNA, 1722 bp, synthetic construct
  misc_feature 1..1722: note = Description of Artificial Sequence: Synthetic coding sequence
  source 1..1722: mol_type = other DNA
atgcttcggctgcctactgtatttagacaaatgcgtcctgtgtcccgcgtgctggccccgcatctgactcgcgcatatgctaaggacgtgaaattcggtgcagacgcccgcgctctaatgctgcaaggcgtggatctgcttgctgacgcagttgccgttacgatgggaccaaaggggcgcactgttatcattgaacagtcttgggggagtccaaaggtcactaaggatggggtgacagtggccaagagtatagacctgaaggataaatataagaacattggcgctaaattagtccaggatgtggccaataacaccaacgaagaggctggcgatggcaccaccaccgctaccgttttagccaggtcgatcgctaaggaaggcttcgagaaaatctcaaaaggcgccaaccctgtggagatccgcaggggcgttatgctagccgtggacgctgtaatagccgagctcaagaagcaatccaaacccgttacaacacccgaagagattgcccaggtagccactataagcgcaaatggagacaaagagatcggcaatattatttcagacgccatgaagaaagttgggcgcaagggggtcataaccgtcaaagacggaaagaccctgaacgacgaactggagattatcgagggcatgaagtttgatcggggctacatctccccgtactttattaacactagcaaaggccagaagtgtgagttccaggacgcctacgtgcttcttagcgagaagaagatttcctccatccagtctattgttcctgcactagaaattgcaaacgcgcatcgaaaaccattggtcataatcgcggaggatgttgatggggaggccttgagcactctggtgcttaatagactaaaagtcgggctccaggtcgtggccgtgaaggccccgggctttggcgacaatcggaagaatcagctgaaagacatggccatcgcaaccgggggagccgtatttggggaggaaggactaactctgaacctagaagacgtccagccgcacgatctgggcaaggtcggcgaggtgatcgtcaccaaggacgacgccatgctgttgaaaggcaaaggagataaagctcagatcgagaaaagaattcaagagattattgagcaactggacgtgacaacaagtgaatacgagaaggaaaagttgaatgagagattagccaaactatccgatggagtagccgtgctcaaggtaggaggtacgtcagatgttgaggtcaatgagaagaaggaccgggtcaccgacgctttgaacgcaaccagagcagcagtcgaagaaggaattgttctgggcggcggatgcgcccttttacgttgtatccccgccttggattccctgacaccagcaaacgaggatcaaaaaatcgggatcgagattatcaaacggactctgaaaattcccgccatgacaattgccaagaatgctggcgtggagggaagcctgatcgtcgaaaaaattatgcaatccagctccgaggtcggctacgacgctatggccggggattttgttaacatggtggaaaaaggcatcattgatcctacaaaggttgtccgaactgctctcctggatgcagcgggggtggcatcgctgctgaccaccgcagaggtggtagtcactgaaatcccaaaggaggaaaaagacccgggcatgggtgctatgggagggatgggcggtgggatgggtggtggcatgttctag

SEQ ID NO: 119519 - DNA, 1722 bp, synthetic construct
  misc_feature 1..1722: note = Description of Artificial Sequence: Synthetic coding sequence
  source 1..1722: mol_type = other DNA
atgctgcgcctccctacggtgttccggcagatgagacctgtctcacgagttttggcaccgcatctgactagagcctacgccaaagatgtgaaatttggagcagatgccagagcccttatgcttcaaggagtagatctgctcgccgacgctgtcgccgtaaccatgggacccaagggccggacagtaatcatcgagcagagctggggaagccccaaagttaccaaggatggtgtgaccgttgcaaagagcatcgaccttaaggacaagtacaaaaacataggcgctaaattagttcaggacgtcgccaataataccaacgaagaagccggggacggcacgactacagccactgtgttagctaggtccattgcaaaagaagggtttgagaagatctccaaaggagctaatcctgttgaaatccgaaggggggtgatgttggcagttgacgctgttattgccgagttaaagaagcagagcaaacctgtgacaacacctgaagaaattgctcaagtcgctactatcagcgctaatggagataaagagataggcaacatcatctcagacgctatgaaaaaagttgggagaaagggggtgattactgtgaaagacggcaaaaccctcaatgatgagctggagattatcgaagggatgaagtttgatcgggggtatatctctccatacttcatcaatacttccaagggccagaagtgcgaatttcaagacgcctacgtcctgctgtccgagaagaagataagcagcattcagtctattgtacctgccttggagattgctaatgctcataggaagcctctagttattatcgcagaagacgtcgacggagaagccctctcaactctggtgctgaataggctcaaggtcggactgcaggtggtcgcagtaaaggctcccggattcggtgataataggaagaatcaactgaaagatatggcaatcgccactggaggagccgtttttggggaagagggccttactctgaaccttgaggacgtgcagcctcacgatcttggtaaggtaggcgaagttatagttacaaaggacgacgcgatgctactgaaggggaaaggagataaggcgcagatcgaaaagaggatccaagagattatagagcagttggatgtgacaacctcggaatacgaaaaggagaaactaaatgaacgacttgcaaagctttcagatggagtcgccgtgctcaaagtgggtggaacgagcgatgtggaggtcaacgagaaaaaggatcgtgtgacagatgccttgaacgcgaccagggccgccgtggaggagggaatagtgttaggtggtggatgtgccttgctcaggtgcattcccgctttagattcactgacacctgccaatgaggatcagaagatcggaatagagatcatcaaaaggactctcaagatccctgcgatgacaatagcaaaaaacgcgggagtcgaggggtctctaatcgttgaaaagataatgcagtcttcgtccgaggtgggatacgatgctatggctggcgatttcgtgaatatggtcgagaaagggataatcgacccaacaaaagtcgtgcgtacagctctactggatgcagccggtgtggcctcactgctaactacagccgaagtggtggttactgaaatacccaaggaggaaaaggatcccgggatgggggctatgggtggcatgggcggaggcatgggcggaggaatgttctag

SEQ ID NO: 119520 - DNA, 177 bp, synthetic construct
  misc_feature 1..177: note = Description of Artificial Sequence: Synthetic coding sequence
  source 1..177: mol_type = other DNA
atgctgcgcctgcccactgtgttccgccagatgagaccagtctctcgcgtgttggctccacatctgacgcgggcttatgcgaaggatgtcaagttcggtgcagatgctagagccctgatgctgcagggcgttgacctgttagccgatgcagtcgcggttacgatgggccctaaatag

SEQ ID NO: 119521 - DNA, 285 bp, synthetic construct
  misc_feature 1..285: note = Description of Artificial Sequence: Synthetic coding sequence
  source 1..285: mol_type = other DNA
atgcttcggctgccaactgtgtttcgtcagatgcggcctgtgagccgggtgctggccccacatcttactagggcctatgctaaggacgtcaagtttggtgccgatgccagggcgcttatgctccaaggggtagacctgcttgccgatgcagtggccgtcacaatgggccctaaaggtagaaccgtgatcattgagcaatcctggggatcacctaaggtgacaaaggacggcgtcactgtagccaagtctattgatttgaaggataagtacaagaacatcggctag

SEQ ID NO: 119522 - DNA, 705 bp, synthetic construct
  misc_feature 1..705: note = Description of Artificial Sequence: Synthetic coding sequence
  source 1..705: mol_type = other DNA
atgcttcggctgcctactgtcttccgccagatgcggccagtctcgcgggtcttagcccctcacctcactcgcgcctacgcaaaggacgtaaagtttggcgcagacgcccgggccctgatgctgcagggtgtcgacctgctggcggatgcggtcgcggttactatggggccaaaagggaggaccgtgatcatcgaacagagttgggggtccccgaaagtgacaaaggacggagtgaccgtggctaagagcatagaccttaaagacaaatataagaatatcggggcaaagctggtgcaggatgtagccaacaacacaaatgaagaggccggggatggcactacaactgcaactgtcctggcaagaagtattgccaaagagggattcgagaaaatcagcaaaggcgcaaaccccgtagagattaggcgaggagtaatgctggccgttgatgccgttatcgccgagctgaagaagcagtcaaagcctgtgacaacacctgaggaaatcgcgcaggtggccaccatttcggccaacggagataaggaaattggcaacattatctctgacgcaatgaagaaggtgggacgaaagggggtgattaccgatggcaagacgcttaatgatgaactggagattatcgaagggatgaaattcgatcgtggatatatttccccttacttcatcaacacatccaagggaaagaactag

SEQ ID NO: 119523 - DNA, 252 bp, synthetic construct
  misc_feature 1..252: note = Description of Artificial Sequence: Synthetic coding sequence
  source 1..252: mol_type = other DNA
atgctgcgtctgcccacggtcttccgtcagatgcggccagtgtcgagagtcctggctccgcacctcaccagagcttacgccaaagacgtcaagtttggcgccgacgcacgagcccttatgcttcagggagttgatctgttggctgacgccgtggctgttactatgggacccaaaggaaggaccgtgataatagaacagagctggggatcacccaaagtcacaaaagacggcgtgaccgtcgctaagtcttag

SEQ ID NO: 119524 - DNA, 666 bp, synthetic construct
  misc_feature 1..666: note = Description of Artificial Sequence: Synthetic coding sequence
  source 1..666: mol_type = other DNA
atgctgaggctgcccactgtcttcagacaaatgaggcctgtgtctcgagtcctggcaccacacctgactagagcctatgcgaaagacgtgaagttcggcgccgacgctagagcgttgatgttgcagggcgtggatctgctggctgatgcagtggccgtgaccatggggccgaaagggcgcactgtgatcattgagcagagttggggaagcccgaaggtgactaaggatggggttacagtggcaaagagtattgacctcaaggataagtacaagaacatcggagcgaagttggtacaagacgtggccaacaataccaacgaggaagccggtgacgggactaccaccgccacggtgctcgctaggagcatagccaaggagggcttcgagaaaatcagcaagggggccaaccctgtggaaatacgaaggggtgttatgctggctgtcgacgctgtgattgccgagttgaagaagcagtccaagcctgtgacgacccctgaggaaattgcccaggtggccacaattagcgccaatggagataaggagatcggcaatatcatctcagacgccatgaaaaaggttggccggaaaggcgtaattacggtcaaagatggtaagactctgaatgacgagctggagatcatcgaggggatgaaatttgataggtag

SEQ ID NO: 119525 - DNA, 738 bp, synthetic construct
  misc_feature 1..738: note = Description of Artificial Sequence: Synthetic coding sequence
  source 1..738: mol_type = other DNA
atgctcgctgttgatgctgtgatagctgaattgaagaaacagtccaagcccgtaactacaccggaagagatcgctcaagtagccacgatctccgctaatggcgacaaagagatcggcaatataatatcagacgcaatgaagaaagttggtcggaagggcgttataacagtcaaggatggcaaaaccctgaatgatgaactggagatcattgagggcatgaaatttgatcgagggtacatttctccatactttataaacacgtcaaaaggtcagaaatgcgagtttcaagatgcctatgtgctgctgtccgaaaagaaaatcagctccatccagagcattgtgcccgctctggagattgccaacgctcaccgcaagcctcttgttatcattgccgaagatgtcgatggcgaagccctgtcaaccctcgtgttgaataggctgaaggttgggttacaagttgtcgccgttaaggcccctgggttcggcgataatcgaaagaatcaactcaaagacatggccatcgctaccggaggggcagtatttggggaagaaggcctgaccttgaatctggaggatgtgcagccccatgatctcggtaaagtgggtgaggtgatagtcaccaaggacgatgccatgcttttaaaaggcaagggggataaagcccaaatcgagaagagaatccaggaaatcattgagcagcttgacgtgaccaccagtgaatatgagaaggaaaattag

SEQ ID NO: 119526 - DNA, 477 bp, synthetic construct
  misc_feature 1..477: note = Description of Artificial Sequence: Synthetic coding sequence
  source 1..477: mol_type = other DNA
atgctgcgactgcctaccgtgtttcggcagatgcggccagtcagccgtgtgctggcccctcatctgactcgcgcatatgccaaggatgtcaaatttggcgcagacgcaagggccttgatgcttcagggagtagatcttttggcagacgctgtggccgtaactatggggcccaaaggacgtactgtgatcatcgagcagtcctggggttcccccaaagtgacaaaggacggggtgacggtggcaaaatccattgacctgaaagacaagtacaaaaatataggtgccaagctggttcaagatgtggcaaacaacaccaatgaagaggcaggggatggaactactaccgccaccgtgcttgcccggtcaatcgcgaaggaaggctttgagaaaatatctaagggagccaacccagtagagattcggagaggtcggaacgtttgttgccatcattctgttcttaacttttctgtcttatag

SEQ ID NO: 119527 - DNA, 2061 bp, synthetic construct
  misc_feature 1..2061: note = Description of Artificial Sequence: Synthetic coding sequence
  source 1..2061: mol_type = other DNA
atgctggcggtgccagagatgggtttgcagggcctgtacatcgggagcagtccggaacgatctccagtgccatctccccccggaagcccgaggacacaggagagttgcggcattgcgcccctgacgccgagccaaagccccaagccagaggtgagggccccacagcaagcgagtttttccgttgtggtggcgattgattttggcactaccagctccgggtatgcattttctttcgcgagtgatcccgaggccatacacatgatgcgaaaatgggaaggaggcgacccaggcgtggctcaccagaagacaccaacttgtctgctgctaactccagagggtgcattccatagttttggttatactgcccgcgactattatcacgacctagacccagaagaagccagggactggctgtatttcgagaagtttaagatgaagatccattccgccacggatctgacccttaagactcagctggaagctgtcaatggaaaaactatgcctgctctggaggtgttcgcacatgctctgagattcttccgggagcatgctttacaagaactgagggaacagtccccttctctccctgagaaggacacagtgcggtgggttcttaccgtgccagcaatatggaaacagcctgcaaagcagtttatgcgcgaggctgcgtacctggccggattggtctcacgcgaaaacgccgagcagctgctcatcgctttggaacctgaggccgctagtgtctattgcagaaaactgaggttacaccagctattggacctgtcggggcgtgctcccggtggagggcgtctcggagaaagacggagcatcgatagttcatttcggcaagcccgggagcagttaaggcggagtcgccacagtcgcacttttctcgtggaatctggcgtgggagaactttgggctgagatgcaggccggcgacaggtatgtggttgccgattgtggaggcggaactgtggacctgaccgtccaccagctggagcagccgcatgggacactgaaggaactatacaaagcaagcgggggtccgtacggagccgttggcgtcgaccttgccttcgaacagctgctgtgtaggatattcggtgaagatttcatagctaccttcaaaaggcagagacctgcagcgtgggttgaccttaccattgctttcgaggctagaaaaaggactgccgggccccaccgcgcaggcgcgctgaatatttccctgccctttagtttcatcgatttttacaggaaacagagaggccataatgtcgagacagccttacgaaggtcgtcagtgaatttcgtgaagtggtcatcccaggggatgttacggatgagctgcgaggctatgaatgaactgttccaacccactgtgtcgggtatcattcagcatatcgaagccctccttgccaggcccgaggtgcaaggcgttaaattactgtttttagttgggggttttgccgagagtgccgtcctgcaacacgctgtgcaggcagcattgggggccagagggcttcgggtcgtcgtgccacacgatgttggcctgaccatcttaaagggagctgtgctgttcggccaggcacccggcgttgtgagagtgcgcaggtccccgctcacatacggggttggagtgctgaaccgattcgtcccaggacgccacccacctgaaaaacttctggttagggatggcagacgatggtgtactgacgttttcgaacgattcgtggccgctgagcagagcgttgcactcggggaggaggtgcgccggagttactgcccagctagaccgggccagcgccgtgtgctaatcaacctttactgctgtgccgcagaagacgcccgttttatcaccgatcccggggtcagaaagtgcggggctctgagcttagaactggagcccgccgattgtgggcaggatactgcaggagcccctccaggaaggcgtgagatacgtgccgccatgcagtttggggacacagagattaaagtgaccgctgtggatgtgtcaacgaatcgctccgttcgggcttcaatcgatttcctttcaaactag

SEQ ID NO: 119528 - DNA, 1803 bp, synthetic construct
  misc_feature 1..1803: note = Description of Artificial Sequence: Synthetic coding sequence
  source 1..1803: mol_type = other DNA
atgatgcgcaagtgggagggcggagatcctggggtcgcacatcaaaagacgcctacctgtctgctgttgactcccgaaggagccttccactcctttgggtacacagctagggactactaccatgacttggatccggaggaggcccgggactggctctatttcgaaaaattcaaaatgaagatccatagtgcgaccgatcttacattgaagacacagctggaagccgtaaatggtaaaacaatgcctgccctcgaagtatttgcccacgctctacgcttcttccgggagcatgcactgcaggagctgagggagcagagccccagcctgccagagaaggacacagttcgctgggtgctgactgtaccagctatctggaaacaacctgcaaagcaattcatgcgggaggccgcgtatctggccggacttgtatctagggagaacgctgagcagctcctgattgccctggaaccagaggcggcttcggtatactgtcgcaagctgcgcttacatcagctgcttgatctatccggaagggccccaggcggcggacgcctgggagaacgaagaagcatagattcatcattccggcaagcccgtgaacagctgcgccggtcaaggcacagcagaacttttctggtggaatccggtgtcggtgaattatgggctgagatgcaggccggagatagatatgtcgtggcagactgcggtggcggcactgtcgacctgacagttcatcagctcgagcagccgcatggaactctaaaagagttatataaggcaagcggcggcccatatggcgcagtgggcgtggacctcgctttcgagcagctgctgtgtagaatctttggcgaggatttcatcgcaacgttcaagagacaaaggcctgcagcttgggtggaccttactattgctttcgaggcacgtaaacgcacagccgggccgcatagagccggtgccctcaacatcagtcttccttttagtttcatcgacttctacagaaagcagagggggcacaacgtggagaccgcactgcggaggagctccgtaaatttcgtcaagtggtccagccaagggatgttaagaatgagttgcgaagccatgaatgagctattccaaccaaccgtctccggtatcatccagcacatcgaggctctattggctaggcctgaggtccagggggtgaagctgctgttcctggtgggggggttcgccgagtctgcagtgttacagcacgccgtccaggccgcgctcggtgcccggggtcttcgagtcgtggtgccccacgacgtggggttgacaatcctgaaaggagctgtgctattcgggcaagcacctggcgtggtacgcgtgaggcgatccccactcacttatggtgtgggtgttctgaatcgctttgtgcctggccggcatccaccagagaagctgctggtacgggacgggcgcaggtggtgtacagatgtattcgagcgctttgtggctgccgaacagtccgtggctctcggggaagaggtgagaagatcttactgccctgctagacctggacagagacgcgtgctgatcaacttgtattgttgtgctgctgaagatgctcggtttatcactgatcctggcgtgcgtaaatgcggagctctgagtctggagttagagccggctgattgtggccaggacaccgccggtgctccgccggggagacgtgaaatacgagccgcaatgcagtttggcgatactgagattaaagtcacagccgtggatgtcagcactaacagatccgttcgcgctagcattgacttcctgtccaactag

SEQ ID NO: 119529 - DNA, 1563 bp, synthetic construct
  misc_feature 1..1563: note = Description of Artificial Sequence: Synthetic coding sequence
  source 1..1563: mol_type = other DNA
atgcctgcgttggaggtcttcgcccacgctctcaggtttttcagagagcacgccctgcaggagttacgggaacagagcccaagtctacccgaaaaggacacggttaggtgggtgctgacagtccctgctatttggaaacaacccgccaagcagttcatgagagaagccgcttacctagccgggcttgtgtcacgggagaacgccgagcagctgctcatcgcactggaacccgaggccgcatctgtttactgcaggaagcttagattacatcagctgctggacctttcaggtcgcgcacccggagggggaaggttgggggagagacgcagtatcgattcaagtttccgccaggctcgggaacagctgcgtaggagccgtcacagtcggacctttctagttgagtccggggtcggcgagctgtgggccgaaatgcaggcaggggacagatacgttgtcgccgattgtggggggggcacggtggatctgaccgttcaccagctggaacagccccacgggaccctgaaggaactatacaaagctagtggagggccatatggcgccgtcggcgtcgatctagccttcgagcagctcctatgcaggatttttggtgaagatttcatagcaactttcaaaagacagcgacctgcagcctgggtggatttgacaattgccttcgaggccagaaagcggaccgctggtccacaccgagcaggggccctcaatatcagtctgcctttcagcttcatcgacttttatcggaagcagcgcggacacaacgtggaaactgcactcagaagatcatccgtgaacttcgtcaagtggtcctcacagggcatgcttaggatgtcctgtgaagctatgaacgagctgtttcagcccacggtgagcggcataatacagcacattgaagcgcttctggcacgccctgaagtccaaggcgtcaagctgctctttctggtggggggcttcgccgaatctgcagtacttcagcatgcagtgcaggccgctttgggggcacgtggccttagggtggtggtgccacatgacgtcgggctgaccatcctgaagggggctgtgctgttcggacaggcacccggagtggtcagagtgcgacggtcacccctgacctacggagtgggcgtgcttaatcgcttcgtgcccggccgccacccccccgaaaaactccttgtccgggatgggagacggtggtgtaccgatgtgttcgaaagattcgttgctgccgagcagtctgtggcccttggtgaggaagtgagaagaagttactgccccgcccggcccggacagcgccgcgtgctgataaatttgtattgttgcgccgctgaagacgcccggtttatcacagacccaggcgtcagaaaatgcggagccctgtcactggaactcgagccagccgactgcgggcaagatactgcgggggctccacctggacggagagaaatccgtgcagcaatgcagttcggagacacagaaatcaaggttacagccgtcgacgtgagcactaatcgcagtgtgcgggctagtatcgatttcctctctaattag

SEQ ID NO: 119530 - DNA, 2028 bp, synthetic construct
  misc_feature 1..2028: note = Description of Artificial Sequence: Synthetic coding sequence
  source 1..2028: mol_type = other DNA
atggcggacaaggaggctggcggctcagacggaccgagggaaaccgccccgacctcagcctattccagccctgcgaggtctctgggggacaccggtattacacccctgagcccttcccacatcgtgaacgacacagatagcaatgttagcgagcagcagagtttcctggtggtcgtggctgtggatttcggaactacaagcagcggctacgcatatagctttaccaaggaacccgagtgcatccatgtaatgaggagatgggaaggcggggaccccggagtttcgaatcagaagaccccgactaccattctcttgacccctgaaaggaagttccattcttttggctatgcagcaagagatttctatcacgatctggaccctaacgaagcgaaacagtggctctatctcgaaaagtttaagatgaaactgcatacgacaggcgatctcacaatggatacggatctcaccgcggctaacggaaagaaggtgaaagccttagaaatctttgcctacgcgctacagtatttcaaagaacaagctctcaaagaactgagcgatcaagccggtagtgaattcgaaaattcagatgtgagatgggtgattacagtgcccgccatctggaaacaacctgccaagcaattcatgcgtcaggccgcctatcaggcaggtctcgctagtcccgaaaattcagaacagctgatcatagcgctggagccagaggccgctagcatctattgtcgcaaactgcgcctacaccagatgatcgaactgtctagcaaggctgctgtcaacggttactccggctccgacaccgtgggagccggatttactcaggccaaggaacatattcggagaaatcgtcagtctaggacttttctggtagagaatgtgatcggcgagatctggtcagaactggaagagggcgataaatacgtcgtcgtcgatagtgggggcggtacagtcgacctaactgtgcatcagatccggctacccgagggccatcttaaagagttatacaaggcaaccgggggcccctatggctcactgggcgtggattatgaattcgaaaaactgttatataagattttcggggaggacttcatcgagcaattcaaaatcaagcgaccagctgcatgggtggatctgatgatcgccttcgagagcaggaagagagctgccgctcctgatcggacaaatcccctaaacattacacttcccttttcattcattgactactataaaaaatttcgaggtcacagcgttgaacatgcccttcggaaaagcaatgtggatttcgtgaaatggagttcccaggggatgttacggatgtccccggacgccatgaatgcactgtttaagcccacaatagatagcattatcgagcacctgcgggacctgttccaaaaacccgaggtgtctactgttaaattcctattcctggtaggaggttttgccgaggctccactgctacagcaggctgtacaggccgccttcggggaccagtgccgcatcatcatcccacaagacgtcggacttaccatactgaagggagcagtgctctttggactggatcccgcagtcatcaaagtgagaaggtctcctctgacctatggggtaggtgtgctgaacaggtatgtggaaggcaagcatccccccgagaaattactagtgaaagacggcaccaggtggtgcacagatgttttcgataaattcatctctgctgatcagtcagttgctcttggagaattggtgaagcggtcctacactcccgcaaagccatctcagctcgtgattgtcattaatatatattccagcgaacacgataatgtgagcttcattacagacccaggcgtgaagaagtgcgggacgctccggctagatctaactgggacctcaggcaccgctgtacctgctcgtcgcgaaatccagactttaatgcaattcggggatacagagatcaaagctaccgccatcgatatagcaactagcaaatcagtcaaggttgggattgacttcttgaattattag

SEQ ID NO: 119531 - DNA, 819 bp, synthetic construct
  misc_feature 1..819: note = Description of Artificial Sequence: Synthetic coding sequence
  source 1..819: mol_type = other DNA
atgaggagcctcgacttggcgagtcagctgcttaggaatcaaatcgtcacagaccccgacaacctgatggaggacgctgcatgggctaagcactgcgaccagaatctcgtagctagtgacgccccaggcgaggaaggaaccgggatcctgaagtctaaaagaacccaagccgccgatcatcagcccattctcaaaacggtgaaggccagtgatgaggattgccaactgaggatttcggaccgaatccgtgagacaagtgatctggaggattcttgggacgagtcttctggggctggttgtagccagggcacaccatcctattcttccagccactcactgttccgaggagccgtggctccatgccagagctcgcctatggcccggctcggagtgtccggcgagccatctccttgcacctcgaccaaccgctccacccccggagtcgcaagtacgccccagacaccagtcagtagcagccgagccgggttcgtctccggaggagaccgacctcttaccagcgaaccccccccacgttgggctaggcggcggagacggtctgttgctcgtaccatagccgccgagctggccgagaatcgcagacttgccagagagctgtcgaaacgggaggaggagaagctggataggttgatcgctatcggagaggaagcctccgcgcagcaggacactgcgaatgagctccgacgggacgcagtcattgcagtgcggagattggccaccgctgtggaggaggctaccggcgctttccagttgggactcgagaagttactacagagactaatctcaaacacaaagtcttag

SEQ ID NO: 119532 - DNA, 1530 bp, synthetic construct
  misc_feature 1..1530: note = Description of Artificial Sequence: Synthetic coding sequence
  source 1..1530: mol_type = other DNA
atggctgcaattggagtccacctcggttgtacttcagcctgtgttgccgtttataaagatggaagggccggtgtcgtggccaacgacgccggagatagggtcacacctgcggtggtcgcatacagcgagaacgaagagattgtcggactggcggcaaagcaatcaagaatcagaaatatatctaacactgtcatgaaagtgaaacagatcctgggaagaagttccagcgacccgcaagcccagaagtatattgccgagtcaaaatgcctcgtaatcgagaaaaatgggaagctgcgttacgagatcgataccggcgaagagacgaagttcgttaatcccgaggatgtggcacgcctcatcttctcaaagatgaaagaaacagctcattccgtactgggcagtgacgcaaacgatgttgttatcacggttcctttcgatttcggtgagaagcagaaaaatgcactgggtgaggcagcccgagctgccggctttaacgtgctccggctcattcacgagcccagcgcggccctcctcgcgtacggcattgggcaagattctccgacgggtaagtcaaacattttagtcttcaagctaggaggaacctctctgtccctgtccgtgatggaagttaactctgggatctatcgcgttctgtccaccaatacagatgataatattggcggggctcacttcactgaaaccctcgcccagtacctggcaagcgagtttcaaaggtcatttaagcacgacgtaagaggcaacgcccgtgccatgatgaaactcacaaattcagctgaagttgccaagcactccctctccactctggggagtgccaactgtttcctcgatagcttatacgaaggccaagacttcgattgtaatgtgtcacgagccagatttgagctcttatgctcacctctttttaacaaatgtatcgaagcgatccgggggctactggaccaaaatggcttcaccgctgatgatattaacaaagtagtgctctgcggagggtcatccaggatcccaaagttacagcagctcattaaggatctgtttcccgcagtcgagcttttaaactccatccctccagacgaagtgattcccataggagccgcaattgaagccggaatcctaatcggaaaagaaaatctcctggtcgaggatagcctgatgattgaatgcagcgctcgcgatattctcgtgaaaggcgttgatgagtcaggggccagcaggttcacagtcctgtttccatctgggactccgctgcccgctagacggcaacacacattacaggctccaggaagtataagctctgtatgcctggaactgtatgagtctgacgggaaaaactccgcgaaggaggagacgaagttcgcccaggtagtcctccaagacctagacaaaaaagagaacggccttagggacattctggcggtcctgacaatgaaacgcgatgggagtctccatgttacttgcaccgaccaggagacaggaaagtgcgaagccatttcaatagaaatcgcgtcatag

SEQ ID NO: 119533 - DNA, 432 bp, synthetic construct
  misc_feature 1..432: note = Description of Artificial Sequence: Synthetic coding sequence
  source 1..432: mol_type = other DNA
atggccgccatcggagtccacttgggttgcactagcgcatgcgtggctgtatacaaagacgggcgggcaggggtagtcgccaatgacgccggcgatcgcgtgacgcctgccgtcgtggcctatagtgagaacgaggagattgtcggactggctgctaagcagtcacgcatccgaaacatctctaacaccgtcatgaaagtgaagcaaatcctggggaggcgggtgctttccagagacccacagctgcagcagctgccccagccattccagaggtgttcctgctctcttagcgaacagccacatgggcagacagggtgtgtgcggggagcccagcctctgcaccagcaccagcctcagcatagctggggctctctgcacacagcagattcatccctcttgttcgaatcctggttttgtttctggtggggctag

SEQ ID NO: 119534 - DNA, 387 bp, synthetic construct
  misc_feature 1..387: note = Description of Artificial Sequence: Synthetic coding sequence
  source 1..387: mol_type = other DNA
taggcttgcgtagcagtttacaaggatggtagggccggcgtcgttgccaacgacgccggcgaccgagtgacacctgccgtggtggcctacagcgaaaatgaagaaatcgtcgggttagccgccaagcagtctagaatcaggaacatctcgaacaccgtgatgaaagttaaacagatactcggtcgatcaagtagcgatcctcaggctcagaagtatatcgccgagagtaaatgtctagtcattgagaaaaatgggaagttgcgatatgagatcgatacaggcgaagagactaaattcgtgaatcccgaggacgtggcccgactgatcttttctaagatgaagggcgcttactctccatggagtcagagtaacagcgaggatgggtag

SEQ ID NO: 119535 - DNA, 1926 bp, synthetic construct
  misc_feature 1..1926: note = Description of Artificial Sequence: Synthetic coding sequence
  source 1..1926: mol_type = other DNA
atggcaaaagccgctgccatcggaattgatcttggtacaacctatagttgtgtcggggtcttccagcacggaaaagtggaaattatcgctaacgaccagggcaacaggacaaccccctcctacgtggcgttcaccgatactgagcggctcattggagacgcagccaagaaccaggtggcactgaatccccagaatactgtgttcgacgcaaaacgcctgattgggcgaaagtttggcgacccagtggtccagtctgacatgaagcactggccatttcaggtgatcaatgacggcgacaagccaaaggtgcaagtgtcttataaaggcgagaccaaggcattttaccctgaagaaattagctccatggtgttaactaagatgaaggaaatcgcggaggcctaccttggttacccagtcactaatgctgtgattacagttccagcctatttcaacgacagccagaggcaggcgaccaaagacgctggggtgattgccggactgaatgtactgcgaataataaatgaacctacagccgccgccatagcatatggattagataggacggggaagggagaaaggaacgttttgattttcgacttaggaggagggactttcgatgttagcatccttaccattgatgacggtatctttgaggtgaaggccaccgccggagacacccatttgggcggtgaggattttgacaatcggttggttaaccacttcgtggaggaattcaaaaggaaacacaagaaggatatctcccaaaataaaagggcggtaaggcggctgaggaccgcgtgtgagcgagccaaacggaccctctctagttccacgcaggcgtcacttgagatcgactctctttttgagggcatcgacttctatactagtataacccgggcccgatttgaagagctctgctccgacctgttccggtctaccctagagcctgtggaaaaggccttgcgcgacgctaaactagacaaggcccaaatacacgatctggtcttggtcggtgggagtacaagaattcccaaggtgcagaagcttcttcaagatttctttaacggacgtgacctgaacaagagtattaatcccgacgaagcagtcgcatacggtgccgccgttcaggcagctatactgatgggcgataagtcagaaaacgtgcaggacttgttactcctggacgtggctcccctcagtcttggacttgaaaccgccggaggcgtgatgactgcgctcattaagcgtaacagtacaatccctactaagcagactcagatattcacaacctattcggataaccagcccggtgtactgattcaggtctatgagggcgaacgggcgatgaccaaagacaacaatcttctggggcgatttgagctttccggtatacccccagccccacggggtgtgccccagattgaagtgactttcgacatcgatgccaacggtatactcaatgtgacagccactgacaagtctaccggcaaggctaacaagataacgatcactaacgataaggggcgattatctaaggaagagatcgaacgcatggtacaggaagctgagaaatacaaggcagaggatgaagtgcagagggagcgcgtcagcgctaaaaacgccttggagtcttacgcttttaacatgaaatcagccgtggaggacgagggccttaagggcaaaataagtgaagccgacaagaaaaaggtgctcgacaaatgtcaggaagtgattagctggctggacgctaacactcttgcagaaaaggatgagttcgaacacaaacgaaaagaacttgaacaggtttgcaaccccattatctctgggctctatcagggcgccggaggaccaggcccaggaggatttggtgcccagggtcctaaggggggatccggaagtggcccaactatcgaagaggtcgattag

SEQ ID NO: 119536 - DNA, 1431 bp, synthetic construct
  misc_feature 1..1431: note = Description of Artificial Sequence: Synthetic coding sequence
  source 1..1431: mol_type = other DNA
atggccaaggctgcagcaatcgggatcgatctcgggacaacctattcttgcgtgggggtgtttcagcacggcaagggggagcgcaacgtgctcatttttgacctcggaggagggacattcgacgtgtccatactcacgatagacgacggcatcttcgaagtcaaggccacagccggagatacccacttgggtggtgaggactttgataataggctcgtgaatcatttcgtggaagaattcaagagaaagcacaagaaggatataagtcagaacaaaagggccgttcggcgcttacgtactgcgtgtgaacgagccaagaggacactgagcagctccacacaggcaagcctagaaattgatagcttattcgaaggcatcgatttctatacctcgattactagggcccgtttcgaggaactgtgcagcgacctctttaggtctacacttgagcctgtagagaaggctcttagggacgccaaactggacaaagctcagatacatgacctggttctggtaggtggatctactcggatccctaaggttcaaaaactgttgcaagactttttcaatgggcgcgacctaaataagtctattaatcctgacgaggcagtagcgtacggtgcggcggttcaagcggccatactgatgggggataagagcgagaatgtgcaagatctcttgttgctggacgttgcgcccttgtcgcttgggctagaaactgccgggggagttatgactgctctgattaaacggaattccactattcctacgaagcagactcagatcttcactacttacagcgataaccagccgggggtgctcatccaggtatatgagggggagcgggccatgactaaggataacaatctgctgggtagatttgagttgtccgggattccaccagctcctcggggcgtgccacagatcgaggttacgtttgatatcgacgctaacgggatcctcaatgtgacagcgacagataaatctactggtaaggccaacaaaattactatcacaaatgataagggtcgcctcagcaaagaagaaatcgagagaatggttcaggaagctgaaaaatataaggcggaggatgaagtccagcgtgaaagagtatctgccaagaacgcgctcgaatcctacgccttcaatatgaaatctgctgtcgaggacgaaggcctgaagggaaaaatttccgaggcagacaaaaagaaggtgcttgataagtgccaagaagtcatatcatggctggatgccaatacactggcggaaaaagatgagttcgagcacaagagaaaagagctggagcaggtgtgcaaccccatcatttcaggcttataccagggcgctggaggtccaggcccaggggggttcggggcgcaaggccctaagggcggatcaggctcaggccccactattgaagaggtggactag

SEQ ID NO: 119537 - DNA, 1431 bp, synthetic construct
  misc_feature 1..1431: note = Description of Artificial Sequence: Synthetic coding sequence
  source 1..1431: mol_type = other DNA
atggccaaagccgcggctataggaattgacctgggtaccacttacagctgcgtgggcgtgttccagcacgggaaaggggagcggaacgttctcattttcgacttaggcggcgggacattcgatgtcagcattctcaccattgacgatgggatcttcgaggtgaaggcgaccgcgggagatacacacctgggaggagaagactttgacaataggctcgtgaaccacttcgtggaagaatttaaaagaaagcacaagaaagacataagtcagaataagcgagcagtgcgtcgcctgcggacagcatgcgagagagccaaaagaaccctgagttccagtactcaagcttccctggagattgatagcttatttgaaggaattgatttctacacctctatcacgagggctagatttgaagaactctgtagcgacctgtttcgttccactttggagcctgtggagaaggccctgagagacgccaagctggacaaggcccagatccacgacctagtgttagtcggaggcagcacccggataccaaaggtccagaagctgctccaagattttttcaatggtagggatctgaacaagagcataaaccctgatgaagccgtcgcctatggtgccgcggtccaggccgccatattgatgggcgacaaatcagagaacgttcaggatctgctacttctagatgtggccccactctccttaggactggaaacggctggtggagtcatgaccgcacttattaaacgtaactcaacgatccctactaagcaaacacagatttttaccacatattctgataatcaacctggtgttctcatacaagtctacgaaggcgaacgggcgatgacaaaagataataatcttctgggtcgcttcgagctttcaggcattcctccagcccctagaggagtgcctcagattgaagttacttttgacattgacgccaacggtattttgaatgtgacagccaccgataagtccacaggaaaagcaaataaaatcacaattaccaacgacaaagggcgcctcagcaaagaggaaattgagagaatggtgcaggaggcagagaagtataaggcagaagatgaggtccaacgggaacgcgtgagtgcgaaaaacgccctggagagttatgcattcaacatgaagtccgctgtcgaggacgagggtttaaaggggaaaatttctgaggctgacaagaagaaagtcctcgataagtgccaggaagtgatcagctggctggatgctaacactctggcagagaaagatgaatttgagcacaaacggaaggagctggagcaggtctgtaatcccatcattagtggattgtaccagggcgccggtggtcctggccctggcggatttggagcacagggacccaaaggagggtcagggagtggacccacaatagaagaggttgactag

SEQ ID NO: 119538 - DNA, 1926 bp, synthetic construct
  misc_feature 1..1926: note = Description of Artificial Sequence: Synthetic coding sequence
  source 1..1926: mol_type = other DNA
atggcaaaagccgccgccattggtattgacctgggtaccacatacagctgcgtcggagtttttcagcatggtaaggtcgaaatcatcgccaacgaccaaggtaaccgtacaactccttcttatgtggcctttacagatacagaacggctgatcggagatgcagccaagaaccaggttgccctgaacccccaaaataccgtcttcgatgccaaaagactcatcggtcggaaatttggcgaccccgtagttcagagcgatatgaaacattggcctttccaggtgattaacgacggcgataaacctaaggtccaagtgtcatataagggggatacaaaagccttttatcctgaagaaatcagtagcatggtgcttacaaaaatgaaagaaatagctgaggcttacttgggctatcctgtaaccaatgccgtaattacagtcccagcctactttaatgattcacagaggcaagcgaccaaagatgcaggtgtcatcgccgggctcaacgtgttaagaataatcaatgaacccactgcagccgcaattgcctacgggctcgaccggaccgggaagggagaacgcaacgtgctgattttcgatctgggcggcggcaccttcgatgtctcaatcttgactatcgatgatggtatcttcgaagtaaaggccactgctggagatactcatctgggcggggaggacttcgataacaggttagtaaaccactttgtagaagaattcaagaggaagcacaagaaagacatatcacagaacaagagggcagtccgacgcctgcgaacagcttgcgaacgagctaaaaggacgctgtcctcttccacgcaagccagcctggaaattgatagtttattcgaggggattgatttttacacctccattacccgggcacggttcgaagagctttgttcggatctcttccgatccaccttagagccagtagagaaggcgttgcgcgatgcaaagctagataaagcccaaattcacgaccttgtgcttgttggtgggtctacccggatcccaaaagtccagaagctcctgcaggactttttcaatggacgcgatctgaataaatcaatcaaccccgatgaagcagtcgcctatggagccgcggtgcaggctgccattctcatgggagataaatcggagaacgtccaggatctcctgctgcttgatgtggctccactgtcactggggctcgaaaccgccgggggcgtgatgacagcccttataaagcggaattcaactatcccaactaaacagacccagatcttcacaacatattcagacaaccaacccggggtactcatccaggtgtatgagggcgagcgggctatgactaaggacaataatctgctggggaggtttgagctgagcggtattccccccgccccgcgcggggtccctcaaattgaggtaacctttgatatcgacgccaacggaattctaaacgttacggctaccgacaaatctacaggtaaagcgaacaagattacgatcacaaatgataaagggagactgtccaaggaggagatagagaggatggtgcaagaagctgagaagtacaaggcagaagatgaggtacagagggaacgggtatcagcaaagaatgcactggaatcatatgcctttaacatgaaaagcgcggtagaagacgagggcttgaagggcaaaatctcagaagccgacaaaaagaaggttctggacaagtgtcaggaggtgatctcctggctggatgccaacactcttgcagagaaggacgagttcgagcacaaacgaaaggaactcgagcaggtgtgcaaccctattatttcgggcctctaccaaggggccggagggcctgggccaggcgggttcggagcccagggacctaagggtggcagcggttctgggccaaccattgaagaggttgattag

SEQ ID NO: 119539 - DNA, 1431 bp, synthetic construct
  misc_feature 1..1431: note = Description of Artificial Sequence: Synthetic coding sequence
  source 1..1431: mol_type = other DNA
atggccaaagcagccgccataggcatcgatctgggcaccacatacagctgcgtgggagtgttccagcacggcaagggcgaaaggaacgtgctgatatttgatcttggaggcggcacattcgatgttagcatcctcacaatagacgatggcatattcgaggtgaaggcaaccgcaggggacacacatctaggaggcgaagatttcgataataggctggtgaatcattttgttgaggagttcaaacggaagcataagaaagatatctcgcagaacaagcgggctgtccgccggctgcgaaccgcatgcgagcgggcaaaaagaacactcagtagtagcacacaagctagtctggagatcgactcactgtttgagggcatcgacttttatactagtatcacacgagcaagatttgaggagctctgcagtgatctcttcaggtctacgctggaaccggttgagaaggcgctgcgggacgccaagctggacaaggctcagattcatgatctggtgctcgtcggaggctccacacggatccctaaggttcagaagcttttgcaggatttcttcaatggacgagatctgaataagagcatcaatcccgacgaggccgttgcctacggcgctgccgtgcaggccgctatcctcatgggagacaaatctgaaaacgtacaggatctactgctgctcgatgtcgcccctctctccctaggactggaaaccgccgggggagttatgacagccctgattaagcgcaattcaacgatccccacaaagcagacccaaatatttaccacatattccgacaaccagccgggagttctgattcaggtatacgaaggagagagagcaatgactaaggataacaacctgttggggaggtttgaactgagcggaatacctccagcgcctcgaggcgtgcctcagatcgaggtcacctttgatatagacgccaatggaattcttaatgtcaccgcaactgataagtctactggaaaggcaaataagattaccattaccaacgacaaaggtcgcctcagcaaagaggaaattgaacgaatggtgcaagaggctgagaagtacaaagccgaagacgaggtgcagagagagcgcgtgagtgccaagaatgcgctcgagagctacgctttcaacatgaaaagcgccgtggaggatgaagggctcaaaggtaagatctccgaagccgataagaaaaaggttctggataaatgccaggaggttatctcttggttagatgccaacacactggcagaaaaagacgagttcgagcacaagcgcaaagagttagagcaggtatgcaatcccatcattagcggcctgtatcagggggccggtggtcctggaccaggcggatttggtgcacagggacctaaaggaggaagtggtagtggcccgactatcgaagaggttgattag

SEQ ID NO: 119540 - DNA, 1926 bp, synthetic construct
  misc_feature 1..1926: note = Description of Artificial Sequence: Synthetic coding sequence
  source 1..1926: mol_type = other DNA
atggccaaggccgcggcgattgggatagacttaggcaccacatactcttgtgtcggggtgttccagcacggaaaggttgagattattgctaatgaccagggcaatcggacaaccccctcttacgttgcttttacggacacagagcgactgattggtgatgccgctaaaaaccaggtggcgctcaaccctcagaatacagtctttgatgccaagcgattaatcggccgcaagtttggggatccggtggttcaaagtgacatgaagcattggccattccaagttattaatgatggggataagcccaaggtgcaggtgtcctacaaaggggagacaaaggccttctacccagaggagatcagctcaatggtgcttactaaaatgaaggagatcgcagaggcttatctgggatatccagttacaaacgcggtcatcactgtacctgcgtattttaacgattcacaaagacaagccacaaaagatgctggtgtcatcgccggactgaatgttctgcgtataattaatgaacccactgctgcagctattgcttacggcctggataggacaggcaagggtgagagaaatgtgctgattttcgatttaggaggcgggaccttcgacgtgagtattctcaccatagacgatggtatctttgaggtcaaagccaccgccggagatactcacctgggtggtgaagacttcgataacaggctggtgaatcatttcgtagaggagttcaaacggaaacataaaaaggatatcagtcagaacaagcgcgcggtgcggcggctgcggactgcttgcgagcgtgccaaaaggacactatccagctccactcaggcaagcctagagattgactcactattcgaggggattgatttttatacatcgattaccagggccaggttcgaagagctgtgtagcgacctctttcgcagtaccttagaacctgtggagaaggcactacgggatgcaaagctcgataaggcccaaatccatgacttggtcctcgttggcgggtctacccgaattccgaaggtgcagaaactactccaggatttttttaacgggcgtgacctgaacaagtcgattaaccccgacgaggccgtggcctatggcgcagcagtgcaggcggctattctgatgggagacaagagtgaaaatgtacaggacttactgcttttagacgtggcccccttgagcttgggactcgaaacggcaggtggggtaatgacagccctgattaagcgaaatagtactattcctacgaaacagacccagatctttaccacctattcggataatcaacccggggtcctgattcaagtatacgagggagaacgagcgatgacaaaggacaataatcttctgggtcgctttgagctgagtggtatcccgcccgcgccgcgcggagtcccacagatagaggtgactttcgatatagacgccaacggaatcctgaatgtgacggccaccgacaagtcaacaggaaaagcgaataaaattactatcactaacgacaaaggaaggctgtctaaggaggaaattgagagaatggtgcaggaggctgaaaagtacaaggccgaagatgaggtgcagcgggaacgagttagtgcgaaaaatgctctggagagttacgccttcaacatgaaatcagccgtggaagacgaaggcctgaaggggaaaatctctgaggctgataaaaaaaaggtgttggataagtgccaggaggtaattagctggctagatgcaaacaccttagccgagaaagacgagttcgagcacaagcgcaaggaactggaacaggtctgcaaccccatcatctcagggctgtaccagggagccggagggccaggtcccggcggatttggggcacagggcccaaagggaggaagtgggtcaggccccacaatcgaggaggtggattag

SEQ ID NO: 119541 - DNA, 1926 bp, synthetic construct
  misc_feature 1..1926: note = Description of Artificial Sequence: Synthetic coding sequence
  source 1..1926: mol_type = other DNA
atggccaaagctgccgccattggaatcgaccttggaaccacgtacagctgtgttggggtgttccagcacggcaaggtggaaatcattgcaaacgaccagggaaaccgtactaccccctcttacgtggcattcactgacacagagcgtctcattggcgatgcagccaagaatcaagtggccttgaacccgcagaatactgtgtttgacgccaaacggctgatcggacgcaagttcggtgaccccgtggttcagagcgacatgaaacattggccttttcaagtaattaacgacggcgacaagccaaaggtccaggtatcatacaagggtgaaaccaaggcattctatcccgaagaaatatcctctatggtcttgacaaaaatgaaagaaattgcagaggcgtacctaggttatccggttaccaacgcggtcataacagtgcctgcatacttcaatgactctcagcgtcaagcaacaaaagatgctggcgtcatcgctgggttaaacgtgctcaggattatcaacgaacctaccgctgcagctattgcttatggactggatcggactggaaagggagagcgaaacgtactgatctttgatttagggggtggtacttttgacgtgagcattctgacgatcgatgacggaatatttgaggtgaaagccacagctggagacacacacttgggcggtgaggacttcgataatcggctcgtgaatcacttcgtcgaggaattcaaaagaaaacacaagaaagacattagtcaaaacaaacgcgctgtgcgtcgcttgcgtactgcctgcgagagggcaaaacgcacactgtcaagtagcacacaggcatctttagagatcgacagcctgtttgagggcatagatttttatacttcaatcactcgagcgcggtttgaggagctgtgttcagaccttttccggagcacgctggagcctgttgagaaggctctccgcgatgcaaaactggacaaggcacaaatccacgatctggtcctcgtgggcggctctactaggatccctaaagtgcagaagttgctgcaggatttctttaatgggcgagatctgaacaaatccataaaccccgacgaggcagtcgcctacggagcagccgtgcaggctgcaatcttaatgggggacaaatctgagaacgtgcaggacctcctgttgttagatgtcgcaccattaagccttggcctcgaaacagcggggggtgttatgaccgcacttataaaaagaaactccacgatccctaccaagcagacccagattttcactacatactccgataaccagccaggagtcctcatccaagtctatgaaggcgagagagccatgactaaggacaataatctgctcggcaggtttgagctttctggcattccaccggcgccccgcggcgtgccacagatcgaggtgacattcgatatcgacgcaaacgggatcctcaacgttacagccactgataagtcaacagggaaagccaacaaaattaccattactaacgataaagggagactgagcaaggaggaaattgagaggatggtgcaagaggccgaaaagtataaagccgaggacgaggtgcaacgggaaagagtcagcgctaaaaatgccctcgaatcctacgcattcaatatgaaatcagccgttgaggacgagggcctgaaaggaaagatcagtgaggctgacaaaaagaaagttctcgacaaatgccaggaagtcataagctggctggacgcaaacactttggcagaaaaagacgagtttgaacacaaaagaaaggagctggaacaggtttgcaatcctattatctccggactgtaccagggagcaggaggaccgggacctggaggctttggggctcaagggccaaaaggaggttctgggagcgggcccaccatcgaagaggtcgactag

SEQ ID NO: 119542 - DNA, 699 bp, synthetic construct
  misc_feature 1..699: note = Description of Artificial Sequence: Synthetic coding sequence
  source 1..699: mol_type = other DNA
atggctaaggctgccgcgatcggcatcgatcttggcacaacttattcatgtgtgggagtgtttcagcatgggaaagttgagatcattgcaaatgatcaaggcaatagaaccacccccagctatgttgcgttcaccgatactgagcggcttatcggagatgcaggagtgatcgccgggctgaacgtcctgcgcattattaatgaacccaccgccgccgccatcgcgtatggactagatcggacaggtaaaggcgagaggaatgtcttaatcttcgacttaggaggcgggacatttgatgtaagtattctcaccatcgatgacggaatattcgaggtcaaagcgactgccggcgacactcaccttggtggcgaagacttcgataatcggttagtgaaccattttgttgaggagtttaaacggaaacacaaaaaggacatctcccagaacaaaagagcggttagaagactaagaaccgcctgcgaacgggctaaaagaacgctgtcatcatcaacccaggcgtctctcgagatcgattccctattcgagggcatagacttctacacctccatcacccgtgcgcgcttcgaagaactgtgttctgacttgttccgaagcactctggaacctgtcgaaaaggcaccaccagcttccccgcgctgcaggtcctgttgcagaacctcctccacaggggccacttag

SEQ ID NO: 119543 - DNA, 1926 bp, synthetic construct
  misc_feature 1..1926: note = Description of Artificial Sequence: Synthetic coding sequence
  source 1..1926: mol_type = other DNA
atggctaaagcagccgccatcgggattgatctcggcaccacatattcttgtgtgggcgttttccagcacgggaaggtggagatcatcgcaaatgaccaagggaaccggactacaccaagctatgtggcctttactgatacagaacggttgatcggggacgcggcgaagaaccaggttgcccttaacccacagaacactgtgttcgacgcaaagcgtttaattgggagaaagttcggagatcccgtagtgcagtctgacatgaaacactggcccttccaggtgatcaacgatggcgacaagccaaaggtacaggtcagctacaagggtgagacaaaggccttctaccccgaagaaattagtagcatggtgctgactaaaatgaaagaaatagctgaggcctatctcgggtaccctgtcactaacgcggtgattaccgtacccgcttactttaatgactcccagaggcaagcaacaaaggatgccggtgtcatcgccgggctaaatgtcctgaggattatcaacgaacctaccgccgctgctatagcgtacgggttggaccgtaccggaaagggggaacgtaacgtccttatctttgacctcggcggcggaacatttgatgtgtccattctaacaatcgacgatggcatcttcgaggttaaggcaacagcaggagatacccatctgggcggagaggatttcgataaccggctcgttaatcacttcgtggaggagttcaagcggaaacataaaaaagacatttctcaaaacaaaagagccgtaagaagacttagaaccgcatgcgaacgggctaagcggactttaagctcttcaactcaggcttccctggaaattgatagccttttcgagggtatcgatttttacacgagcattactcgagccaggttcgaggagctttgcagcgacttgtttagatccacactggagccggtcgaaaaggccctgagagacgcaaagttagataaggctcagattcacgacctggtcctggtgggcggctcaactcggatacctaaagtccagaaactcctccaagacttctttaacggtagggatctgaataaatctattaaccctgacgaggcggtcgcttatggagcagcagtgcaggccgccatcctgatgggcgacaagtctgagaacgtgcaggacctgctgctattggatgtggcccccctgtccttgggcctggagactgccgggggtgtcatgaccgctcttatcaagagaaattccacaatccccaccaagcagacccagattttcaccacgtactcagataaccaaccaggagtgctgatacaggtgtacgaaggggagagagcaatgacgaaggataataacctcttaggcagatttgaacttagcgggatcccccccgccccgagaggggtgccccagatcgaggtgacatttgatatagacgccaatgggatcctaaatgtcactgctaccgataagtcgactggcaaagcaaacaagataacaatcactaacgacaaggggcgcctgtctaaagaggagattgaaaggatggtgcaagaagccgaaaagtataaggctgaggacgaggtgcaacgagagcgggtcagcgcaaagaatgcattggaaagctatgccttcaatatgaaaagcgctgttgaggacgagggtctgaaaggaaaaatttccgaagcagataagaaaaaggtcctcgataaatgccaggaggtgattagctggctggatgccaacactctcgcagaaaaggatgaatttgagcataagagaaaggagctggagcaagtatgcaatcctatcatttcagggttgtatcaaggagccggaggccctggccccggcggttttggcgcccagggtcctaagggcggaagcggatctggccccaccatcgaagaggtcgattag

SEQ ID NO: 119544 - DNA, 1431 bp, synthetic construct
  misc_feature 1..1431: note = Description of Artificial Sequence: Synthetic coding sequence
  source 1..1431: mol_type = other DNA
atggctaaggccgccgctattggaattgacctcggtacaacctatagctgcgtgggcgtttttcagcatggcaagggggaacgtaatgtgcttatcttcgatcttggtggtgggactttcgacgtgtccattctgactatcgacgatggtatcttcgaagttaaggctacagcgggcgacactcatcttggaggcgaagactttgacaacagactggttaaccacttcgtagaagaattcaaaagaaagcacaaaaaagacatctcccagaacaaacgcgcagtcaggcgactacgtacagcctgtgaaagagccaaacgaacactctcctcctcaacgcaggcaagcttggagattgattccctgttcgaggggatcgatttttacacctccataactcgtgctagattcgaggaattatgttccgacctgttccggtcaacactcgagccggtagagaaagccctccgggacgcaaaattagacaaggcccaaatccatgacttagtgctggtcggaggcagtacgcgtatccccaaagtgcaaaagctgctccaggacttttttaacggccgagatcttaataaaagcatcaatcctgacgaggcagtggcctatggcgctgctgtccaggctgctattttgatgggagacaagagtgagaacgtgcaggacctacttcttctagatgttgcaccgctcagcctcggactcgaaacggccggaggtgtgatgaccgcccttatcaaaaggaactcaaccattcccaccaagcagacccaaatcttcaccacttatagcgacaaccagcctggcgtcttaatccaggtgtatgaaggcgaacgggccatgaccaaggataacaacctcctgggccggttcgaactgtccggtatcccccccgcgcctcggggggtgccccagatagaagtcacgtttgatattgacgccaacggaatattgaatgtcacagccactgacaaaagtacaggaaaagcaaacaagattaccattacgaatgacaaaggcaggctgagcaaagaagagatcgagaggatggttcaggaagccgagaagtacaaggcagaggatgaggtgcaacgggaaagggtatctgccaaaaacgccctcgagtcctatgctttcaacatgaagtccgccgtggaggacgagggtctgaaggggaaaatcagtgaggcagacaagaaaaaagtgctcgacaaatgccaagaggtcatatcctggctcgacgccaatactctggctgagaaggatgagttcgagcacaaaaggaaagagctggaacaggtctgcaaccctattatttccggactgtaccagggcgccggtgggcccggtccaggcggttttggggcccaggggccaaagggcggatccggcagcggccccaccattgaagaagttgattag

SEQ ID NO: 119545 - DNA, 1431 bp, synthetic construct
  misc_feature 1..1431: note = Description of Artificial Sequence: Synthetic coding sequence
  source 1..1431: mol_type = other DNA
atggccaaggctgcagcaattgggattgacttgggaacaacgtattcatgtgtgggggtttttcagcacgggaaaggtgagaggaacgttcttatctttgacctgggcgggggcactttcgacgtgtccatactgacgatcgacgatggcatctttgaagtgaaggccacagctggggatacccatctcggaggggaagattttgacaatcgccttgttaaccacttcgtggaggaattcaagcgcaaacataagaaagacatcagtcaaaacaagcgcgcagtcaggcgactacggactgcctgcgaaagagccaaacggacactctcaagtagtacacaagcatccctcgaaatcgattcactcttcgagggtatcgacttttatacttcaatcactcgcgcccgcttcgaggagctgtgctctgaccttttccgttcaactttggagcctgtggagaaagcactccgggatgctaagctcgacaaggcacagatacatgacctggtcctggtcggagggtccacgcgcatcccgaaggtgcagaaattgctgcaagatttcttcaacggaagggacctcaacaagtctattaaccccgacgaagcagtcgcttacggtgcagccgtccaggccgcaatccttatgggtgataagtccgagaacgtgcaagatctcttactactggacgtcgcacctctctctctgggactggaaacagccgggggcgtgatgaccgccctgataaaacggaactcaacgatccccaccaaacaaacccagatattcaccacttactctgataatcagcctggcgtgttgattcaggtttacgagggagagagagctatgactaaagacaacaatcttctggggcgattcgagctttccggcatcccaccagcccctagaggtgtgccacagatcgaggtcacattcgacatagacgctaacgggatcctaaacgtgaccgctactgacaaaagtaccggaaaggctaacaaaataacaataactaatgataaagggcgtctgtccaaggaggaaatcgagcggatggtgcaggaggccgagaagtacaaagctgaggatgaggtgcagagagagcgagtgagcgctaagaacgccctcgagagctacgctttcaacatgaaaagtgcggttgaggacgagggtctgaagggcaagatatctgaggccgataaaaagaaggtactggataaatgtcaggaggttatcagttggctagacgctaatacactggctgaaaaagatgagtttgaacataagcgcaaggaactggaacaggtgtgtaatcccatcatttcaggcttgtaccagggcgccggcgggcccgggcctggcggcttcggtgcgcaggggccaaagggaggatctggatcaggccccaccatagaggaggtggattag

SEQ ID NO: 119546 - DNA, 1653 bp, synthetic construct
  misc_feature 1..1653: note = Description of Artificial Sequence: Synthetic coding sequence
  source 1..1653: mol_type = other DNA
atggctaaggcagcagccatcggcatcgatctgggtacaacctatagctgcgtgggagttttccagcacggcaaggtccagattagcagtatggtgctcactaaaatgaaagagattgccgaggcctatttagggtaccctgtgacaaacgccgtcatcaccgtcccagcctatttcaacgacagtcagaggcaggcaactaaggacgccggcgtaatcgcagggctcaatgtcctcagaattataaatgaacccacggcggcagctatcgcctatggcctggatcgcacaggcaaaggcgagaggaatgtattaattttcgatctgggagggggcacattcgatgtgtccatcttaacaatagatgatggtatatttgaagtgaaagctaccgccggcgatacccacctcggcggcgaggattttgacaatcgactggtgaaccactttgtcgaggagtttaaacggaagcacaagaaggacatcagccagaataaacgagctgtgagaaggttgaggacggcctgtgagagagccaaaaggactctctcttcatccacccaagcgtctttagaaattgattctctgtttgaagggattgacttctacacatcaatcacccgggctcgcttcgaagaactgtgttcagacctgtttcgtagcactcttgaacctgtagagaaggcactccgcgatgctaaactggataaggcacagatccatgaccttgtgctggtgggcggatcgaccaggatacccaaggttcagaagctattgcaggacttcttcaacgggagggatcttaataagagcattaaccctgatgaagctgttgcttacggcgccgccgttcaggcagctattctgatgggcgacaagagtgaaaacgtccaagacctgttgctcctcgacgtggctcccctgtctctgggcctggaaaccgcgggcggcgttatgactgccctgatcaaacgtaactcaaccatccccacaaagcagacccagatattcaccacctatagtgataaccagccaggagtgttaattcaggtatatgagggtgaacgggccatgacgaaagacaacaatctgctcgggagattcgaattgtcgggaatccccccagccccaagaggcgtacctcagatcgaggttacctttgacatcgatgccaatggcatccttaacgtgacagcgacagacaagtcaaccgggaaagcgaacaagatcacgataaccaatgacaagggacggcttagtaaggaggaaatcgaacgcatggtgcaggaggccgagaagtacaaggccgaggacgaagtccagcgggagcgagtatccgcaaaaaatgctctcgaaagttatgcatttaatatgaaaagcgccgtggaggacgagggcctgaaaggcaaaattagtgaggcagacaagaaaaaggtgctcgacaagtgccaggaagtgattagttggctcgatgccaacactctcgcggagaaggacgaattcgagcacaaacgtaaagagctggagcaggtgtgcaatccaattatctcagggctgtaccagggagctggggggcccgggcctggagggtttggcgcgcaaggccccaaaggcgggagcgggagtggccctacaatcgaggaggtggactag

SEQ ID NO: 119547 - DNA, 1872 bp, synthetic construct
  misc_feature 1..1872: note = Description of Artificial Sequence: Synthetic coding sequence
  source 1..1872: mol_type = other DNA
atggcaaaagcagccgcgataggtatcgatctggggacaacctactcatgcgtgggggtatttcagcacgggaaggtggaaatcattgccaacgaccaggggaatcggacaaccccttcctatgtggcattcacggacaccgaacgcttaatcggagacgccgccaagaatcaggtggctttaaatccggtcgtacagtcagacatgaagcactggcccttccaggtaatcaacgatggcgacaagcctaaggtccaggtgagttacaaaggggaaacaaaagctttctaccccgaggaaatctcatcaatggtcctcaccaaaatgaaagagattgccgaggcctatctagggtacccagtgaccaatgctgtgatcaccgtgcccgcctacttcaacgactcacagaggcaggccactaaggatgcgggcgtgattgccggcctgaacgtgctgcggattataaatgagcctacggcggcagccatcgcatacggactggacaggaccggtaagggcgagcgaaatgtgttgatatttgacctgggtggggggacctttgatgtgtcaatcttaactatagacgatggcatatttgaggtgaaggctaccgcaggagatacacatcttggaggggaagacttcgataaccgcctcgtcaaccacttcgttgaggaattcaaacggaaacacaagaaagacatctcccagaacaaacgcgctgttagacgccttcggaccgcgtgcgagagggccaagaggaccttaagcagttcaacccaggcttccctcgagattgactctcttttcgagggcattgatttttataccagcataaccagagcaaggtttgaagagctttgctcagacctcttcaggtccacactggaaccagtagaaaaggccctgcgggacgcaaagttggacaaggcccagattcacgacttagtgctggtgggcggaagcaccaggatccccaaagtgcagaaattactacaggatttttttaacggaagagatctgaacaaatcaatcaatccagacgaggccgtggcctacggtgcagcagtgcaggctgctatcctgatgggcgacaaatccgagaatgtgcaggacttgttgctcctggatgtcgcccctctgagtctgggactggagaccgcaggcggcgtgatgactgctctgataaagaggaactccactattccaacaaagcagacacagatcttcaccacttactctgacaatcagcccggcgtgttgattcaggtctacgagggtgagagggcaatgacaaaggataacaatctgcttggccgctttgagctaagtggcatcccgccagccccccgcggagtccctcaaattgaagtcacgtttgacatagacgctaacggtatcctcaatgtgacagccactgataagtctactgggaaggccaataaaatcaccatcaccaacgataagggccgactttccaaggaggaaatcgagcggatggtccaagaggccgagaagtataaagccgaggatgaggtgcagcgagagcgggtatccgccaaaaacgcgctcgaatcctacgctttcaatatgaagtccgccgtggaggatgagggcctgaagggcaagatatcggaggcggacaagaagaaagtcctggacaaatgccaggaggttatttcttggctcgatgcgaacaccttagccgaaaaagacgagtttgagcacaaacgcaaggagttggagcaggtgtgtaatcccatcatttccgggttgtaccaaggtgccggaggcccagggcctggagggtttggggcccaggggcccaagggagggagcggcagtggcccaaccattgaggaggtcgactag

SEQ ID NO: 119548 - DNA, 1653 bp, synthetic construct
  misc_feature 1..1653: note = Description of Artificial Sequence: Synthetic coding sequence
  source 1..1653: mol_type = other DNA
atggccaaagccgcggccatcggaattgatctggggacgacctattcctgcgtgggagttttccagcatgggaaggtacagatctcttctatggtactgacaaaaatgaaggaaatcgcagaggcctatctgggttaccccgttaccaatgctgtcattacggttcccgcctatttcaatgacagccagcgacaggcgacaaaggacgccggcgtcatcgcggggctgaacgtcttgcgcatcattaacgagcccacggccgcagccatcgcatacggactcgataggaccggtaagggcgagcgaaatgtcctgatatttgacctggggggaggtacttttgatgtgtcgatcctcactatcgatgatggtatctttgaagtcaaggccacggccggcgatacacacctcggtggggaggatttcgacaatagattggtcaatcactttgtcgaggagttcaagcggaagcataaaaaggatattagccaaaataaaagagcagtgcggaggctgaggacagcctgcgaacgagctaaaagaaccctgagttcaagtactcaagcctcactggaaatcgattctctcttcgaaggaattgacttctatacgagcatcacaagggcacggttcgaggagctgtgcagtgatttgtttcggagtacgctcgagcctgtggagaaggcccttagggacgctaaactcgacaaggcccagattcacgacctagtgcttgtcggaggctccacacgcatccccaaggtgcaaaagttgctccaggatttcttcaatggaagggatctcaataagagcatcaaccccgacgaggctgtggcttatggcgccgctgttcaggccgcgattttaatgggagataagtcagagaatgtgcaggacctgctcctgctagatgtggccccattgagcctaggactggagacagccggaggggtcatgaccgctctgattaagcggaactccaccatccctacaaaacagacacagatctttacgacctactctgacaaccagccaggagtcctcatccaggtctatgagggggaacgagccatgacaaaggataacaatttattaggaagattcgagctgagcgggatcccacctgctcctagaggcgtgccgcagatagaggtgactttcgatatcgatgctaacggcatcctgaatgttaccgcaaccgataaaagtactggtaaggctaacaaaattaccattaccaatgataagggacgcctgtccaaggaggaaattgagagaatggtacaagaagctgaaaagtataaggccgaggatgaggtccagcgtgagagagtgtccgctaagaatgccctggaaagttacgcatttaatatgaagagcgcagtggaggatgagggactgaaaggaaaaatcagcgaggctgacaaaaaaaaggtgctggataaatgtcaggaggtcatttcttggctagatgcaaataccctcgccgagaaagatgaatttgagcacaaaaggaaagaactggaacaggtctgcaacccaataataagtggcctatatcagggcgctggcggtccgggacccgggggctttggggcccaaggtccaaagggcggttctggtagcgggcctaccatcgaggaagttgactag

SEQ ID NO: 119549 - DNA, 1653 bp, synthetic construct
  misc_feature 1..1653: note = Description of Artificial Sequence: Synthetic coding sequence
  source 1..1653: mol_type = other DNA
atggccaaagctgctgcgattggcatcgacctgggcaccacatacagttgcgtcggggtgtttcaacacgggaaagttcagatctcctctatggtcttgactaaaatgaaagagatcgcagaggcctatctcggctacccagtcactaacgctgtcatcaccgtcccagcctactttaatgattctcagcggcaggctacaaaggatgccggtgtgatcgcaggcttgaatgtgcttcgcatcatcaatgagccaacagcggctgccatcgcttatggattggatcggaccgggaaaggcgagcgtaacgtgcttatttttgatcttgggggtggtacttttgacgtgtctatcctgacaatcgatgacggtatcttcgaggtaaaggctactgccggcgatacccacctcggcggagaggacttcgataacaggctcgttaaccatttcgtcgaagagttcaaaaggaaacacaaaaaggatatttcgcaaaataagcgcgccgtgcgccgcttgagaaccgcgtgtgagagagcgaagcgtactctctccagtagcacacaggcttcactggaaattgattctctgttcgaaggcattgatttctatacatcaatcacccgtgcacggtttgaggagctgtgctctgatctgttccgcagcacgttagaacccgtggagaaagccctgcgagacgcaaaacttgacaaagctcaaattcacgatctggttctcgtgggagggtctacccggatccccaaggtccaaaaactgctgcaggacttttttaatggcagggatttgaacaagtcgatcaacccggatgaagctgtagcttatggcgcggccgtacaggctgcaattctaatgggggacaaatccgaaaacgtgcaagacttgctcctccttgatgtggccccactttcgctggggctggagaccgcaggaggagtcatgaccgccttgattaagagaaactcaaccataccaaccaagcaaacccagatctttacgacctactccgataatcaacccggcgtgctgatacaggtgtacgaaggcgagcgcgccatgacgaaagacaacaacctccttggcaggttcgaacttagcggcataccgcccgccccgcgaggagtaccacagatcgaagtgacattcgatatcgacgccaacggaatcctcaacgtgaccgccactgacaagtccacaggtaaggcaaacaaaattaccataaccaacgacaagggacgcttaagtaaggaggaaatcgaaagaatggtacaggaagctgaaaaatataaggctgaggacgaagtgcagagagagcgggtgtccgctaagaatgctttagagtcctacgcttttaacatgaagtcggctgtcgaggatgagggcttaaagggtaagatctcagaggccgataagaagaaggtgctggataagtgccaggaggtgatctcttggttggatgctaacaccctcgccgagaaagatgagttcgagcataaaaggaaggaacttgagcaagtctgcaacccaatcatttctggtctgtaccagggggcgggaggcccaggtccgggaggttttggcgcacaaggaccaaaaggaggatcaggaagcgggccaacaatcgaagaagtggactag

SEQ ID NO: 119550 - DNA, 1653 bp, synthetic construct
  misc_feature 1..1653: note = Description of Artificial Sequence: Synthetic coding sequence
  source 1..1653: mol_type = other DNA
atggccaaggcagctgccattgggattgacctgggaactacctattcatgtgtgggtgtgttccagcatggcaaggtgcagatatcctcaatggtgctgacgaagatgaaggagatcgccgaggcctatctcggctatcccgtcactaacgcagttatcaccgttccagcctactttaatgattctcagcgtcaggcaaccaaggatgcaggagttatcgccgggctgaatgttctccgcatcatcaacgagcctaccgctgccgctatcgcatatggtcttgacagaacaggaaaaggagaacgcaacgtcctgattttcgatttgggaggcggaacttttgatgtatctatccttacaatcgacgatggaatcttcgaagtgaaggctactgccggcgatacacaccttggcggcgaagactttgataaccgtcttgtgaaccactttgtcgaagagttcaagaggaaacataaaaaggacatttcccagaataagagagccgttcgtagattgaggacagcatgtgagcgggcgaaacgtaccttaagttcgtcaacgcaggccagtttggaaatcgatagcctgtttgagggaatagacttttacacatctattacacgtgcccggttcgaggagctctgcagcgacctttttaggagtactctggaacctgtggagaaggctctgcgtgacgctaagttggacaaggcccagattcacgatctggtgttggtcggggggagcactaggatccccaaggttcagaaattgctccaggatttcttcaatggcagagatctcaacaagagcattaacccagacgaagccgtggcctacggcgccgccgtgcaggccgccattctcatgggtgataagtcagagaacgtacaggacctgctgttgttggacgtcgcacccctctccctcggattagaaacagctggcggggtaatgactgcactaattaagagaaatagcactatcccaaccaaacagacgcagattttcacaacttattcagataaccagccgggagtactgatccaggtctacgagggagagcgggccatgaccaaagataacaacctcctgggtcgatttgaactatctggcatccctccagcgcctcgcggcgttccccagattgaggtgacatttgatatagatgccaatggcatcctaaatgtgacggccacggataagtccactggcaaggctaataaaattaccatcacaaatgacaaaggtcggctgagtaaggaggagattgagcgcatggtacaggaagcagagaagtataaggcagaggacgaagtgcagcgggagcgagtatctgcaaagaatgcgctcgaatcgtatgcatttaatatgaaatccgccgtcgaggacgaaggcctgaaaggaaagatctcagaggccgataagaaaaaggtgcttgataaatgtcaggaggtgattagctggctagatgccaataccctcgctgagaaagacgagttcgaacataagcgcaaagagctggaacaggtctgcaaccctatcataagcggtctttatcagggcgcgggtggtcccggcccgggtggattcggagcccaggggcccaaaggcggtagtggaagcggacccaccatagaggaggttgattag

SEQ ID NO: 119551 - DNA, 699 bp, synthetic construct
  misc_feature 1..699: note = Description of Artificial Sequence: Synthetic coding sequence
  source 1..699: mol_type = other DNA
atggcaaaggccgctgccattggaatagatctgggtacgacatactcgtgcgtgggcgtgttccagcatggaaaggtggaaattatagccaacgatcaaggcaacagaaccaccccttcttatgtagccttcaccgacaccgaacggttaattggagacgccggcgtaatagctgggctgaatgtcctgaggatcattaacgagcccacagctgccgcaattgcctacggcttagatcggactggaaagggggaacgcaacgtgcttatttttgacctgggaggcggcaccttcgatgtgtcaattcttacgatagatgacggcatcttcgaagtgaaggccaccgctggggatacgcacctaggaggggaagatttcgacaataggctggtcaaccacttcgtcgaggaatttaagcgcaagcataagaaagacatcagtcaaaacaagcgggcagtgaggcgactgcggaccgcttgcgaaagagccaagcgtacgctctccagtagcacacaggctagtctggaaatagacagcctgtttgagggaattgatttttacaccagtatcacccgggcgagattcgaggagctatgcagcgacttgttcagaagcactctggagcctgtcgagaaagcacccccggcaagccctcgctgtcgaagctgttgtcggactagctctaccggtgccacctag

SEQ ID NO: 119552 - DNA, 1653 bp, synthetic construct
  misc_feature 1..1653: note = Description of Artificial Sequence: Synthetic coding sequence
  source 1..1653: mol_type = other DNA
atggctaaagccgctgccattggcatcgatctgggcacaacctacagctgtgttggcgtattccagcatggtaaagtgcagatctccagcatggtactgaccaagatgaaggaaatcgctgaagcctatctgggataccccgtgactaatgctgtgataacagtccctgcctacttcaatgactcccaaagacaggccacgaaggatgccggggtgatagcagggcttaacgtgctacgaatcataaatgagcccactgccgccgccatcgcgtacggattggaccggactggcaaaggggaacggaatgtgcttatttttgacttgggggggggaaccttcgatgtcagcattcttaccatcgacgatggtattttcgaagtgaaggctaccgcaggcgacacacacctgggcggagaggactttgataatcgacttgtcaatcattttgtcgaggagttcaagaggaagcacaagaaggacattagccaaaataaacgggcggttagacgcctccgaacagcatgtgagagggctaaacgcactctgtctagttcaactcaggccagcctggagattgactcgctttttgagggtatcgacttttacacgtccattactcgggcccgcttcgaggagctttgcagcgatttgttcaggagcaccttggaaccagtggagaaagccttgagagatgccaaactggacaaggcccagattcacgaccttgtgctggttgggggcagtacgcgcatcccaaaagtgcagaagctgctgcaggacttcttcaacggccgcgaccttaataagagcattaatccagacgaggctgtagcctatggcgcagctgtgcaagccgctatactgatgggggataagtcagaaaatgtgcaggatctcttactgcttgatgtagccccactatccctggggctcgaaactgcgggaggtgtgatgaccgctctgatcaaacgcaactctactatcccaaccaaacaaacacagatttttacaacatattcagacaatcagcctggcgttctcatccaggtctatgaaggcgagcgggctatgacaaaggataataacctgctgggccggttcgagctgtctggaattccacctgctcctcgcggagtcccgcagattgaggtgactttcgacatcgatgctaatggaatattgaatgtcacggccacagacaagtccaccggaaaggctaacaaaattacaatcaccaacgacaaaggtagactgagcaaggaggagatcgagcggatggtacaggaagctgaaaagtacaaggctgaggatgaggtgcaacgtgaacgtgttagtgctaagaatgctttggagtcttacgcatttaacatgaaatctgcggttgaagatgagggcttgaaggggaagatcagtgaggctgacaaaaagaaagtactcgacaagtgtcaggaagttattagttggctcgacgctaacacactggccgagaaagacgagtttgaacacaaacggaaggaactggaacaggtgtgcaaccccattattagtgggctgtatcagggcgctggcggacccgggcccggaggtttcggcgcacaggggcccaaaggaggtagcggctctggaccaacaatcgaagaagtggactag

SEQ ID NO: 119553 - DNA, 699 bp, synthetic construct
  misc_feature 1..699: note = Description of Artificial Sequence: Synthetic coding sequence
  source 1..699: mol_type = other DNA
atggccaaggcagccgccatcggcatcgatctcggcacaacctactcgtgtgtgggggttttccaacatggaaaggtggagatcatcgctaatgaccagggcaaccgcacaacacctagttacgtggctttcacagacacagaacgtcttattggcgacgccggagtcattgcaggactgaatgtcctcaggatcataaacgaacctaccgcagctgctatagcgtatggtctggataggactggaaaaggagaaagaaacgtgctgatcttcgacctgggtggtggtacattcgatgtgtccatcctcacgattgacgatgggatcttcgaggtaaaagctacggccggcgacacgcacctgggtggggaagatttcgacaatcggctcgtgaaccactttgtggaggaattcaagagaaagcacaagaaggatatctcacagaataaaagagcggtgagaagattgaggactgcctgtgagcgggccaagagaactctgagtagctccacgcaggccagtctcgagattgattccctcttcgaggggatcgacttttacacctcaattacacgggccagatttgaagaactgtgttctgatctcttcaggagcaccttggagccagtcgagaaagcgccacctgcgagtccaaggtgtcgctcttgttgtcgaacatcaagcaccggagcgacgtag

SEQ ID NO: 119554 - DNA, 699 bp, synthetic construct
  misc_feature 1..699: note = Description of Artificial Sequence: Synthetic coding sequence
  source 1..699: mol_type = other DNA
atggccaaggccgcagccatcggtatcgacctgggcacaacttactcatgtgtgggggtgttccagcacggcaaagtggagattatcgcaaatgaccagggaaatcgcaccaccccttcatatgtagcctttaccgacaccgaaaggttgattggagacgcaggcgtaatcgccgggttgaatgtgcttaggatcatcaatgaacccacagctgcggctattgcctatggactggatcgaaccggaaaaggggaacgcaacgtgctgatcttcgacttagggggtggcacttttgatgtgagcatcctgacaatcgatgacggaattttcgaagtgaaagccacggcgggcgatacgcacctgggcggagaggatttcgataatcggcttgtcaatcatttcgtcgaggaattcaaacggaagcacaagaaggacatctcccagaataaaagagcagtgcggcgattacgaacagcgtgcgagcgggcaaaaaggacgctgagtagtagcacacaggccagcctggaaatagatagtttattcgaaggaatagatttttacacgtcaataacccgtgcaagatttgaggagctctgtagcgacttgtttcgcagtaccctcgaaccagtggaaaaagccccaccagcctctccacggtgtcgttcttgctgccgcacatcttctactggggcgacctag

SEQ ID NO: 119555 - DNA, 699 bp, synthetic construct
  misc_feature 1..699: note = Description of Artificial Sequence: Synthetic coding sequence
  source 1..699: mol_type = other DNA
atggcaaaggctgcagccattgggatcgatctaggcaccacatacagctgcgtgggagtatttcagcacggcaaagtggagatcatcgcaaacgatcaaggcaacaggactactccatcctatgtcgccttcacggacacagagaggttaattggcgatgcgggggtgattgccggcttgaatgtgcttcgcatcattaacgagcctacagccgccgcaattgcctatggactggaccgaaccggcaaaggagagcgcaacgtgctgatcttcgatctcggaggcgggacatttgacgtgagtatcctaaccatcgacgatggcatttttgaggtgaaagcgaccgccggtgacacccatctgggtggggaagatttcgataataggctggtaaaccactttgtagaagaatttaagcggaagcacaagaaggacatctctcaaaacaaaagggcggtacgccgactcagaacggcatgtgagcgggccaagcgaacactcagtagctcaacacaagcttcattggagattgatagtctgttcgagggaattgatttttacacctccattacgagggccagattcgaagaactgtgttccgacctttttcgttcaacacttgagcctgtcgagaaagcgcctcccgcatctcctcgatgtagatcttgttgcagaacaagttcgactggtgctacctag

SEQ ID NO: 119556 - DNA, 1926 bp, synthetic construct
  misc_feature 1..1926: note = Description of Artificial Sequence: Synthetic coding sequence
  source 1..1926: mol_type = other DNA
atggccaaagcggctgcgatcggcatcgatctggggactacctattcctgcgtaggagtgttccagcacgggaaagtggaaatcatcgcaaatgaccagggaaaccggaccactccttcctacgtggcattcactgacacggaacggctcataggggacgccgccaagaatcaggtagcccttaatccgcagaacactgtgttcgatgcaaagaggctgattggtcgcaagtttggagatccagtagtgcagtccgacatgaaacactggcctttccaagtcattaacgatggagataagcccaaggtacaagtgagttacaagggggaaacgaaagcgttctacccggaagagattagtagcatggtgctgaccaaaatgaaggagatcgccgaagcttatctgggctaccccgttaccaacgcagtcatcaccgtgccagcatacttcaacgatagccagagacaggcaactaaggatgcaggtgtcattgcaggactgaacgtgctgcgcattatcaacgaacctactgccgctgccattgcgtacggactggatcgaacaggaaagggagaacggaacgtgctgatctttgacctgggggggggcacttttgacgtgtctatcctgacaatcgacgatgggatctttgaagtgaaagctactgccggggatactcacctgggtggggaggatttcgacaatcgtctggtcaatcactttgtggaggagtttaagcgtaaacataaaaaggacatatcgcagaacaaacgagccgtgcgcaggctgcgcactgcctgtgaacgcgccaagagaaccctgtctagtagtacacaagccagcttggagattgattcgttatttgagggcattgacttctacacatcaatcacacgtgcgcgatttgaagagctgtgctctgatctctttagatctactctggagccagtagagaaggcacttcgggacgcgaagctggacaaggctcagattcatgacctcgtgctggtgggcggatccacgcgaattccgaaggtgcagaagctattacaggatttttttaacggaagagacctaaacaaatccatcaacccagacgaggccgtggcgtatggtgccgcagttcaagccgccattctgatgggggacaagtccgagaatgtgcaagatcttctactccttgacgtggcccccctgagtctgggccttgaaacggccggcggtgtgatgacagctctgatcaagaggaatagcacgatacccacaaagcagacccaaattttcaccacgtatagtgataaccagccaggcgtgctgatacaggtgtatgaaggcgagagggccatgacgaaggacaacaacctcttagggaggtttgagctgtccggaattccacccgcgccccggggtgtaccccagatagaagtcaccttcgacatagacgccaacgggatccttaacgtgactgctacggataagagcaccggcaaagccaacaagattacgatcactaatgataaggggcggctatccaaggaagagattgagcgtatggttcaagaggccgagaaatataaagctgaggatgaagttcagcgcgagagggtgagtgccaagaatgcactggagagctacgcatttaatatgaaatcggccgtggaggatgaaggactcaaagggaaaatatcagaagctgacaagaaaaaagtgctggacaaatgccaagaagtaatttcatggttagacgcaaacaccttggcagagaaggatgaatttgagcataagcggaaggagctcgagcaagtctgcaatcccatcatcagcggcctgtaccagggggcagggggacctgggcccgggggatttggggcacagggtccaaagggaggcagcggttctggccctactattgaagaagtcgactag

SEQ ID NO: 119557 - DNA, 1926 bp, synthetic construct
  misc_feature 1..1926: note = Description of Artificial Sequence: Synthetic coding sequence
  source 1..1926: mol_type = other DNA
atggcaaaagcagcagccataggcattgacttggggactacttattcctgcgtcggagttttccagcatggcaaggtggagatcatagccaatgaccaagggaacagaacgactccctcctatgtggctttcaccgacacagagagactgattggtgacgctgctaaaaatcaagtcgctctgaacccccagaataccgtgttcgatgccaaaagactgattggtcgcaaattcggggatcctgtggtccagtccgatatgaaacattggcctttccaggtgattaacgacggcgacaagcctaaggtccaggtctcatacaagggcgaaactaaggccttttaccccgaggagatatcttcaatggtgctgaccaaaatgaaagagatcgcagaagcttatttgggttatcctgtgacgaacgccgtcataactgtaccagcctacttcaacgacagtcagaggcaagccacaaaggatgccggagtgatcgccggcttgaatgtgctacggatcatcaatgaacctacggctgccgctattgcatacggcctcgaccgcactggcaaaggggagcgcaacgtgctgatattcgacttaggaggtgggacctttgacgtgtctatccttactatcgatgatggcattttcgaggtcaaggcaactgccggagatacacatctgggcggtgaagactttgataataggctggtgaatcactttgttgaggaattcaagcgtaaacataaaaaagatatttctcagaacaaacgggccgtccgccgcctgcggaccgcatgcgaaagagcgaagaggaccctgagctcttcaacccaggcttcactggaaatcgatagcctgttcgagggcatagacttctatacctcaatcacacgcgcccgctttgaggaactctgctctgatctctttcgctcgactctggaacccgtcgagaaggcccttcgcgacgcaaaattggacaaagctcagatccacgatctggtgcttgtcgggggcagcacgagaattccaaaggtgcagaagctgctgcaagatttttttaatgggcgagatctgaacaagagcattaatcctgatgaagcggttgcttatggagccgccgtgcaggctgctatcttaatgggcgacaagtcggagaacgttcaggacttactgctgctcgacgtggccccgctgagcctgggccttgagacagctggcggagtcatgaccgctctaatcaagcggaacagcactattccaacgaaacagacacaaattttcacaacctactcggacaaccaaccgggggtgctgatccaagtatatgagggagagcgagctatgaccaaggataacaatctgctgggcaggtttgaactgtcaggcatcccccccgccccgagaggcgtgccacagatcgaggtgaccttcgatatcgacgccaacgggatcctcaacgttactgccacagataagtctacagggaaggctaataaaataaccatcactaacgacaaagggagactttccaaagaagaaatcgagaggatggtacaggaagctgagaagtacaaagcagaggatgaggttcagcgcgagagagtatccgctaaaaacgcccttgaatcttacgcatttaatatgaagtctgcagtggaggatgaaggattgaaagggaagatctccgaggcagataagaagaaggtactcgataaatgccaggaggtgatttcgtggttggacgctaacaccctagccgaaaaagacgaattcgagcacaaaaggaaggagctagagcaggtgtgtaatcccataatttccggtctttaccagggggctggcggtcctggtccaggcgggtttggcgcccagggccccaaaggcggatccgggtccggaccgacaatcgaggaagtcgactag

SEQ ID NO: 119558 - DNA, 1926 bp, synthetic construct
  misc_feature 1..1926: note = Description of Artificial Sequence: Synthetic coding sequence
  source 1..1926: mol_type = other DNA
atggccaaagctgcagcaattggaatcgaccttgggacaacatactcctgtgttggcgtattccaacacggcaaggtcgagattatcgccaatgaccagggaaaccgaacaactcccagctacgtggcttttactgacacagaacggctgataggggatgccgccaaaaaccaagttgccctcaatcctcagaacaccgtgtttgacgctaagcggcttatcggtcgtaagtttggcgaccctgtggtgcagtcagatatgaaacactggccctttcaagttatcaatgatggagataaacccaaggtgcaggtctcttacaaaggggagacgaaagcattctatcccgaggagatatcatctatggttcttacaaagatgaaagagattgccgaagcttacctgggataccccgttaccaatgcagtgattacggtgcctgcatactttaacgacagccagagacaggctactaaggacgcgggcgttatagccggccttaacgtcttaaggattatcaacgagcctaccgcagcagccatagcgtatggactcgatagaaccggcaagggggaacgcaacgtgttgattttcgatctgggcggtgggactttcgatgtgagtatcctcaccatcgacgacggaattttcgaggtgaaggcaacggctggcgacacacacctgggcggcgaggattttgataatagactggtaaatcattttgtggaggaatttaagaggaagcataagaaagatatcagccagaataagcgtgctgtccggagactcaggactgcatgtgaacgtgcaaaaaggactttgtctagcagtacacaggcatcgttagagatcgatagcctgttcgaagggattgacttttacacatctattacccgagcacggtttgaagaactgtgttcggacttgttccgatcaaccttggaaccagtggagaaagccctcagagatgctaaactcgataaggcacaaattcacgatctggtactggtcggcggatctaccagaatccccaaagtacagaagctgctgcaggacttctttaacgggcgagacctcaacaagtctataaaccctgacgaagcggtcgcatatggggctgctgtccaggcagcgattttgatgggggacaaatccgagaatgtccaggaccttctccttctcgatgtagcccctttgagcctgggcctggagaccgccgggggtgtgatgacagcactgatcaaaaggaactcaacaattccaaccaagcaaacacaaatctttacgacttactctgacaatcagcccggtgtgctcatacaggtgtacgaaggggagcgtgccatgactaaggataacaatctgttggggaggttcgaactgtccggcatccctcccgccccgagaggcgtgccacagatagaagtgaccttcgatattgacgcaaatggtatactgaacgtgacggcaaccgacaagtcaacggggaaggccaacaaaattacaatcacaaacgataagggccgactctctaaggaagagatcgagcgaatggtgcaagaggccgaaaagtataaagcagaagatgaggtgcagcgggaacgtgtatcagccaaaaatgcactggagtcatacgctttcaacatgaagtccgcagtggaggacgagggactgaaaggcaagatctccgaggcggacaaaaaaaaggtgctggacaagtgtcaggaagttatcagctggctcgacgctaatacattggctgaaaaggatgagtttgagcataagagaaaagaactcgaacaggtctgtaatcccatcatatccgggctctaccaaggcgcgggcggacctgggccaggagggtttggggcacaggggccaaaaggcgggtccggtagtggtcccacaatcgaagaggtggactag

SEQ ID NO: 119559 - DNA, 699 bp, synthetic construct
  misc_feature 1..699: note = Description of Artificial Sequence: Synthetic coding sequence
  source 1..699: mol_type = other DNA
atggcgaaagccgccgcaataggcattgaccttggtaccacctacagttgcgttggcgtgttccagcacgggaaagtcgagattatcgcaaacgatcagggaaataggactacccctagctacgtggccttcacagacacggaacggctgatcggcgatgcaggtgtcatagctggcctgaatgtgctgcggatcatcaatgagcccaccgccgctgctatcgcgtatgggttggatcggacaggcaaaggggagcggaacgttttgatttttgatctggggggcggaacctttgatgtatctatactaactattgacgatgggatcttcgaagtgaaggctaccgcaggagatactcatctcggtggggaagactttgacaaccgcttggttaatcattttgtagaagagttcaaacgaaagcataagaaggatatcagtcagaacaagagagcagtccggagattgcggaccgcatgtgagagagcaaagaggaccttgagttcgagcacacaagccagcttggagatagactcattgtttgaaggcatcgatttctataccagcatcacgcgggccaggtttgaagaactgtgttctgacctttttaggtccaccctagagcctgtggagaaggccccccccgctagcccccggtgccggtcatgttgccgcactagcagcaccggtgccacctag

SEQ ID NO: 119560 - DNA, 1926 bp, synthetic construct
  misc_feature 1..1926: note = Description of Artificial Sequence: Synthetic coding sequence
  source 1..1926: mol_type = other DNA
atggcgaaagccgctgctattggcatcgacctgggaacgacttactcctgcgtgggcgttttccagcatggaaaagttgagatcatcgctaacgaccaggggaaccgcacaacacctagctatgtcgccttcacagacacggagcggcttataggcgacgccgcaaagaatcaagtagcactgaaccctcagaacacagttttcgacgccaagagactaatcggcagaaaatttggtgacccagttgtgcagagtgacatgaagcactggccgtttcaagttattaacgacggtgataagccaaaggtacaggtgagctataagggcgaaacaaaagcattctaccccgaagagatcagctcaatggtcctcaccaagatgaaagaaatcgcagaggcatacctgggttaccctgtcacgaatgccgtcatcacagtgccagcatattttaatgatagccaacgacaagctacaaaagacgccggcgtgatcgcgggactaaacgttcttcgtatcattaatgaaccgacagccgcggccatcgcatacggactggaccgcacaggaaaaggcgaaagaaatgtcttaatttttgacctgggcggagggacttttgatgtcagcatacttacgatcgacgacggtattttcgaagttaaggctacagcgggcgacacccatttaggtggagaggacttcgataacagactggtaaaccacttcgtggaagagttcaaaagaaagcataagaaggatatatcacagaacaagcgcgccgtgcgacgcttgcggacagcctgtgaaagagctaaaagaacactcagctcctcgactcaggctagcctcgagattgactcgctatttgaaggaatagacttctatacatctatcacccgagccagattcgaggagctatgttctgacttgttccgatctactttggaaccagttgagaaggctttgagagacgccaaactcgacaaggcccagatacacgacttggtcctagtcgggggtagcaccagaatcccaaaggtccagaaactccttcaggacttcttcaatggaagagatcttaacaaaagcatcaatcccgatgaagctgtcgcatacggtgcagcagtgcaggcggcgattcttatgggcgataaatcagaaaatgtgcaggacctgctgctgttagacgtcgcccctttaagcctgggacttgagaccgcgggcggcgtcatgactgctctcatcaagcggaattcaaccattcctaccaagcaaactcagatatttaccacttattcagataaccagccaggcgtgcttattcaggtctacgaaggcgagcgggccatgaccaaagacaataacctcctggggcgttttgaacttagtggcatccctcccgcaccaaggggggttccgcagattgaggtgacgttcgacattgatgctaacggaatcctgaacgtgactgcaaccgacaaaagcacaggcaaagcaaacaagatcactatcacgaatgacaagggtagactaagtaaagaagaaatcgaacgcatggtccaggaggctgaaaagtataaggcggaggatgaagttcaacgcgaaagggtatctgcaaagaatgctctcgaaagttacgccttcaatatgaaaagcgcagtcgaagacgaaggattgaaggggaagatttctgaggctgacaaaaagaaggtcttggataaatgccaggaggtgatctcttggttggatgccaatacacttgctgagaaggacgaatttgaacacaagcggaaagagctggagcaggtttgtaacccgatcatttccggactctaccaaggggccggcgggccaggccccgggggttttggcgcacagggacccaagggggggagcggttctgggcccactatagaagaggtggattag

SEQ ID NO: 119561 - DNA, 1926 bp, synthetic construct
  misc_feature 1..1926: note = Description of Artificial Sequence: Synthetic coding sequence
  source 1..1926: mol_type = other DNA
atggccaaggcagccgccatcggaatcgacttgggcactacctattcctgcgtaggagtgttccaacatggaaaagtcgaaatcatcgccaatgaccaggggaacaggactactccctcgtatgtggcctttacggacactgagcgcttgatcggagatgcagctaagaaccaggtggccttgaatccccagaacactgtcttcgacgcaaagcgcttgatcggcaggaagtttggagacccagtcgtgcaatcagacatgaagcactggccattccaggttatcaatgacggcgacaagcctaaggttcaggtctcttacaagggagaaacaaaagcgttctatccagaggaaatatctagcatggtcctgaccaaaatgaaggaaatcgccgaagcttacctcggttatcccgtcacaaacgctgtgattacggttcctgcttattttaacgacagccagagacaggcaactaaggacgccggagtaatagctggactgaacgttctgagaataattaatgagcctacagccgcagcaatcgcatacggactggataggaccggcaagggcgagcgcaacgtcttgatttttgatctgggtggcggtacattcgacgtgagtatcctcaccatcgatgatggtatctttgaagtcaaagcaactgccggtgacactcatctgggaggcgaggatttcgacaaccggttagtgaaccactttgttgaggaatttaagcgtaaacacaagaaggatatatcccaaaacaagagggccgtgcgccgactgcggacggcgtgcgagagggcaaaacgtacactgtcatccagcacacaggcaagcctggagatcgactctctttttgaaggtatcgatttctacacctcaatcacacgagctagatttgaggagttgtgcagcgacctgtttcgcagcaccctggaacccgtggaaaaggctctgcgtgacgcgaagcttgacaaggcgcagatccatgacctggttttggtagggggctctacaaggataccaaaggtgcaaaaacttctgcaggacttctttaacggcagagatctaaataagtcgataaatccagacgaggccgtcgcatacggcgccgctgtgcaggcagccatcttaatgggtgacaaatccgagaatgtccaagatctgttacttctggacgtggcccctctgagcttggggcttgaaactgctggaggagtgatgactgccctgatcaagcggaacagcactatcccgaccaagcagacgcaaatttttacgacctattccgataatcagccaggcgtgctcatacaagtgtacgaaggcgagagggctatgacaaaggataacaacctgctcggccggtttgagttgagtggcattccccccgccccgagaggtgtaccacagatagaggttacctttgacatcgatgccaacggcattctaaatgtcacggctactgataagtcaacaggtaaagcgaacaagattaccatcaccaacgataaaggaagactgtcgaaggaagagattgaacgcatggttcaggaagctgagaagtacaaggccgaggatgaagtacagagagagcgcgtttccgcgaaaaacgcactcgagtcatatgcttttaatatgaagagcgccgtagaggatgaaggcctgaagggcaaaatatccgaggcagacaagaagaaggtcctcgataagtgccaggaggtgattagctggttggatgcaaacaccctggcagaaaaagacgaatttgagcataaacggaaagaactggagcaggtttgcaatccaattatcagcgggttataccagggggcaggtggccccggcccgggaggattcggcgcgcaggggccgaaggggggcagcgggtccggtcccactatcgaggaggtcgattag

SEQ ID NO: 119562 - DNA, 2127 bp, synthetic construct
  misc_feature 1..2127: note = Description of Artificial Sequence: Synthetic coding sequence
  source 1..2127: mol_type = other DNA
ctgagatcctgctgtgagggacccctgcgactgagcagggtgaccccagctgtgccccgactgagcagagccaatttgtgtggttgccggcaccggcgtgtggaattccccgcctttcggcgcactgagctcttgagccgcattccctccgcggtaagcagtcctcaatcccaatccggcgcacaccgccaagggacgggaatggccaaagctgccgccatcggaattgatctgggcaccacatattcttgcgtaggggtctttcagcatggtaaggtcgagatcatcgccaatgaccaaggcaacagaaccaccccctcctatgtggccttcactgatactgagaggctgattggcgatgcagcaaaaaatcaggtagcattaaatcctcagaacaccgtattcgatgccaaaaggctcatcgggagaaagttcggtgatcctgtggtgcagtctgacatgaagcactggccattccaagtaattaacgatggggacaagcctaaagtgcaggtctcatataaaggtgagacaaaggcattttatcctgaggagatttcctcaatggtcctgacgaagatgaaagagattgcagaggcatatttgggctaccctgtaaccaacgcggttataaccgtgccggcgtactttaatgatagtcagagacaggccacaaaagacgcaggagtaatcgctggcctgaatgtgctgcgaatcatcaatgagcctacagcagcagccatcgcttacgggctggaccgaacaggcaaaggagagaggaatgttttaatatttgatctgggggggggcacgtttgacgtgtccatcttgaccattgatgacgggattttcgaagttaaagctaccgcaggcgacacccatctcggtggggaggatttcgacaacagactagtgaatcatttcgtagaagagtttaaacgcaagcacaagaaggatatctcccagaacaagcgggctgttcgccgcttaaggactgcctgcgagagagccaagaggacactctccagtagcacacaggctagccttgagatcgactctctttttgaagggattgatttctacacgagtattacaagagcccgctttgaagaattatgctcagaccttttcagatcaacactcgaaccagtggagaaagctcttagagacgcaaaactggataaggctcagattcacgatctcgtcttggtgggagggagtacaaggattcccaaagtccaaaaactgcttcaagacttctttaatggtagagatctgaataagtctatcaacccagatgaagctgtggcttatggggcagcagtgcaagcagctatcctgatgggagacaaatcagagaatgtgcaggatcttctcctgctcgacgttgcccctttaagtctcggactagagacggctggcggagtcatgactgccctcatcaaaaggaatagtacaattccgacgaagcagactcagattttcaccacctacagtgacaatcagcctggagtcctgatacaagtttacgagggcgagagggctatgaccaaggataacaacctgctgggtagatttgagctctccggcatccccccggcgcctaggggcgtgccccagatcgaggttaccttcgatatcgacgccaatggaattctgaacgttacagccactgacaaaagcaccggtaaagcgaataaaataacaattacgaatgacaaagggcggctgagtaaagaggaaatagaacgtatggtgcaagaggcagagaaatacaaggcagaagatgaagttcaacgggaacgcgtgtctgccaaaaacgccctggagtcttatgcctttaacatgaagtctgctgtcgaggacgaaggactgaaagggaagatcagcgaggccgataagaagaaagttctggataaatgccaggaggtgatcagttggcttgacgccaacaccttagccgagaaggacgagttcgaacataaacggaaggaattggagcaagtgtgtaacccgataatctcggggttatatcagggcgctggaggccctggtccgggcggtttcggtgcccaagggcccaaggggggctctggtagcggccccacgattgaagaggtggactag

SEQ ID NO: 119563 - DNA, 1653 bp, synthetic construct
  misc_feature 1..1653: note = Description of Artificial Sequence: Synthetic coding sequence
  source 1..1653: mol_type = other DNA
atggcgaaagccgccgccattgggatcgacctgggtaccacctactcatgcgtgggtgtctttcagcacggcaaagttcaaattagttcgatggtgttaacaaaaatgaaagagatagcagaggcttacctaggctatccggtgactaatgcagtgattactgttcctgcgtactttaatgactctcagcgacaggcaactaaagatgccggggtcattgccggcttgaacgtactgcgcatcattaatgaacccactgccgcagccatcgcttatggcctggacagaaccggaaaaggggagaggaacgtgctgattttcgacctgggcgggggtaccttcgatgtgagcattctgacaattgacgacggcatcttcgaagtcaaggcgaccgcgggggacacacatctggggggcgaggactttgacaatcggttagtgaaccactttgtggaagaatttaagcggaaacacaaaaaggatatctcacagaataaacgagcggtccgcagactgcggaccgcctgcgaacgtgccaagcgtaccctatcatcaagtacacaggcaagcctcgagatcgatagccttttcgaggggattgatttttacacgagcatcacccgagcacggtttgaagagctttgcagtgacctcttccgcagtaccctggaacctgtcgaaaaagctctgcgcgatgctaagctggacaaagctcaaattcatgacctggtcctcgtcggcgggtcaactagaatccctaaggttcagaagctgctgcaggatttttttaacggaagggatctgaataagagcatcaacccagatgaagcagtagcctacggcgccgctgtgcaggcagccatcctgatgggcgacaagtcagagaatgtgcaggacctgctcctcctcgatgtggctccccttagcttgggtctggagacggcgggtggtgtcatgaccgctctcatcaaaagaaattctactatccccacgaaacagactcagatcttcactacctactctgataatcagcccggggttcttattcaggtctatgaaggcgagagggccatgacaaaagacaacaacttgttaggtagatttgagctcagtggcattccgcctgctcctcgtggagtgccacaaattgaagttaccttcgacatcgacgctaatgggatcctcaacgtcactgccaccgataaaagcactggcaaggcaaataagatcaccattacgaatgataaaggccgcttgtctaaagaagaaatcgaaagaatggtgcaggaggccgaaaagtacaaagcagaggacgaagtacagagagagagggtatccgccaagaacgccctcgagtcttacgcctttaatatgaagtcagcagtggaggatgaaggccttaaagggaaaatcagcgaagccgataagaaaaaagtcctggacaaatgccaggaggtcatttcctggctcgatgccaataccttagccgagaaggacgagttcgagcataaacgaaaagagctggagcaggtgtgtaatcctattatttcaggcctgtatcagggagcaggcgggcccggtcctggcggattcggggctcaaggccctaagggaggttcggggtcaggcccaacgattgaggaggttgactag

SEQ ID NO: 119564 - DNA, 1875 bp, synthetic construct
  misc_feature 1..1875: note = Description of Artificial Sequence: Synthetic coding sequence
  source 1..1875: mol_type = other DNA
atggccaaggccgccgctatcggtatagatctcgggacaacttactcgtgtgtgggagtattccaacatgggaaggtcgagattatcgctaatgatcaagggaaccgcaccacaccttcttacgtcgctttcacggatacagaaaggttaatcggggatgcggcaaagaaccaagtcgccctaaacccccctgtcgtgcagagtgatatgaaacattggcccttccaggtgatcaacgatggcgacaagcctaaggtgcaggtcagttataagggggagaccaaggccttctacccagaagaaatttcctccatggtgctcaccaaaatgaaagagatcgccgaggcttatctcggttaccctgtgacgaatgctgtgattacagttcccgcctacttcaacgacagtcagaggcaggccactaaggatgcaggtgttattgccgggctcaatgtcctcagaatcattaacgaaccgaccgcagccgccatcgcatatgggttggatcgaacaggaaagggtgaaagaaacgtgctcatcttcgacctcggcggtggcacttttgatgtttcaattctcaccattgacgacggaatttttgaggtcaaggccaccgcaggggacacccacttgggcggggaagactttgacaaccggttggtgaaccactttgtggaagaattcaaaaggaagcacaaaaaagacataagtcagaacaaaagggcggtgaggaggctgcgcacagcctgcgagcgggctaaacgcacattgtccagttccacccaggcctctttggaaatcgatagcctcttcgagggcattgatttttataccagtattacgagggcaagattcgaggagctctgcagtgatctcttccgctctactcttgaaccagtggagaaagctctgagagacgccaagctcgacaaggctcagatccatgatctggtcctagttggaggcagcacccgcatccccaaggtccagaagctcctccaggactttttcaatggtagagacctgaacaagtcaataaacccagacgaggccgtggcttatggggccgccgtgcaggccgctattctaatgggagataaatccgaaaacgttcaggacctgctgctactggatgtggcgcctctgtctctgggactggagacagcagggggtgtgatgaccgctctcataaagcggaattctaccataccaaccaaacagacgcagatcttcaccacctattctgacaatcagccgggcgttctgatccaggtctacgagggcgagcgcgcaatgacaaaagataataatctgcttggcagattcgagctgagcgggattcccccggccccccggggggtgcctcagatcgaagtgaccttcgacatagacgccaacggaatcttgaatgtaacagcgaccgataagtccaccggaaaagcaaataagatcacaatcacgaatgataagggacgactcagtaaggaagagatcgagcgtatggtgcaagaggcagaaaagtacaaggcagaggatgaggttcagcgcgaaagggtgtccgcaaaaaatgcactcgagagctatgccttcaatatgaagtctgcggtggaagacgaaggtctaaaaggaaaaatttctgaagcagacaagaaaaaagtgttggacaaatgtcaggaggtgataagttggctggatgctaataccctcgcagagaaggacgaatttgagcacaagagaaaagaattggaacaagtctgcaatcccataatttcagggctctatcaaggcgctggggggcctgggccaggtgggttcggagcccagggtccaaaagggggctctgggtctggccccacaatcgaagaggttgattag

SEQ ID NO: 119565 - DNA, 1857 bp, synthetic construct
  misc_feature 1..1857: note = Description of Artificial Sequence: Synthetic coding sequence
  source 1..1857: mol_type = other DNA
atggcaaaagccgcagctataggcatagacctggggactacgtattcttgcgtgggagttttccagcacggcaaagtggaaatcattgccaacgaccaggggaaccgcacaacaccttcatatgttgctttcactgatacagagcgcctaatcggtgatgcagcaaaaaatcaagttgttcaatccgacatgaaacattggccttttcaggtcatcaatgacggagacaaacctaaagtacaggtttcttacaaaggtgagacgaaagccttttatccagaggagatttcctcaatggtgctgacaaaaatgaaggagatagccgaggcctacctgggctacccagtgaccaacgccgtcatcactgtccctgcgtattttaatgactcccagcgccaggcaaccaaggatgccggggttatagccgggttgaatgtcttaagaattataaatgagcctacagctgcggcgatcgcctatggtctcgacaggaccggcaaaggcgagcggaatgttctgatcttcgatctgggcggaggcacgtttgatgtgtccatcttgactatagatgacgggatctttgaagttaaggcgacagccggcgacacccacctaggcggtgaagacttcgacaatcgcttagtgaatcactttgtcgaggagttcaagaggaaacataagaaggatatttcccaaaataaacgcgcggtgcgccggctcagaaccgcatgtgagagggccaaaagaaccttgagtagttcaacacaggcctctctggagatcgattcactcttcgaaggcatcgatttttatacttctatcactagggctcggtttgaggaactgtgcagtgatctgttccggtccactctggagcccgtggagaaagcgcttcgcgacgcgaagctggataaggctcaaattcatgatcttgttctggtgggaggatctacccggataccgaaagtgcaaaagctgctccaggactttttcaacggccgagacctcaacaagagtatcaatcccgacgaggccgtggcctatggagcagcagtgcaggccgccatcctgatgggtgacaagtctgagaacgtgcaggacctacttttactggacgtggcaccactctccctggggctcgagactgctggcggcgtcatgaccgctctgatcaagcggaattctaccatccccactaagcagacccaaatcttcaccacttactccgataatcagcctggcgtcctaatacaagtgtacgaaggggagcgcgccatgactaaggacaacaatctgctggggagattcgaattgtccggcattccaccagctccccgaggggtacctcagatcgaggtgactttcgatatcgatgccaatggtatccttaacgtgactgccacagataaatcaacaggaaaggccaacaaaattaccataacaaatgacaagggccgcctgtccaaagaggagatcgaaagaatggtccaggaggcagagaagtataaggctgaggacgaggttcagcgagaacgagtttccgctaagaacgccctggaatcttatgcattcaatatgaagtcagccgtggaagatgaaggcttaaaaggaaaaattagcgaagccgataaaaaaaaggtgttggacaagtgtcaggaggtcatctcatggttagatgccaacacactcgcggagaaggacgaattcgagcataagcggaaagaactcgagcaggtttgcaatccaatcatctctggtctgtatcagggcgctggtggaccggggccaggagggtttggcgctcagggcccaaagggtggctctggaagtggcccaaccatcgaggaggtcgattag

SEQ ID NO: 119566 - DNA, 1857 bp, synthetic construct
  misc_feature 1..1857: note = Description of Artificial Sequence: Synthetic coding sequence
  source 1..1857: mol_type = other DNA
atggccaaagccgccgctataggaatcgacctcgggacaacgtattcttgcgtaggggtttttcaacatggtaaggtcgagatcatcgccaatgaccagggcaacagaactactccaagctacgtggccttcactgacacggagagactcatcggggatgcggcaaagaatcaggtagtccagagcgacatgaagcactggcccttccaggtgatcaacgacggcgataaaccaaaggtccaggtctcatacaagggagagactaaggctttctaccctgaagaaattagttcaatggtcctcaccaaaatgaaagaaattgcggaggcctacttggggtacccagtcactaatgccgttattactgtgccagcatactttaatgatagccaacgacaggccaccaaagatgcaggcgtgatcgccggcttaaatgtactccgaatcatcaacgagccgaccgctgctgctatcgcatatggactcgatcgcaccggcaaaggcgagaggaatgttctgatctttgatttagggggcggaacttttgacgtgtctatcctgacaattgatgatggcatttttgaggttaaggctaccgctggagacacacatctaggcggtgaagactttgataatcgcttggttaaccacttcgtcgaggagtttaagcgcaagcataagaaagatatctcacaaaacaaaagagcggtccgtagactcaggacagcatgtgaacgtgccaaaaggacactatcttcttccacccaagccagcctggagatcgactctctgtttgaaggcatcgacttctacacttcaataacaagagcccggttcgaagagttgtgctctgacctgtttcggtctactcttgagccagtggaaaaggcattgcgcgacgcgaagcttgacaaagcacagattcacgacctggtgctggtgggcggctctacccgtatccctaaagtccagaaactcctgcaggacttcttcaatgggcgcgatttgaacaaaagcataaatccagatgaggctgttgcttacggagcagccgtccaggccgccatcctcatgggcgataagagcgagaatgttcaggatttgctgctgctcgatgtggctccactgtcactcggactggaaacagctggcggggtcatgaccgccctcatcaagagaaatagcaccattccgaccaagcaaacccaaatatttaccacttacagcgataaccagccaggcgtgttaatccaggtgtacgagggcgaacgcgccatgaccaaggacaataaccttttgggtagatttgagttgtcaggcatcccacctgcgccaagaggggttccgcaaatcgaggtgacattcgacattgacgcaaacggcatcttgaacgtgactgcaaccgacaagtccaccggcaaagccaataaaattacgattacaaacgataagggccgtctttccaaggaagagatcgaacggatggtccaggaagcagaaaagtataaggccgaggatgaagtccaaagggagagagtgtcagctaagaacgcactggaaagctatgcttttaatatgaagagcgccgtggaagacgagggtctgaaaggtaagataagcgaggccgacaagaaaaaggttctcgacaagtgtcaagaagttataagttggctggatgccaatactctggcagaaaaggacgagtttgagcacaaaaggaaggaattggagcaagtgtgtaaccccatcatttccggactctatcagggagctggcggccctggacccgggggcttcggcgcacaagggcctaagggcgggtcgggctctgggcctaccatcgaagaggtggactag

SEQ ID NO: 119567 - DNA, 1653 bp, synthetic construct
  misc_feature 1..1653: note = Description of Artificial Sequence: Synthetic coding sequence
  source 1..1653: mol_type = other DNA
atggctaaagcagctgccatcggaattgatctgggcaccacctattcatgtgtgggcgtgttccagcacggcaaggtacaaataagcagtatggtgctgaccaagatgaaggagattgccgaggcatacctcggttatcccgtgactaacgcagttataacagtgccggcatacttcaacgactctcagcgccaggcgacaaaagacgctggtgttatagctggcctaaatgtcctcaggatcattaatgagcctactgccgccgcaattgcctatggattagaccggacaggcaaaggcgagcgcaacgtactgatttttgatttgggcggcgggacttttgacgtcagcatcctgactatagatgatggtatttttgaggtcaaggcgacggccggcgatactcacctcggcggtgaggacttcgataatcggctcgtgaaccatttcgttgaagaatttaagcgcaagcataagaaggacattagtcagaataagcgtgcagtgcggagactccggaccgcttgcgaacgcgccaaaagaaccttgtcttcaagtacccaagctagtctggagatcgactccttatttgagggtattgacttttacacaagtatcactagggctaggtttgaagaactttgctcggacctgttcaggtcaacccttgagcctgtggagaaagcgctgcgtgatgctaagctcgataaagcacaaatccacgacctggtccttgtgggaggatctacgagaattcccaaggtgcaaaaacttctgcaggacttcttcaacggacgggatctgaataagtcaatcaacccggatgaagccgtagcttacggagccgcagtgcaggctgcaattctgatgggtgacaagagcgaaaacgtgcaggatctcttactgctcgatgtcgccccgctcagcctcgggctggagactgctggtggagtgatgacggcgttaatcaagagaaacagcacaattcctactaaacagacccaaatattcacaacctactctgacaatcagcccggggttttgattcaggtctacgagggagagcgggccatgacaaaagacaataacctgctgggacggtttgaactctctggaattcctccagcgccccgcggcgttccacaaatagaagtgacatttgatattgatgccaacggtatactgaatgtcacagctaccgataagagcacgggaaaggccaacaagataacaataacgaacgataagggaaggctgtctaaagaagaaatcgagaggatggtccaggaggccgagaaatacaaggcagaggacgaggtacagcgagagcgcgtaagtgctaagaacgctctagaatcctatgctttcaacatgaagtccgcggtagaggatgaagggctgaagggaaaaattagtgaagcagataaaaaaaaagtgctcgataaatgtcaggaggtgattagctggctcgatgccaatactttagcagaaaaagacgagttcgaacataagcgcaaggaactggaacaggtctgcaaccctattatctcagggctttatcaaggggccggggggcccggcccaggcggctttggagctcagggccctaaagggggctcggggtctggtcctaccatcgaggaggtcgattag

SEQ ID NO: 119568 - DNA, 1857 bp, synthetic construct
  misc_feature 1..1857: note = Description of Artificial Sequence: Synthetic coding sequence
  source 1..1857: mol_type = other DNA
atggcaaaagccgcagcaattgggattgatctgggtactacctattcctgcgtgggggtgttccaacatggaaaggttgaaataatcgcaaacgatcagggaaatcggaccacacctagttacgtggctttcaccgacactgagagactgatcggagacgccgctaagaaccaggttgttcagagtgacatgaaacactggcctttccaggtcattaacgatggcgacaagccgaaggttcaggtgtcttacaagggggagactaaagctttctatcccgaagaaattagcagcatggttttgactaagatgaaggaaattgcggaggcatatctgggctaccccgtgactaacgcagtcatcacggtgccggcatatttcaacgattcccagcgccaggcaacaaaagacgcgggcgtgattgctggcctgaatgtcctgcgcatcatcaatgagcctactgccgccgctatcgcttatggcctggacagaaccggaaaaggggagcgcaatgtcctcatttttgacctgggcgggggtacatttgacgtaagcattttgacaatcgatgatgggatctttgaagttaaggccactgccggcgatacacaccttggaggggaggatttcgataatcgtttagtgaaccatttcgttgaggagtttaaaaggaaacataagaaagacatttcacagaacaagcgagccgtgcgcagactgagaaccgcttgtgaaagagccaagcggaccttgagctcgagcacgcaggcttctctggaaattgatagtctgttcgaaggaattgatttttacaccagcattacacgagctagatttgaggagctgtgctctgatctgtttcgctcaaccctagagccggttgaaaaagcactacgtgatgccaaattagataaggcccagatccacgatctggtgcttgttggcggtagcacgaggatacccaaagtacagaagttgctgcaggacttttttaatggtagggacctcaataagtcaattaacccagacgaggccgtggcttacggcgcagcggtgcaggccgccatacttatgggtgataaaagtgagaatgtgcaggatctgctgctgctggacgttgctcccttgtcactgggccttgagacagcgggcggcgtgatgaccgccctgattaagcgcaactcaaccatcccgacaaaacagactcaaattttcactacatattcagacaatcagccaggcgtcttgatccaggtttatgagggcgaacgggccatgacaaaggataacaatctcctggggcgattcgagctgtccggtatacctccagcccctcggggagtgccccagatcgaagtgactttcgatattgatgccaatgggatactgaatgtgactgccacagataagagcacaggcaaggccaacaaaatcacaatcacaaatgacaaaggcaggttaagcaaggaagagattgagagaatggtccaagaagcggaaaagtataaagctgaggatgaggtccagcgagaacgcgtctctgctaaaaacgcccttgaatcctacgcatttaacatgaaatccgccgtggaggatgaaggactgaaaggaaagatttccgaagcggacaagaaaaaagtgctggataagtgccaagaggtgatttcttggctggacgctaataccctagccgagaaagacgaattcgagcacaagagaaaggagctggagcaggtctgcaatcccattatttcaggcctataccagggagcaggcggtcccgggcccggcggatttggagcgcagggacctaaggggggatccggatctggcccaacaatagaagaagtcgattag

SEQ ID NO: 119569 - DNA, 1653 bp, synthetic construct
  misc_feature 1..1653: note = Description of Artificial Sequence: Synthetic coding sequence
  source 1..1653: mol_type = other DNA
atggcgaaggccgcggcaatcggcattgacttagggacaacctactcctgcgtgggagtgtttcagcatggcaaagtccagatttccagtatggtgcttaccaaaatgaaggagattgctgaggcgtacctgggctaccccgtgaccaacgccgtcattacagtgcccgcttactttaacgatagccagcggcaagccacaaaggatgctggcgtgatcgctgggctgaatgtgctgcgtattattaacgagccgacggcagccgccatcgcgtacggcctggacagaacggggaagggggaaaggaacgtgctgatcttcgatctgggtggcggaaccttcgatgtctctatcctcaccatcgacgatgggatcttcgaagttaaagcgaccgctggagacactcatcttgggggggaagactttgacaatcgcctggtcaaccactttgtggaagagtttaagcgcaagcacaagaaggacatatcacaaaacaagcgcgccgtgcgtcgtctgaggactgcctgcgaaagagctaaacgcacgctgtcatctagcacccaggcgtcactggagatagacagcctgttcgagggaatcgacttctatactagcatcacacgcgctcgattcgaagaattgtgctcagacctattcagaagtactcttgaacctgttgaaaaagcgctgagggatgctaagctagacaaggcacaaatccacgatctcgtgctggttggagggtctacacgtattcctaaagtacaaaagcttctgcaagacttttttaatgggagggatttgaacaagtcaataaaccctgatgaagccgttgcctatggtgctgccgttcaggccgctattctgatgggggacaagtctgaaaacgtgcaagaccttctgttgctggacgtggcaccgctttctttaggcctcgagacggctggcggtgtcatgaccgctcttattaaacggaattccacaatacccactaaacaaacccaaatctttaccacctacagcgataatcagccaggggttcttattcaggtctacgaaggtgagcgggccatgaccaaggacaacaacctcctcggaaggtttgagctgtctggtatacctcctgcccccaggggggtaccacagatcgaagtcacttttgatatcgacgcgaacggaattttaaatgtgacagctacagacaagtcaacgggtaaggctaacaagatcaccatcacaaatgataaaggcagattgtccaaagaagagatcgagagaatggttcaggaagccgaaaagtataaggctgaggatgaggtgcagcgggagcgcgtaagtgccaagaacgcactggagtcatatgccttcaacatgaagagtgcagttgaggacgagggcctgaaggggaaaatctccgaggccgacaaaaagaaggtgcttgacaaatgccaggaagttattagctggcttgatgcaaataccctggcggagaaggacgagttcgagcacaagcgcaaggaattagagcaggtatgcaaccccattatatccggtctgtatcagggggcgggcggcccagggcctgggggttttggggcccaggggcccaaaggcggttcaggcagtggcccaacgatagaagaggtggattag

SEQ ID NO: 119570 - DNA, 1761 bp, synthetic construct
  misc_feature 1..1761: note = Description of Artificial Sequence: Synthetic coding sequence
  source 1..1761: mol_type = other DNA
atggcaacagccaagggtatcgcaatcggtatagacctgggcactacatactcctgcgtgggcgtttttcagcacggtaaggttgagatcatagccaacgaccagggcaatcgcactaccccaagttatgtggccttcacggatactgaaagactgattggagacgcggcaaagaaccaggtagctatgaatcctcaaaacaccgtgtttgatgcaaagcgtcttattggaagaaaatttaatgatccagtggtgcaggcagacatgaagctttggccctttcaagtgatcaatgactcccagcggcaggcaaccaaggacgccggcgtcattgccgggctgaatgtgctccggattatcaacgaaccaactgccgccgcaattgcttatgggttagacaagggagggcagggagagcggcacgttttgatttttgacctaggcggcggcacttttgatgttagcatccttaccatcgatgacggaatttttgaggttaaggcaactgcgggggatacacacctcgggggggaagatttcgataataggctcgtatcccactttgtcgaggagtttaagaggaaacacaaaaaggacatctcccagaataagagggcggtgcgaaggctgagaactgcctgcgagcgggcaaaacgaaccctgtcatcctccacccaagccaacctggagatcgacagcctgtacgaaggaatcgatttctacacctcgattaccagggctcggttcgaagaactttgtgccgacctatttagaggcaccctggagcctgttgagaaggctctgcgggatgctaaaatggacaaagcaaagattcacgatattgtactcgtgggaggcagcactaggatacctaaggtgcagaggttactgcaggactatttcaacgggagggatctgaacaaatccattaatccggatgaagccgtagcctatggagcagctgtgcaggccgccatactcatgggagataaaagtgagaaagtgcaggatctgcttctcttggatgtcgcacccttatcactgggcctggaaaccgctggcggagtgatgactgcccttatcaagcgtaattctaccatccctacgaagcagacccagatctttaccacgtactctgataaccaaccaggggtgctgatacaggtgtatgaaggggaacgcgctatgacaaaggacaataatctgttgggaaggttcgaccttaccggcatacctccagcccctagaggggtgcctcagatcgaagtgacttttgacatcgatgcaaatggcattcttaacgtgacagcgacagataaaagtactggcaaagttaacaaaatcactattaccaatgataagggacggttgtccaaggaggagatagagagaatggttctcgatgccgaaaaatacaaggcagaggacgaggtgcagcgcgagaagatcgcagcaaaaaacgccttagagtcctacgcgttcaatatgaaaagcgtggtgtcagacgaggggcttaaaggcaaaattagcgaatcagacaagaacaaaattttggataaatgtaatgagctcctgagctggctagaggtcaaccagctggcagaaaaagatgagttcgaccacaaaaggaaagagctggaacagatgtgcaaccctatcattactaaactgtatcagggggggtgtactggacccgcttgtggaacaggttacgtccccggacgccctgcaacgggaccgacgatcgaagaagtggactag

SEQ ID NO: 119571 - DNA, 1926 bp, synthetic construct
  misc_feature 1..1926: note = Description of Artificial Sequence: Synthetic coding sequence
  source 1..1926: mol_type = other DNA
atggcaacagctaagggcattgcgattggcatagatctgggtactacctacagctgcgttggggttttccagcatggaaaagtcgaaatcatcgccaatgaccagggtaatcgcaccaccccgtcttacgtggctttcaccgatacagaacgattaataggggacgctgctaagaaccaggtagccatgaacccccagaataccgtgtttgacgccaaacggctgattggcaggaagtttaacgacccagtggtccaagccgacatgaagttgtggcccttccaggtgatcaatgagggaggcaagccaaaagttctggtatcatacaagggtgaaaataaggctttctacccagaggaaatctcttctatggtcctcacgaaactgaaggagacagcagaagcgttcttggggcaccccgtgactaatgccgtcataacagtcccggcctactttaatgattcacagcgccaggccaccaaagacgctggggtgatcgctggcctgaacgtcctgcgtatcattaacgagcctacagccgccgccatcgcttacggcttagataaaggcggccagggagagagacatgtgcttatctttgatctcggcggcggaacctttgacgttagcatccttacaatagatgacggaatctttgaagtgaaggccactgcgggtgacactcacctggggggggaagacttcgataaccgcctggtgagtcacttcgtagaagaattcaagaggaagcacaagaaagatatttcccagaataagcgggcagtgcggaggctgcgcacggcttgtgaaagggctaagcgtacactgtcatctagcacccaagccaaccttgaaattgatagcctgtatgagggcattgacttctacaccagcataacccgggctcgtttcgaggagctctgtgccgaccttttcagaggtaccctggaacctgtcgagaaggccctacgcgacgcgaaaatggacaaagctaaaatccatgatattgtgctggtgggggggtccacaaggatcccaaaagtgcagagattactgcaggattacttcaatggccgcgatctgaataagtccattaatcctgacgaggcggtcgcatacggcgccgccgttcaggcggcaatcttgatgggtgacaagagcgagaaagtgcaggaccttctgctgctcgatgtagctcctctctccctgggacttgaaacagctggcggagtgatgactgctttgatcaagagaaattccactatccccaccaagcagacacagatttttacgacctactccgacaaccagcctggagtgctgattcaggtgtacgagggggaaagagctatgaccaaggataacaacttactgggaagatttgatctgacaggaatcccacctgcccccaggggcgttcctcagatcgaagtgacatttgacatcgatgcgaacggaattctcaacgtgaccgctactgacaagtccacggggaaagtaaacaaaatcaccatcaccaacgataaagggaggctaagtaaggaggagattgaacggatggtgctggacgccgagaagtacaaagcggaggacgaggtgcagcgagagaaaattgccgctaaaaatgcactggaatcctacgccttcaatatgaagtctgtcgtcagcgatgagggactcaaggggaagatttctgagagcgataaaaataagatcttggataagtgtaacgaactgctctcttggctggaggtgaaccaacttgcggaaaaggatgagtttgaccacaaacgtaaagagctagaacaaatgtgtaatcccattatcaccaaactttatcagggaggctgcactggaccagcttgtggtaccgggtacgtgcctggtcggcctgccactggaccaacaattgaggaggtcgactag

SEQ ID NO: 119572 - DNA, 1926 bp, synthetic construct
  misc_feature 1..1926: note = Description of Artificial Sequence: Synthetic coding sequence
  source 1..1926: mol_type = other DNA
atggccaccgcaaaggggattgcgatcggcatagacctcgggacgacctacagctgcgtcggtgtcttccaacacggcaaagtcgagattatcgccaatgatcagggcaatcgcaccacgcccagttacgtggcgttcacagatacagagaggctaatcggggacgctgccaagaatcaagtggccatgaatcctcaaaacacggtgttcgacgccaagaggctgatcggacgcaaatttaacgatcctgtagtgcaggcggatatgaagctgtggcctttccaggtcatcaatgaagggggaaaaccaaaggtgctggtgagttataagggcgagaataaagcattttatccggaggaaatttcatcaatggtgctgacgaagctgaaagaaaccgcagaagcttttctggggcatcctgtcacaaacgccgttattacagttccagcttattttaacgatagccaaagacaggctacaaaagacgctggggtgatcgcagggctaaacgtcctgagaatcataaatgaacctactgcggctgctattgcctatgggctggataagggaggccagggcgaacgacatgtgctgatctttgatcttggcggtgggacctttgatgttagtatcttgactattgatgacggcattttcgaggtaaaagcaactgctggagacactcatctgggcggggaagatttcgacaaccgcctcgtgtcccatttcgtggaagagttcaagcgcaagcataaaaaggacatatcccagaataagagggcagtgaggagacttcgaaccgcctgcgagagagctaaacgcacgctcagttcctctacacaggccaatttagagatagattcgctttacgaaggaatcgatttctacactagtatcactcgcgcaaggtttgaggaactgtgcgccgatctattccgggggaccttagagccggtggagaaagctctgcgcgacgcaaaaatggacaaggccaagatccacgatatagttctggtggggggctctaccaggattcctaaggtccagagattgctgcaggactacttcaacggcagggacctgaacaagtctatcaatcccgacgaagcagtggcctatggcgctgctgtgcaggcggctatactgatgggagataagagtgagaaagtgcaggatctcctgctgctggacgtggcccctctgagcttagggctcgagacagcggggggggtaatgaccgccctgattaagcgcaactccacaatccccacaaaacaaacacagatattcaccacatactccgacaatcagccaggcgtcctgatacaggtttacgagggcgaaagagcgatgactaaggataataacctcctgggacgttttgatctcactggcattccgcctgctccacggggtgtaccccagatcgaggtaacattcgacattgatgctaacggaatcctgaatgtgacagccatggataagagtacgggaaaggtgaataagattacaattaccaacgataagggccggctgtctaaggaggagatagagcggatggtcctcgacgccgagaagtataaggccgaggatgaggtccagagggagaaaatcgccgcaaagaatgcactcgaatcttacgcgtttaatatgaaaagcgtcgttagcgatgaaggattgaagggcaaaatttctgagtccgacaaaaataagatcctggacaaatgtaatgagctgctctcttggctggaagtgaatcagttagccgagaaggatgagttcgaccataaacgcaaggagctcgagcaaatgtgtaacccgattatcaccaagctttaccaaggtggttgcaccggtccggcatgtggcaccggatatgtgcctggtcgaccagctaccgggcccaccattgaagaagtggattag

SEQ ID NO: 119573 - DNA, 1926 bp, synthetic construct
  misc_feature 1..1926: note = Description of Artificial Sequence: Synthetic coding sequence
  source 1..1926: mol_type = other DNA
atggctacagctaaaggaatcgctattggaatcgatctggggacaacctatagctgcgtcggcgtgttccagcatggaaaggtggagatcatcgccaacgatcaggggaacaggactacaccctcatatgtggctttcactgatacagaacggctaatcggggacgccgctaagaatcaagtggcaatgaatccacagaacacggtctttgacgctaagcgtctgatcggcagaaaattcaacgatccagtagtccaggccgacatgaagttgtggcctttccaggttatcaacgaagggggtaagcccaaagtcctggttagctacaaaggggaaaataaggcgttctatcctgaggagatttcgtctatggtactcacgaaactgaaggaaactgcagaggctttcttgggacacccagtaaccaacgcagtcatcactgttccagcctacttcaatgactcacaaaggcaggccaccaaggatgctggagtgatagctggactgaacgtgcttcggataatcaatgagccgacagcggctgccattgcatatgggttggacaaaggaggccagggggagagacacgtcctgatttttgaccttggggggggaacctttgacgtctcaattttgaccatagatgatgggatctttgaagtgaaagccactgcaggggacacccatctgggcggcgaagactttgataacaggctggtctcacacttcgtggaggaatttaagaggaaacataaaaaggatatctcccagaataagcgggccgtgcgcaggctgaggactgcctgcgagagggcgaagagaacattgagttcctctactcaagcaaacttagagattgacagtctctatgagggcattgacttttatacaagcattactcgtgccagatttgaagaactttgtgcggatctgttccgcggcacgttagagcctgtcgaaaaggcgctccgtgacgcaaagatggacaaagcaaaaatacacgatattgtgctggttggcggctccaccagaatacccaaggtgcagaggctgctgcaggactactttaacgggagggacttaaacaaatcaatcaatcccgacgaggccgtggcgtacggagctgctgttcaggcagccattttgatgggagacaaatcagaaaaggtgcaggacttgttgctcctcgacgtagctccactctccctggggcttgaaaccgcaggcggggttatgacggctctgatcaagaggaacagtacgatacctactaaacagacccaaattttcactacctacagcgataaccagccaggcgttttgattcaggtctatgagggtgagagggccatgacaaaggacaataatctgctgggcagatttgacctgacgggcatcccaccagcgcccagaggagtcccacagatcgaggttacttttgacatcgacgccaacggcatattaaacgtcaccgctacggacaaatcgacgggcaaggtgaacaagatcaccattacaaatgacaaaggccgtctttccaaggaggaaattgaaaggatggtgctggatgcggagaaatacaaggccgaggatgaggttcagagagagaagatagctgcaaagaacgccctcgagagttacgctttcaatatgaagtccgtcgtctccgacgaaggtctcaaaggcaagattagcgagtctgacaaaaataagattctggacaaatgtaatgagctgctctcctggcttgaggtgaaccaactcgccgaaaaagacgaatttgatcacaagagaaaagaactagagcagatgtgcaaccccattattaccaagctttaccagggggggtgtactggccccgcctgcggcactggctatgtgccggggcggccggccaccggccccactattgaagaagtggactag

SEQ ID NO: 119574 - DNA, 1926 bp, synthetic construct
  misc_feature 1..1926: note = Description of Artificial Sequence: Synthetic coding sequence
  source 1..1926: mol_type = other DNA
atggccacagctaaagggatcgcaattggcattgacctggggacaacatacagttgcgtcggggtattccaacatgggaaagttgaaataatcgcaaatgatcaaggtaaccgcactacgccctcatatgtggcctttacggacaccgagcgactcatcggcgatgccgccaagaaccaggtagctatgaacccccagaacacagtgttcgatgcaaaaagactgatcgggcggaaattcaatgatcccgtggtccaggccgatatgaaactgtggcctttccaggttattaatgaggggggtaaacctaaggtgctcgtttcatataagggggagaacaaggccttttaccctgaggagataagcagcatggtcctgactaagttaaaggaaaccgccgaggccttcctgggccatcctgtgacaaacgctgttattacggtccctgcgtactttaatgattcgcaaagacaggctacaaaggacgctggtgtaatcgctggccttaatgtactgcggattatcaacgagccaaccgcggccgctattgcatacggattggacaagggaggtcagggcgaaagacatgtcttaatattcgacctcggcggtggcacatttgacgtttcaatccttaccatagatgacggcatctttgaggtcaaagctacagccggtgacacccacttgggcggggaggattttgacaatcggctggtctctcacttcgtggaggagttcaaaagaaaacataagaaagacatctcccagaacaaacgtgcggtgagacggctgcggaccgcatgtgaacgggccaaacggactctttccagcagcacccaagctaatctagaaatagattctttgtacgagggcatcgatttttacacgagcataactcgcgcccgcttcgaagaactctgcgcggacctttttcggggaacgctcgaacctgttgaaaaggcactgcgagacgcaaagatggataaagccaaaatccatgacattgtccttgtaggaggttccacgcggatccccaaagtccaaaggctcctgcaggattattttaatggccgggatttaaataagagcattaatcccgatgaggccgtggcctacggagcagcggttcaagccgccatcttaatgggcgacaagtcggaaaaggtgcaggacctcctgctgctggatgttgcacctttatcacttggcctggaaacagccggaggcgtgatgaccgcattaattaagcgcaattctacaattcccaccaaacagacacagatcttcacaacctactcagataaccagccgggcgtccttatacaagtgtacgagggcgaacgcgctatgacaaaagacaataacctgctcggacgctttgatttgacggggattcccccggccccaagaggagtgccgcagatcgaagttacctttgacatcgacgctaacggaattcttaacgtgacagctacagataaaagcacgggaaaagtgaataagattacaattaccaacgacaagggcaggctttccaaagaagaaatcgagcgtatggtactagatgcggagaagtataaggccgaagatgaggttcagcgcgagaaaattgctgcaaaaaatgctctggaaagctatgcctttaatatgaaaagcgtcgtgtctgacgaaggtctgaaaggcaagatatctgagagcgataagaacaagatcctggacaagtgtaatgagctgttgagttggctggaggttaaccagcttgccgagaaggatgagttcgatcacaaacggaaggaactggagcagatgtgtaatcccattattaccaagctgtaccagggcgggtgtacgggacctgcatgcggcacaggctatgtgccaggccggcctgccactggccctacgatagaagaggtcgactag

SEQ ID NO: 119575 - DNA, 699 bp, synthetic construct
  misc_feature 1..699: note = Description of Artificial Sequence: Synthetic coding sequence
  source 1..699: mol_type = other DNA
gcaaaagggattgcgatcgggatagatcttggcactacttattcctgcgttggcgttttccagcatggtaaggttgaaatcattgcaaacgaccaaggtaatcgtactaccccttcatatgtcgcttttactgacaccgaacggcttattggcgacgccggcgtgatagcaggcctgaatgtgttgaggatcatcaacgagcccacggccgctgcaatcgcctacggcttggacaagggaggccaaggcgaacgacacgtattaatcttcgatctgggtggaggcacgtttgacgtgtcaatattgaccattgatgacggtattttcgaagttaaggccactgctggcgatacacacttaggcggcgaggatttcgacaatagactcgttagccatttcgtggaagaattcaaaaggaagcacaagaaagatatcagccaaaataagcgtgccgtgcgacgactccgtacggcctgcgaacgggcaaaacgaacgttgagttcatcaactcaggccaacctggaaattgactcactgtacgaaggcattgatttctatacctccattacgagggccagattcgaggagctgtgcgcggatctgttccgcgggaccttagagcctgtcgaaaagggcgccccccctgccagcccgagatgctccgggtgtttccgcacaacatctatggacgtgatttag

SEQ ID NO: 119576 - DNA, 1926 bp, synthetic construct
  misc_feature 1..1926: note = Description of Artificial Sequence: Synthetic coding sequence
  source 1..1926: mol_type = other DNA
atggctaccgcaaaagggatagcaattggcattgaccttgggacaacttactcctgtgtcggtgtgtttcagcacggaaaagttgagatcattgctaatgaccaaggcaataggactacaccttcttatgttgcctttaccgatacagagaggctaatcggggacgcagcaaagaaccaggtcgccatgaatccccagaacactgtgtttgacgccaagagacttatagggaggaaattcaacgatcccgtcgtgcaggcagatatgaagctgtggcccttccaagtgataaacgaaggcggcaagccaaaagtgctggtgagctataaaggagagaataaagccttttaccccgaagagatctcgtccatggttctcacaaagctaaaggagaccgcagaggcatttctgggccaccccgttaccaatgccgtcattaccgttcccgcctacttcaatgatagccagcgccaggctaccaaggacgctggcgttattgctggcctgaacgtcttgagaattattaatgagcctacagccgcggccattgcctatggcctggacaagggtgggcagggtgaacgtcacgtcttaatcttcgacctcgggggggggacgttcgacgtgtccattcttaccatcgacgatggtatttttgaggtgaaagccacggcgggagatactcatcttggcggagaagacttcgataataggttagtgtcacatttcgttgaggagtttaagcggaagcacaagaaagacatatcgcaaaacaagagggctgtgagaaggctgcgtaccgcctgcgagcgagctaagcgtaccctgtctagttcaacccaggccaacttggagattgatagtctgtatgaaggcatagacttttacacttccattacacgtgcccgatttgaggagctatgtgcggatctgttccggggcacactagaacctgtggaaaaggccctgagagacgcgaaaatggataaggcaaagatccacgacatagtcctggtgggcggatccacccggatccccaaggttcaaaggctgctccaggactactttaacggcagggatctgaacaagtccattaatccagatgaagcagtcgcatacggggccgccgtccaggcggccatcctaatgggggacaaaagcgaaaaagttcaggaccttctcctgctggacgtggccccgctgagcctgggcttagagacagctggcggtgtgatgacagctctgatcaaaaggaatagcacaattcccaccaagcaaacccaaatttttaccacctactccgacaatcagcccggagtgctcatccaggtgtacgaaggagaacgcgctatgactaaggacaacaacctactggggcgtttcgacctgacggggatccctcccgcccctcgcggtgtccctcagatcgaggtgactttcgatatcgacgccaatggcattctgaatgtgaccgctatggacaaatcaacaggtaaagtaaacaagatcacaatcacaaatgataagggtcgcctctccaaggaggaaatagagcgcatggtgttagacgccgaaaaatataaagctgaggacgaagtgcagcgcgaaaagatcgccgctaagaatgcattggagagctatgctttcaatatgaaatcagttgtgagtgacgaaggtttgaagggaaagatttcagagtccgacaaaaataaaattctggataagtgtaacgaactgcttagctggttggaagtgaatcagctcgcagagaaagacgagtttgatcacaaaagaaaagagctggagcaaatgtgcaaccccattattactaaactgtaccaaggtggctgcactggtcctgcatgcggaacaggttatgttcccggcagacctgccactggtccaactatcgaagaagtggattag

SEQ ID NO: 119577 - DNA, 1599 bp, synthetic construct
  misc_feature 1..1599: note = Description of Artificial Sequence: Synthetic coding sequence
  source 1..1599: mol_type = other DNA
atggctactgctaagggaattgcaataggcatcgacttgggaactacttattcttgtgttggtgtgtttcaacacggcaaggtggagataatcgccaatgaccaagggaataggactaccccttcctacgttgcctttacagataccgagaggttgattggcgatgctgcgaaaaaccaagttgctatgaatccccaaaacacagtgtttgacgcgaaacgacttatagggcggaagtttaatgacccagtcgtgcaggcagacatgaaactttggcccttccaggtgatcaatgaggggggcaaacccaaagttctggtgagctacaaaggagagaacaaggctttctaccccgaggaaatatctagcatggtactcactaaactgaaggagacggcggaagcattcctgggccaccccgttactaatgccgttatcacagtaccagcttactttaacgactctcagcggcaggcgaccaaggacgccggcgtgattgcgggccttaatgtgttacgaatcatcaacgagcccactgcagccgccatcgcttatggcttggataaaggaggtcaaggcgaacgacatgttctcatctttgacctgggagggggcacgtttgacgtgtcaatactgactatagacgacggaatattcgaagtgaaggcaactgccggggatacccacctcggcggggaggactttgataacaggcttgtttcccactttgtggaagaattcaagcgcaaacacaagaaagatatctctcagaacaagagggccgtgcgtagactgagaacggcctgcgaacgcgccaaaaggaccctcagctctagcacgcaggccaatctcgagattgattccctctacgagggtattgatttctacacaagcatcacacgcgcccggttcgaggagctatgcgcagacctgttccgcggtaccctggagcctgtggaaaaagccttgagagatgcgaaaatggacaaggcaaaaatacacgatatcgtgctggtcggaggtagcacacggatcccaaaagtgcaacggctgctgcaggactattttaatgggcgcgatctgaataagtctattaaccccgacgaagccgtcgcgtacggcgctgcagtgcaggccgcgattctgatgggagataagagcgagaaggttcaggacttactcctgctggacgtcgctccactatcgctagggctagagactgcaggtggcgtcatgacagccttaattaagcgcaactctactatccctacgaagcaaacgcaaatctttactacgtactcagataaccaaccaggcgtgcttattcaagtctacgagggagaaagagccatgacgaaggacaacaatctgctgggccgctttgatctgacagggattcccccagccccacgcggggtcccacagattgaggtaacattcgatatagacgctaatgggatactgaatgtcaccgcaatggataagagtacaggtaaggtcaacaagattaccatcactaatgataagggtcgcttaagtaaggaggagatagagcgtatggttttggacgctgagaaatacaaagccgaggacgtctag

SEQ ID NO: 119578 - DNA, 699 bp, synthetic construct
  misc_feature 1..699: note = Description of Artificial Sequence: Synthetic coding sequence
  source 1..699: mol_type = other DNA
gccaaaggtatcgcaattggcatcgatctgggaaccacgtatagctgtgtgggtgtgtttcaacacggcaaggtcgagataatagcaaatgaccaaggtaacaggacaactcccagttatgtggcctttacagatacagagaggctgattggcgatgctggcgtgattgcaggtttgaacgttctgaggataatcaacgaacccacagcagccgcaattgcatacggacttgacaaaggaggtcaaggggaaaggcacgtgctgattttcgaccttggcgggggaacattcgacgtttccatcctcactatcgacgacggtatatttgaggtgaaggccactgccggggatactcaccttggtggagaagatttcgacaaccgcttagtcagccatttcgttgaagagttcaagcgcaaacataaaaaggacatcagccagaataagcgcgccgtccggcggttgaggacagcctgcgaacgcgccaaacgcactctgtcctcaagtacccaagccaatttggaaatagactcattgtatgagggaattgacttctacactagcattacaagagcccggttcgaagagctctgtgccgacttgtttcggggtacgctcgagccagttgagaagggggcccccccagcatctccacgttgttcaggatgctttcggacgacctccatggacgtaatttag

SEQ ID NO: 119579 - DNA, 1926 bp, synthetic construct
  misc_feature 1..1926: note = Description of Artificial Sequence: Synthetic coding sequence
  source 1..1926: mol_type = other DNA
atggccactgccaaagggattgcaatcggtattgacttgggtacaacttactcctgcgtaggggtattccaacatggtaaggtagaaattattgcgaacgatcaaggtaatagaacgacaccatcctatgttgcgtttacggataccgaacgtttgataggggatgcagccaaaaaccaagtggctatgaacccgcaaaacactgtattcgacgcgaaacgactaatagggagaaaatttaacgatccagttgtgcaggccgatatgaaactatggcctttccaggtaatcaatgaaggcggcaagccaaaagtccttgtgtcatacaaaggcgagaacaaagcattctatcccgaagagatttcaagcatggtgttgaccaaactcaaggaaaccgccgaagcttttctgggccaccctgtcacgaatgccgtgataaccgtgcccgcctactttaacgatagccaaagacaggcaaccaaggatgcaggtgtgatagctgggctcaatgttctgcgcatcattaatgaacccaccgcagccgcaatcgcttacggcttagacaaaggcgggcagggcgagagacatgttctgatttttgacctggggggtggaacttttgatgtgtctatcctgactattgatgatggaatctttgaagtgaaagccaccgctggcgatactcatctggggggcgaagacttcgataatcgactcgtgtcacactttgtggaagaatttaagcgcaagcacaagaaagatattagccagaataagcgtgcagtccggaggcttcgcacggcgtgcgaacgcgcaaagcgaaccttgtccagctcaacccaggccaaccttgagattgatagtctctacgaggggattgacttctatacaagtattactcgtgcccgtttcgaggagctttgcgcagatctgtttcggggtacgcttgaaccagtcgagaaggccttgagagacgctaagatggacaaagcgaaaatccatgatattgtgctggttggcggctctacgcgcattcctaaagtgcaacgattgttacaggattatttcaacggcagggacctgaataagtccattaatccggatgaagctgtggcttacggagcagctgttcaggcagccattcttatgggcgataagtctgagaaagtgcaggatctcttgctgcttgacgtggcaccactgtctctgggcttggaaacagcaggtggagtaatgactgcacttataaagcgaaactcaaccatccccaccaaacaaactcagatattcaccacctacagcgacaaccagcctggggtcctgattcaggtgtacgagggggaaagggctatgaccaaagataataatttgctgggtcgctttgacttgaccggcatccccccagctcctcggggagtcccacagatcgaagtgacctttgatattgacgccaacggaattctcaacgtcaccgcaaccgacaaatcaaccggcaaagtcaataagatcacaataacaaacgataagggccgccttagcaaagaagaaatagagcgcatggtgctggatgccgagaagtataaggctgaagatgaggtgcaaagggaaaagatcgctgcaaagaatgcattagagtcatacgcctttaatatgaaatctgtggttagcgacgaagggctaaaagggaaaatttctgaaagcgacaaaaacaagattctggacaaatgtaatgagttgctgtcatggttggaggtgaaccaactggcagagaaggatgagtttgatcacaaacgcaaagagctggagcagatgtgtaatccaatcatcacaaaactttaccagggaggatgtacagggccagcttgtggcacaggctacgtgcccggtcgccctgctacgggtccgacaattgaagaggtcgactag

SEQ ID NO: 119580 - DNA, 1599 bp, synthetic construct
  misc_feature 1..1599: note = Description of Artificial Sequence: Synthetic coding sequence
  source 1..1599: mol_type = other DNA
atggccaccgcgaaaggcattgcaataggaattgacctgggcacaacatactcatgcgtgggggtgttccaacatgggaaagtggaaataattgcaaacgaccaggggaaccgaaccaccccttcttacgtggcttttaccgatacagaacggctgattggcgacgctgccaagaatcaggtcgcaatgaatccacagaacacggtgtttgacgccaaaaggctcattggccggaagttcaatgacccagttgtacaggccgatatgaaactgtggccttttcaggttatcaacgaggggggaaagcccaaagtgttggtgtcctacaagggtgaaaataaagctttctaccccgaggagatttcatccatggtgctgaccaagctgaaggagacggccgaggcattcttgggtcatccagttacgaatgcggtcattactgtgcccgcctacttcaatgattcccaacggcaagccaccaaagacgcaggggtgatcgccggactcaacgtcctcaggataattaacgaacccaccgccgctgctattgcttatggcctggataaagggggacagggcgaacgacatgtgttaatttttgatctgggaggtggcacattcgacgtgtcgatcctaacaatcgacgatggaattttcgaagtcaaagccaccgccggcgatacccatcttggtggtgaagacttcgacaatcgactggtgtcccacttcgtggaggaattcaagaggaaacacaaaaaggacatctctcagaataagcgggccgtgagacgtttgaggacagcgtgcgaacgcgccaagcgcaccttgtcatcttcaactcaggccaacctcgaaatcgatagcctgtacgaaggaattgatttttataccagcatcacccgtgctcgttttgaggaactgtgtgccgatctctttaggggtactctggaacccgtggagaaagccctacgtgacgctaagatggataaggctaagattcacgatatagtgttggttggcggatcaacacgcatccccaaagtccagagattgctccaggactactttaatggccgcgacctgaacaagagcatcaatcccgatgaggcggtcgcctacggagccgctgtgcaggctgccattctgatgggcgataagtccgaaaaagttcaagatctgctgcttctggacgtcgcacctctcagcttgggcctggagacagccggcggcgtaatgaccgccctaatcaagagaaacagtaccattcctacgaagcagacccagatttttaccacatattctgataaccaacctggagtcttaattcaagtgtacgaaggcgaaagggccatgaccaaggataataacctactcggccgattcgatttgaccggtattccacccgctccaagaggtgtacctcagatcgaggtgaccttcgatatcgacgccaatggcattctgaacgttactgctatggataagagcaccggcaaagtgaataagatcaccataacaaacgacaaaggccggttgagcaaggaggagatcgaacgcatggtgctggacgcagaaaagtataaagccgaagatgtgtag

SEQ ID NO: 119581 - DNA, 1599 bp, synthetic construct
  misc_feature 1..1599: note = Description of Artificial Sequence: Synthetic coding sequence
  source 1..1599: mol_type = other DNA
atggctacggctaaggggatagcaatcggcatcgacctcggcactacttatagctgcgtgggggtttttcaacacggtaaagtcgaaataattgctaatgaccagggtaatcgaactaccccgagttatgtcgcctttaccgacacagagcgactcatcggtgacgctgccaaaaaccaagtcgctatgaatcctcagaatacagtctttgatgctaaaagactcatcggccgtaagtttaacgatccagttgtgcaggcagatatgaaattgtggccctttcaggtcatcaacgaaggtgggaagcctaaagtgctcgtgtcctataagggcgagaataaggctttctaccccgaggagatttcgtccatggtgttgaccaagctaaaagaaaccgccgaagcattcctggggcaccctgtgaccaatgcagtaatcactgttcctgcttactttaacgattctcagagacaagcgacaaaagatgcaggcgtaattgccgggctgaatgtgctgcgaattatcaatgagcccacagccgcagcaattgcatacggactcgacaaaggcggccagggtgagcggcatgtgttgattttcgacttaggaggggggaccttcgacgtaagcatcctgacaatcgacgacggcattttcgaagttaaagcgacagcaggagatacccatctcggcggcgaggactttgacaacagactggtgtcacactttgtggaggagtttaaaaggaaacacaaaaaggatatttcgcagaacaagcgcgccgttcggcggctgcgaactgcatgtgaacgcgcgaagaggaccctcagtagtagcactcaagctaatttggaaattgactccctctatgaagggattgacttttacacctccattacgagagcccgattcgaagagctttgtgccgacctgttccgcggaaccttggagccagtagaaaaagccttaagggatgccaagatggataaagccaagattcacgatatcgtgctagtgggagggagtacccgcattccaaaggtccagaggctcctgcaggactatttcaatgggagggatctcaacaagagcattaatcctgacgaggcggtagcctacggagccgccgttcaggccgccattctcatgggtgacaaatccgagaaagtgcaagacttactgttactggatgtcgctcctttatccctcgggctcgagaccgccggtggggtgatgaccgcattgattaagaggaattccaccattcctactaagcagacacaaatattcacgacgtactctgacaatcagcccggagtgctcatccaggtatatgaaggcgagagggcaatgactaaggataataacctgttaggacggtttgatctcacgggaataccccccgctcctagaggtgtaccacagatagaggttactttcgacatagacgcaaatggtattctcaacgtaaccgccacggacaaaagtacagggaaggttaacaagattactatcaccaacgataaagggagactcagtaaagaagaaattgagcgcatggtattggatgccgaaaaatacaaagctgaagacgtctag

SEQ ID NO: 119582 - DNA, 1926 bp, synthetic construct
  misc_feature 1..1926: note = Description of Artificial Sequence: Synthetic coding sequence
  source 1..1926: mol_type = other DNA
atggctaccgcgaaaggaatcgctatcgggattgatttgggaaccacctatagctgtgtgggagtcttccaacatggaaaagttgaaataattgcgaatgaccaagggaacaggacaactccgagctacgtggccttcaccgataccgaaaggctgatcggcgacgccgcgaagaatcaggttgccatgaacccccagaacactgtgttcgacgccaagcgtctcattggcagaaaatttaatgatcctgtggtacaggctgatatgaaattatggccatttcaagtaatcaatgaaggcggaaaacccaaggtgctggtgtcctacaaaggggaaaacaaggccttctaccccgaggaaatttcctccatggtcctgacgaagcttaaagaaaccgccgaggccttcctgggacaccccgtgaccaatgcagtgatcaccgtgcctgcgtacttcaacgattcacagagacaggccacgaaagatgctggtgtgatagccggcttgaacgttctacgcatcattaatgaaccaaccgccgcggctattgcatacggtctagacaaggggggtcaaggggaaaggcatgtgctaattttcgacttagggggcgggacatttgatgtgtcaatattaacaatagatgatggcatcttcgaggtcaaggctacagcaggagacactcacctgggtggggaggacttcgataatcggcttgtaagccacttcgtagaggagttcaaaagaaagcataaaaaggacatctcccagaacaagagagccgttcggcgcttgcgcacggcctgcgaaagagctaaacgcacattgagttcaagtacccaggcgaacctggagattgactctctgtacgaggggatagatttctacactagcattactcgggctcgctttgaagagttgtgcgccgatttgttcaggggaacccttgaaccagttgagaaggctttgagggacgccaaaatggacaaagctaagatccacgacatcgttctagtgggaggttctacccgtatccctaaagtgcaacgcttgttacaggactactttaatgggcgcgacctaaataagtctatcaaccctgatgaagcagtagcttatggcgcagcagtgcaggctgctattttaatgggcgacaaaagcgaaaaggtccaggacctgctcctgctcgacgtagcgcctttatcactggggcttgaaacagctgggggagtgatgaccgcgctaattaagcggaacagcacgattcccacgaaacagacccagattttcacaacctattcggataaccaacctggcgtcctgatccaagtatacgagggggaacgggcgatgacgaaggataataatctgctgggaagattcgatctcacaggtatcccccctgcccctaggggcgtgccacagatcgaagtgaccttcgacatcgacgcaaacggcatcctcaacgtaactgcaatggataagagcactggtaaagtcaacaagataactatcaccaacgacaaagggcgcctgtctaaggaggaaatcgaaagaatggtgcttgacgccgagaaatacaaagcggaagacgaggtccagagggagaaaatcgccgcaaaaaacgcactggaatcctacgcatttaatatgaagtcagtggtatccgatgagggactcaagggtaaaattagtgagagcgacaaaaacaagatccttgataagtgcaacgagttactctcatggctcgaggtgaatcagttggcagagaaggacgaattcgatcacaagagaaaagagctggagcagatgtgcaacccgattatcacgaagctttatcagggcgggtgcaccggtccagcatgtggtactggatacgtgcctggccggccggcgaccggaccaacaatcgaggaggtggattag

SEQ ID NO: 119583 - DNA, 699 bp, synthetic construct
  misc_feature 1..699: note = Description of Artificial Sequence: Synthetic coding sequence
  source 1..699: mol_type = other DNA
gcaaaaggtattgccatcggcatcgacctcggtacaacctacagttgcgtcggagttttccagcacggaaaagttgaaatcatagctaatgaccagggcaacagaacgaccccctcatacgtggccttcaccgacacagagaggttgattggcgatgcgggggtcatcgccggattgaacgtactccgcatcatcaatgaacctacagcggctgcaattgcatatggtctggataagggaggccagggggagcggcatgtgctgatatttgacctgggtggagggacattcgatgtgtcaattttaaccattgacgatgggatcttcgaggtgaaggccactgccggcgacactcatcttggcggtgaggactttgataatagacttgttagccacttcgtagaagaattcaagcgcaagcacaagaaggacatttcacagaacaagagggctgtgaggcggttaagaacagcctgtgagagagccaagcgcacactttcttctagcacacaagccaatttggagatcgattcgctgtatgaggggatcgacttctatacaagcatcacacgggcacgcttcgaagaactgtgtgctgacctgtttagaggtactctggagcccgtggagaaaggtgcgccccctgcctctcccaggtgctccggatgttttcgcaccacctcaatggacgttatatag

SEQ ID NO: 119584 - DNA, 699 bp, synthetic construct
  misc_feature 1..699: note = Description of Artificial Sequence: Synthetic coding sequence
  source 1..699: mol_type = other DNA
gccaaaggcattgccattggcatcgacctcggaactacttactcctgcgtcggagtattccagcacgggaaagtggaaataatcgcaaacgaccaaggtaacagaacgactccatcatatgtggcgttcactgacacagaacgactgatcggcgacgcaggcgtgatcgctgggctgaatgtcctccggattatcaatgaacctacagccgccgccatcgcatatgggctggataagggagggcagggagagcggcatgtgcttatttttgacctcggtggcgggactttcgatgttagcatcctgactatcgatgacggaatcttcgaggtgaaggctaccgctggcgatactcatctcgggggtgaagacttcgacaatagactggtgtcccattttgtcgaagagttcaagcgcaaacataagaaagatattagccagaataagcgcgctgttagaagactgagaaccgcttgtgaacgggcaaagcgtactttgtcttcctcgacacaggctaatttggagatcgactctctgtacgaaggcattgacttctataccagcattactagagcgcggtttgaagagttgtgtgccgatctgttcaggggcaccttagagcctgtcgagaaaggggcaccgccggcctcaccaagatgctctggatgctttcggaccactagtatggacgtcatttag

SEQ ID NO: 119585 - DNA, 1926 bp, synthetic construct
  misc_feature 1..1926: note = Description of Artificial Sequence: Synthetic coding sequence
  source 1..1926: mol_type = other DNA
atggctactgccaaggggatcgccattggtatagatctcgggactacttatagttgtgtgggggtttttcagcacggcaaggttgagatcatcgccaacgaccagggcaacagaaccactccatcttatgtcgcgtttacggacaccgagagactgattggagacgctgccaagaatcaggtcgctatgaacccccagaacaccgtattcgacgccaaacgccttattggccgcaagtttaatgacccagtggttcaggcggacatgaaactttggccttttcaggtgatcaatgagggtggaaaacctaaggtcctggtgtcatataagggggaaaacaaggccttttatcccgaagagatttcgtcaatggtgctgacaaagctgaaggagactgccgaggctttcctgggacacccagtcacaaacgcggtcatcacagttcccgcttactttaacgattcacagagacaggcaaccaaggacgccggtgtgatcgccggcctgaacgtgctgaggatcataaacgagcctacagcggctgccattgcctacggcttggataagggaggacagggcgaacggcacgtgctgatctttgatctgggcggggggaccttcgacgttagtatcctcaccatagatgacggcatatttgaggtcaaagctacagccggagatacccacttggggggtgaagacttcgataatcgactggtgagccattttgtcgaggagttcaagagaaaacacaagaaggatatcagccaaaataaaagagctgttcggcgactgcgtaccgcttgcgagcgggcgaaaagaacgctgtcaagctccacccaggctaacctagagattgatagtctgtacgagggaatcgacttctacacctccatcacccgcgccaggttcgaagaactgtgtgcagacctttttagaggtaccctcgagcccgtggagaaagccctgagggatgctaaaatggacaaggctaagatccacgacatagtactcgtgggcgggagtacacggatccccaaagtccagcggctactacaagattattttaatggccgggatctaaataaaagcatcaacccagatgaggcggtagcctacggagctgctgtgcaggcggctatcctgatgggcgataagagcgaaaaggtccaggaccttttactgctagatgtcgcaccattgtcactagggttagagactgccggtggagttatgacggctctgattaaacgtaatagcacgatcccaacaaagcagacacagatttttacaacatacagcgataatcagcctggcgtgctgattcaggtgtacgagggggaacgcgctatgacaaaagacaataatttactaggaaggtttgaccttacaggcatccctcctgccccaaggggggtcccacagatcgaagttacctttgatatagacgctaatgggatcttgaatgtaacggccatggacaagagcacgggcaaagtcaataagatcaccataactaatgacaaaggacggctcagcaaagaagagattgagagaatggtgttagacgctgagaaatataaagcagaggacgaagtccagcgggaaaagattgccgccaagaatgctctggagagttatgctttcaacatgaaatccgtagtgagcgatgaaggactcaagggcaagatatccgagagcgacaagaataagattctggacaaatgcaacgaactcctttcctggctggaagttaatcagctcgccgaaaaggatgagttcgaccacaagcggaaggagctagagcagatgtgtaaccctatcatcacaaaactgtatcaaggaggctgtaccggcccagcctgtggaaccggatatgtgccggggcggcccgcaacaggtccgactattgaggaagttgattag

SEQ ID NO: 119586 - DNA, 1920 bp, synthetic construct
  misc_feature 1..1920: note = Description of Artificial Sequence: Synthetic coding sequence
  source 1..1920: mol_type = other DNA
atgagtgcacgcggtccggccatcggcatcgacctgggaacaacatacagctgcgtcggggtattccagcatggaaaagtggagatcattgccaatgaccagggcaacagaaccacaccctcatacgtggcattcacggataccgaaaggctgatcggagacgctgccaagaaccaggtcgctatgaatccaacgaacacaattttcgacgcgaaacgcctgataggccggaaatttgaggatgctaccgtccagtctgacatgaaacattggcctttccgtgtggtgtctgaaggcggcaaaccgaaagtacaggtggaatacaaaggtgaaactaaaacattctttcccgaagagattagcagcatggttctcacaaagatgaaagaaatagccgaagcatatctgggaggaaaggtgcatagcgccgtaatcacagtgcctgcgtactttaacgactcacagcggcaggctactaaagacgccggcacaatcactgggctcaacgtgcttagaattatcaacgaacccactgcggccgctatcgcgtacggtctggataaaaaggggtgcgcgggaggtgaaaaaaatgttttgatcttcgatctgggcggtggtacgttcgacgtgtctattctcacaattgaggatggtattttcgaggtaaagtccacagctggagatacacatcttggcggggaggacttcgataacagaatggtatcccatctggctgaagagttcaaacgaaaacataaaaaggatatcggacccaataagcgggccgtgaggaggctgagaaccgcctgcgagagggcaaagcggaccctaagtagttccactcaggctagcatcgagattgactccctgtatgaaggagtggatttctataccagtatcacccgcgctcgatttgaggagctgaatgctgacctgtttcgagggacactagaacccgtcgagaaagcactgagagacgccaagctggataaaggacaaatccaggaaatcgtgctggtgggtggcagcacgcgcatcccaaagattcagaaattactgcaggatttttttaacggaaaggaactgaataagagcatcaatcctgacgaggctgtcgcatacggtgctgctgtccaggctgctatactgatcggcgataaaagcgaaaatgttcaggacctcctgctgctggatgtcacccccctcagcctgggtattgagacagcagggggggtcatgactcccctgatcaaaagaaacacgactatcccaaccaagcagacccagacttttaccacctattctgacaatcagagctctgtgctcgttcaagtctacgagggtgagagggccatgaccaaggataacaacctcttaggcaagttcgatttaacaggcatcccccctgctcctagaggtgtgcctcaaattgaggtgactttcgacatcgacgctaatggtatcctgaatgtcactgcagctgacaaaagcaccggaaaggaaaataagatcaccatcacaaacgacaaaggacgtctgtccaaagacgacatcgacagaatggtccaagaagcagaaagatacaagtccgaggacgaagcaaacagagaccgggtggctgcgaaaaacgcgctcgagtcttacacctataacattaaacagactgttgaagatgaaaaacttagaggtaagatttccgaacaggataaaaataagattttagataagtgccaggaggtgattaattggctggatcggaaccagatggctgagaaagatgagtatgagcacaaacagaaggaactggagagagtgtgtaatccaatcatctctaagctatatcaaggagggccgggcggcggctcaggggggggtggaagtggcgctagtggcgggccaacaattgaagaggtcgactag

SEQ ID NO: 119587 - DNA, 1920 bp, synthetic construct
  misc_feature 1..1920: note = Description of Artificial Sequence: Synthetic coding sequence
  source 1..1920: mol_type = other DNA
atgagcgcaagggggcccgccatcgggatcgatctgggaaccacttactcctgcgtaggagtctttcagcacggaaaggtggagataattgccaatgatcaaggaaatcggaccaccccatcctacgtagcattcaccgacactgaaagactgataggggatgctgccaaaaatcaggtcgctatgaacccaaccaacacaatattcgacgccaaaaggctcatcgggaggaaatttgaggacgccacggtacagtctgacatgaagcattggccctttagggtagtctcagaagggggaaaacccaaagtgcaggtggaatacaaaggcgaaaccaaaacattctttccagaggagattagctctatggtcctcactaagatgaaagagatcgccgaggcctacctcgggggaaaagtccactcagcagttatcaccgtccccgcctattttaatgacagtcaaagacaggcaactaaggatgccgggacaatcaccgggctgaatgtgttaaggatcattaatgagcctacagcagccgccattgcttacggtctagataagaaaggttgcgccggcggcgagaagaatgtactgatttttgacctcggcgggggaactttcgatgtttccatcctgaccattgaggacggcatattcgaggtgaaaagcacagcaggagatactcacctgggaggcgaagactttgataacagaatggtctctcacttggccgaggaatttaagcgcaagcataaaaaagatatcgggcctaataaacgcgcggtgagacgcttgcgaacagcatgcgaacgggctaaacgcacattaagttcatcaacccaggcatccatcgagatcgacagcctctatgagggcgtggacttctacacatcaatcacacgggcccgcttcgaagaactcaacgccgatcttttcagaggaaccctggagcccgtcgagaaggcattacgggatgctaaactggataaggggcaaatacaggagattgtgctcgtagggggctccactagaatacctaaaatccagaaacttttgcaagacttttttaatggaaaagagttgaataaatcaatcaatccagatgaagcagtggcctacggtgccgctgtgcaagctgctattctcataggagataagagtgaaaacgtccaggacctcctgttgcttgacgtgacacctctctcactgggcatcgagactgccggcggagtcatgacacccctgatcaagcgcaacacaacaatccccactaaacagactcagacctttaccacttattcggacaatcagtcatccgtgctggtccaggtatacgagggtgagcgagcaatgacaaaggataacaaccttcttggcaagttcgaccttacgggaattccacctgccccgcgcggcgttcctcagatagaggtcaccttcgatattgacgccaatggaatcctgaacgtcacggcagccgacaagtccacagggaaggagaacaagatcacaattacaaacgacaagggcaggttgtccaaggatgatatagatcgcatggtgcaggaggccgaacgttataagtcagaggacgaggcaaacagggatcgcgttgccgcaaaaaatgcgctggagagctacacatataacatcaagcagacagttgaggacgagaagctgcggggcaaaatctctgaacaggacaaaaacaaaatcttggacaagtgtcaggaagtaattaactggttggatcgcaatcagatggctgagaaagatgagtacgagcacaaacagaaagagttggaaagagtctgtaatcccataatctctaaactctaccagggcggacccggcgggggatcaggcggtggcggcagcggggctagcgggggaccaactattgaagaagttgattag

SEQ ID NO: 119588 - DNA, 1242 bp, synthetic construct
  misc_feature 1..1242: note = Description of Artificial Sequence: Synthetic coding sequence
  source 1..1242: mol_type = other DNA
atgtctgctcggggccccgcaatcggaattgacctcggcactacatacagctgtgtgggcgtcttccagcacggtaaagtcgaaataatcgctaacgatcagggcaataggactaccccaagctacgtcgctttcacagatactgaacgcctgattggagatgctgccaagaaccaggtcgccatgaatcctacgaataccattttcgacgctaagaggctaatcgggcggaaatttgaagagctcaacgccgatctgttccgcggtacccttgagccagtcgaaaaggctcttcgagacgccaagctggataagggacagatccaggaaatagtgttagtcgggggctctacgcgcatccctaaaattcagaagctgttgcaggacttctttaacgggaaggaattaaacaagtcaatcaatcccgacgaagccgttgcctatggagccgcggtacaagcagcaatactcatcggagataaatcagaaaatgtgcaggatcttctcctgctggacgtgacaccactgagcctgggtatcgagaccgccggcggagtcatgacccctctgatcaagcgaaatacgactatcccaactaagcaaacgcaaacgtttactacctattcggataaccaatccagtgtactggtgcaggtgtatgagggagagcgagctatgactaaagacaataacttgctggggaaatttgatctcaccggcatcccaccggccccacgaggcgtgccgcagattgaagttacatttgacattgacgcaaacggaatcctcaacgttaccgccgctgataaatctactggaaaggaaaacaagatcaccatcacaaacgataaaggacgcctttctaaggacgatattgacagaatggtgcaagaagctgaaaggtacaagagcgaagacgaggcgaaccgcgatcgggtcgccgctaagaatgccctggaaagctatacatacaatatcaagcaaactgtcgaggatgaaaagctccgcgggaaaatcagcgaacaggacaaaaataagatccttgacaagtgccaagaggtgattaactggctggacagaaatcagatggccgaaaaagatgagtacgagcacaagcagaaggagcttgaacgggtgtgcaatcccatcataagcaagctttatcaggggggcccaggcggggggtccggaggcggaggctcgggtgcatcaggggggccaaccatcgaagaggtggattag

SEQ ID NO: 119589 - DNA, 2523 bp, synthetic construct
  misc_feature 1..2523: note = Description of Artificial Sequence: Synthetic coding sequence
  source 1..2523: mol_type = other DNA
atgagtgtggtggggattgatttagggttccagtcttgctatgtggctgtcgccagggcaggtgggatcgaaaccatcgcgaacgagtattcagatagatgcacgccggcctgtattagcttcggtccaaaaaatcggtcaatcggggcagcagctaagagccaagtgatatcgaatgctaagaacacagttcagggcttcaagcgtttccacggccgcgccttttccgacccgttcgtggaggcggaaaagtccaatctcgcttacgatattgtacagctgcctaccgggctgacaggaatcaaagttacatacatggaggaggaacggaactttacaaccgagcaggtcacagccatgcttctgtccaagctcaaagagacagctgagtccgtcctgaagaagcctgttgtggactgcgtggtgagcgtcccctgcttctacacagacgccgaaagacgaagcgtgatggacgccacacaaatcgcaggcttgaattgccttaggcttatgaacgagacaacagcggtcgctctggcttacggaatctataaacaagatttaccggcattggaggaaaagcctcgaaacgtcgtgttcgtcgatatgggtcacagcgcgtaccaggtatcagtatgtgccttcaacaggggtaaattgaaggtgcttgctacagccttcgatacaaccctgggtggccgaaagtttgatgaggtcttggtcaatcacttttgcgaggagtttgggaagaagtacaaacttgacattaaaagtaaaataagggccctactccgcttgtcccaggaatgcgagaagctcaaaaagctcatgtccgctaatgcttctgatctcccattaagtattgagtgcttcatgaacgacgtcgatgtgagtggcacgatgaaccggggcaagtttcttgagatgtgcaacgatctgctcgcgagagtagagccaccgttacgcagtgtacttgaacagactaaattaaaaaaagaagacatctatgccgtggagattgtggggggggccacccggatacctgccgtgaaagaaaaaatcagtaagttttttggtaaggagctttccactaccttgaatgctgacgaggccgtgacgagagggtgtgctctgcagtgcgccatcttgtcaccggctttcaaggtgcgagagttttccatcactgacgtcgtcccgtatcccattagcctcaggtggaacagtcccgccgaagaaggaagtagcgattgcgaagtgttcagtaagaatcatgccgccccgttttctaaagtgttgacattttaccgtaaggagccatttactctggaagcctattattcatcaccgcaggacttgccgtatccagatccagccatcgcgcaattttccgtccagaaggtcacaccacaaagtgatggaagcagtagtaaagtgaaagtgaaagtcagagtgaacgtccatggcatattcagtgttagctcagccagcttggtcgaagtgcataagtccgaggagaatgaagaacctatggaaaccgatcagaatgccaaggaagaggagaagatgcaggtcgaccaggaggaacctcacgtggaggagcagcagcagcagacccccgcagagaacaaggctgagtccgaagaaatggaaacctcccaagctggttcaaaggacaagaagatggatcagcccccccaggccaagaaggccaaggtgaagacttcgaccgtggacctgcctattgaaaatcagcttctatggcagatcgatagagaaatgctgaatctgtacatcgaaaacgagggaaagatgataatgcaagacaagctggagaaggagcggaacgatgccaagaacgcagtagaagagtacgtgtatgaaatgcgagacaaactgtctggggagtatgagaagttcgtgagcgaggatgacaggaactcgttcacactcaagctcgaagatacagaaaactggctgtatgaggatggtgaagaccagccaaagcaggtgtatgtggataagctcgcagaactgaagaatcttggtcagccgattaagatacggtttcaggaatcagaggaaagaccaaagctgtttgaggaactgggcaaacagatccagcagtatatgaagataatcagcagcttcaaaaataaggaggaccagtacgatcacctggatgcagctgacatgacaaaggttgaaaaatctaccaatgaggccatggagtggatgaataacaagctcaatctacagaacaagcaatccctgacaatggatcccgtcgtgaagtccaaagaaatcgaagcgaaaataaaggagctgacgagcacttgctccccgattatcagtaagccaaaacctaaggttgagccccctaaagaggagcagaaaaacgccgaacagaatggcccggtggatgggcaaggggataaccccggtccccaagccgccgagcagggcactgataccgctgtccccagcgatagtgacaagaaactaccagagatggacatcgactag

SEQ ID NO: 119590 - DNA, 447 bp, synthetic construct
  misc_feature 1..447: note = Description of Artificial Sequence: Synthetic coding sequence
  source 1..447: mol_type = other DNA
atgtctgtggttgggattgatctcggctttcagagctgctatgtcgccgttgcccgcgcaggcggcatcgagaccattgcaaacgaatactccgataggtgcacgcctgcttgtataagcttcggcccaaagaatcgtagcataggggctgctgccaaatctcaggtgatctccaatgccaaaaacacagtccagggcttcaagcgctttcatggaagagccttctctgatccctttgtggaggccgaaaagagcaacctcgcgtacgacatagtgcagctgccaaccggcctgaccggtatcaaagtgacttatatggaagaggaacagaacggacctgtggatggacagggcgataacccggggccacaggctgctgaacagggcacggataccgctgtgccaagcgactcggacaagaaactgcctgagatggatatcgactag

SEQ ID NO: 119591 - DNA, 1422 bp, synthetic construct
  misc_feature 1..1422: note = Description of Artificial Sequence: Synthetic coding sequence
  source 1..1422: mol_type = other DNA
atgagtgtcgttggtattgatctaggattccagagttgctacgtggcggtggcaagagcaggaggcatcgaaacaatagctaacgagtattctgatagatgcacgcctgcctgcatctcctttgggcccaaaaatcgaagcatcggggcagccgccaaaagtcaggttatatcgaacgccaaaaatactgttcagggttttaaaagattccacggccgcgctttcagcgacccgttcgtcgaagccgaaaagtctaatttagcatatgacatcgttcaactacccacgggactaaccggcatcaaggtgacttatatggaggaggagagaaatttcacgacagaacaagtcaccgctatgcttcttagcaagctgaaagaaaccgcggaatccgtgctaaagaagccagtcgttgactgcgttgtttccgtgccctgcttttacactgacgctgagcgacggtccgttatggatgcaacccaaatcgccgggctcaattgcctgcgactcatgaatgagactaccgccgtcgctttggcatacggtatctataagcaggatctccccgcactggaggagaaacctaggaacgtcgtatttgtggacatgggacactctgcttatcaagtctccgtctgtgcgtttaacagaggcaagctgaaggtactcgcgacagcctttgacacaacacttggaggaaggaagtttgacgaggtgctagtaaaccatttttgcgaagagttcggcaaaaaatataagctcgacatcaagagtaagatcagggcacttctgcgactgtctcaggagtgtgaaaagttaaagaaactcatgagcgccaacgcctcagatttgcccctgtccattgaatgctttatgaatgatgtcgacgtgtcgggcaccatgaacaggggaaagttcttagaaatgtgcaatgacctgctcgctagggtcgagcccccccttagatccgtactggaacagactaaacttaaaaaagaggatatctacgctgtcgagattgtaggcggggcaactcgcattccggcggtgaaggagaaaatatctaaatttttcgggaaggaactatccacgaccctgaatgccgacgaggccgtcacaagagggtgtgccctccagtgtgccattctgtctcctgccttcaaggtgagagaattttccatcacagatgtagttccttacccaatatccctgagatggaacagtcctgcagaggagggtagctcagattgtgaggtttttagcaagaatcacgccgcaccgttctccaaagtgctgacattctataggaaggagccctttacacttgaggcctattattccagccctggattcgcactctcaagatcttgttatagcattatcaagagcctcctgagcctgatggcccccgtgcagaaatag

SEQ ID NO: 119592 - DNA, 1965 bp, synthetic construct
  misc_feature 1..1965: note = Description of Artificial Sequence: Synthetic coding sequence
  source 1..1965: mol_type = other DNA
atgaagctatctttggtggcggcgatgttgctgctgctatccgcggcacgcgctgaagaagaggacaagaaagaggacgtggggaccgtcgtcggtatcgacctggggaccacttattcctgcgtgggagtctttaaaaacggtcgggttgagatcattgcaaacgatcagggcaacaggatcactccatcatacgttgcctttacacccgaaggggagagactgattggagacgccgcaaagaatcagcttacctcaaacccggaaaataccgtattcgatgctaagcggcttatcggaaggacctggaacgatccaagtgtccagcaagacattaagtttctaccctttaaagttgtcgagaagaagaccaaaccatatattcaggtcgacatcgggggagggcagacaaaaacatttgcgccagaagagatcagtgccatggtcctgaccaaaatgaaagaaacagccgaggcttatttagggaagaaggtgactcacgctgtggtgaccgtcccagcgtatttcaatgatgcgcaacggcaggcgaccaaagacgctgggaccattgccgggctgaacgtgatgcggatcattaacgaacctacagctgctgctatcgcctacggactcgataagagagagggcgagaaaaatattttggtcttcgacctgggaggaggtacttttgatgtctctcttctcaccatagataatggggtgttcgaggtcgtggccaccaatggggacacacatctgggaggagaggacttcgaccaaagagtgatggaacacttcattaagttgtacaagaagaagacgggaaaggacgtgagaaaggacaacagagctgtccaaaaactgcggagagaagtggagaaagcaaaacgcgctttaagctctcaacaccaagcccgaattgaaatcgaaagtttttacgagggagaggatttctccgagacattgactagagcaaaatttgaggaactgaacatggacctcttcaggtctacgatgaagcctgtgcagaaagtgctggaagacagcgacctgaagaagagtgatattgacgaaatcgtactggtcggcggctccacacggatcccgaaaatacagcagctcgtcaaggaattctttaatggtaaagaacccagtagaggcattaacccggatgaagccgtagcctacggagccgcggtccaggccggggtcttgtccggtgatcaggacaccggggatctcgtgctgttggacgtctgccccttgacgctgggtatagagactgtagggggtgttatgaccaaactgatacccaggaacaccgttgtgcccaccaaaaagtcacaaatattctccactgcgtcagataaccagcccacggtaaccattaaagtgtacgagggtgaaaggccactgaccaaagacaatcacctactgggcaccttcgatctgacaggaatcccccccgcaccccggggtgtacctcaaatcgaggtgacattcgagatcgacgtcaacggaatcctgagagttacggcggaggacaaggggaccggaaataaaaacaagatcaccattactaatgatcaaaatcgactcactcccgaagaaatagagaggatggtgaatgacgctgaaaagtttgccgaagaggataaaaaattgaaagagagaatagacactagaaacgaactggaatcctacgcctattccctgaaaaaccagatcggagacaaagagaagcttggcggaaagctctctagcgaggacaaggagaccatggagaaagcagtagaggaaaagatagaatggctggaatcacaccaggacgctgacatcgaggattttaaagcgaaaaagaaagagcttgaagaaatcgtgcagccaattatcagcaagctctacggttccgcgggcccccctccaaccggcgaagaagacacagctgagaaagatgagctttag

SEQ ID NO: 119593 - DNA, 837 bp, synthetic construct
  misc_feature 1..837: note = Description of Artificial Sequence: Synthetic coding sequence
  source 1..837: mol_type = other DNA
atgaaactaagcctggttgccgccatgctcctgctgctgagtgctgctcgagccgaagaagaggataaaaaagaggatgtggggacagtagttgggatcgatttaggcaccacctactcatgcgtgggagtcttcaaaaacgggcgagtggagattatcgccaacgaccagggtaatcgaattactccatcatacgtggcctttacgccagaaggcgagcgtctgatcggggatgcagccaaaaaccagttgacgtctaatcccgagaataccgtatttgacgcaaaacggctaatcggccgaacctggaacgatccctcagtccagcaggacattaaattcctaccctttaaagtcgtggaaaagaaaactaaaccatatatacaggtggacattgggggaggccaaacgaaaacatttgccccggaagaaatctccgctatggtgctaacaaagatgaaggaaactgctgaggcctacctcggtaagaaagtgacgcatgcggttgtgacagtccctgcctactttaacgacgctcagcggcaggctactaaggatgctggcaccatcgcagggttgaacgtcatgcgtatcatcaatgaacccacagcggccgcaatcgcctatggactggataaaagagagggggagaaaaacattctcgtgtttgaccttggcggcgggacattcgacgtgtctctgctaacaattgacaacggtgttttcgaagtcgtggcgaccaacggagatacccacttgggaggagaggacttcgatcaaagggtgatggagcacttcatcaaactgtacaagaaaaaaactttcctgcgaccctag

SEQ ID NO: 119594 - DNA, 1932 bp, synthetic construct
  misc_feature 1..1932: note = Description of Artificial Sequence: Synthetic coding sequence
  source 1..1932: mol_type = other DNA
atgcaagcccccagggagctggccgtaggcattgacctgggcaccacgtatagctgcgtaggtgtctttcagcagggccgcgtggaaattctggccaacgatcagggcaacagaaccactccctcgtacgtggccttcacagacacagagcggctggtcggagatgcagctaaatcccaagccgctctcaatccccataacaccgtcttcgatgcaaaaagactgattgggcgcaagttcgcggatactaccgtgcaaagcgatatgaagcactggccattcagggtagtctccgagggcggaaagcccaaggttcgcgtctgttaccgcggtgaggataagacattctaccctgaagaaatttcaagcatggtcctcagcaagatgaaagaaacagccgaggcgtatctgggccagcccgtcaaacacgcagtcatcaccgtcccagcctattttaacgattcccagcggcaggcaaccaaggatgctggcgctatagccggactgaatgtgctgcgaatcatcaatgagcctacagccgctgcaatagcctacgggttggaccgaaggggggccggagaaaggaacgttcttatatttgatttgggtggcggaacattcgatgtgagcgtgctatcaattgatgccggcgtctttgaggtgaaagccactgcgggggacacacacctgggcggcgaggacttcgacaatcgtctcgtcaaccactttatggaggaattcaggagaaagcacggcaaagatctctctggaaacaagcgcgccctgaggcgcttgcggactgcatgtgagagggcaaagcgtacactgtcatccagtactcaagccactttagagatagatagtctcttcgagggagtggacttctacactagcataacgagagctcgtttcgaagagctatgctcggacctctttcggtccactttggaacctgtcgagaaagcattacgggacgcaaagctggacaaagctcagatccatgatgtagtgcttgttggaggtagcacaaggatcccaaaggtacagaagttattgcaggactttttcaacggcaaggagttaaacaaatcaatcaaccctgatgaggcggtggcctacggggcagccgtgcaggctgccgttctgatgggagacaagtgtgagaaggttcaggatttactgcttttggatgtcgcacccctctcccttggactggagactgctggaggggtgatgaccactttgattcaaagaaatgcaaccatcccgacaaagcagacacaaacttttactacctactccgacaatcagccaggggtgttcatccaggtgtatgaaggcgagagagctatgacaaaagacaataatcttctggggaggttcgagctgtcgggcattcctcccgcacctagaggcgtaccgcagattgaggtaacgttcgacatcgatgccaacggtattctttctgtgactgcaaccgatagatcaactggaaaagctaacaaaataacgatcaccaacgacaagggcagactgtcaaaggaagaggtggagcgcatggtccatgaagccgaacagtataaggcagaagatgaggctcaaagggaccgggttgccgcgaaaaacagtctggaagctcacgtgtttcatgttaaaggttctctgcaggaggaatcactgcgtgataagatccctgaagaagatcgccgtaaaatgcaggataagtgtcgggaggttcttgcttggctagaacacaaccagcttgcagagaaggaagagtatgagcaccagaagcgggaactggagcagatttgccggcctattttttcaaggttgtacggaggacccggcgttcctggcggatccagctgcggaacccaagccaggcagggagatccatctaccggccccattatcgaggaggtggattag

SEQ ID NO: 119595 - DNA, 1860 bp, synthetic construct
  misc_feature 1..1860: note = Description of Artificial Sequence: Synthetic coding sequence
  source 1..1860: mol_type = other DNA
atgcaggccccaagagaactggcagtgggtatcgacctcggcacgacatatagttgtgtcgcctttaccgatactgagagactcgtgggcgatgccgcgaagtctcaggccgcgttgaatccacacaataccgtctttgacgcaaagcggctgatcgggaggaagttcgctgacacaaccgtccagtcagatatgaaacactggcctttcagagtggtcagcgaagggggcaagcccaaagtccgtgtgtgctacaggggcgaggacaagaccttctatcccgaagagatcagctccatggtgctgtctaaaatgaaggaaactgctgaagcctatttaggccagccggtgaaacatgctgtcatcaccgtgcccgcatatttcaatgattctcaacggcaggctactaaagatgcaggagcaatcgcaggactaaatgttctgcggatcatcaatgagccaaccgctgcagctatagcatacggattagaccgccgcggggcaggagagaggaacgttctaattttcgacctgggggggggcactttcgatgtgtctgtcttgtctatagatgccggcgtgtttgaagtcaaggccactgcaggtgacacacatctaggcggggaggatttcgataataggctggtgaatcactttatggaggagttccgtaggaaacatgggaaggatctttccggtaacaaacgcgccctcagacggctgagaacagcgtgtgagcgggctaagcgcacactgtcttcgagcacacaagctacactggaaatagatagcttgtttgagggagtagacttctacacatctataacgagagctcgcttcgaagagttgtgttccgatcttttccgcagcacactggaacccgttgagaaagcactccgagacgcaaaactggacaaggcccagattcacgacgttgtgctggtagggggctcgactcgaatcccgaaagtccagaaactcctgcaggactttttcaatggcaaggagctcaataagtcaatcaaccctgacgaggccgtggcatacggagccgcagttcaggcagccgtgctaatgggcgataagtgtgagaaagtccaggatcttctgctgttggatgtggctccattgtcattaggcttagaaactgccggcggcgttatgactacactgattcagcgcaacgccaccatacctacgaagcagactcaaacattcaccacgtatagcgataaccagcctggtgtgtttatccaggtgtacgagggtgaaagggcaatgacaaaggacaacaatctgctgggccgctttgagctgtctgggatcccccctgcccccagaggtgtacctcagatcgaggttacttttgatatcgacgccaacgggatcctgtctgtgactgctacagataggtctacgggaaaagctaacaaaataactatcactaacgataaggggcggttaagcaaagaggaagtggaacgtatggtccatgaggcagagcaatataaggccgaggacgaggcccaaagagaccgggtagcagccaaaaatagcctggaggcacacgtgtttcatgttaaaggttcattacaggaggaatcactccgagacaagataccagaggaagacaggcgcaaaatgcaggacaagtgcagggaggtgcttgcatggctcgaacataaccagctggccgaaaaagaagagtatgaacaccagaagcgggaactggagcaaatctgtagaccaattttcagtagattgtacggcggcccaggtgtcccaggggggagctcatgcggaacacaggcccgccagggagacccgtcgacaggccccatcatcgaggaagttgattag

SEQ ID NO: 119596 - DNA, 2337 bp, synthetic construct
  misc_feature 1..2337: note = Description of Artificial Sequence: Synthetic coding sequence
  source 1..2337: mol_type = other DNA
atgtccaaaaggaagttgattcccaaactctctattcagtccccagtgctgcataccaacttgaacgtgcagagtacacatccaccactaaagaaggaagacctccatcgcatctccaaagacagtctggagagcgacagcgagagcctgacccaggagattatgtgtcacagcgaatttgatgacaggatccgtggtaatggtatggagcccgattcacttgacgaagaggagtctccaaggtggggctctctacacgagatggaggaggaagcttctggcaaagcagcccagatggctagagagcagaatcatcacacttgggatcaaggtgcgaacaatcgccagcagccgatcgaggacaagtactcagatttgcgctacgatcccaattggaaaagcaagaaagaggagggccagttactgtctgtcgaagctcttccggagtccaccgattcaagtctggaaaacttgccacttgctcctctttacccctctcaggagacctcgatggaattgagtgggggtaaaggcgaacagaaggagtccccccagagtgctgcatccctcctaggctcagagtttctcagcccgaactacgagcatggggcccgaaggtctaaaccgtttagcgaattaagtgatagtgacctggaagagaagagcagttctcttagcccgtatgttaagagttcttcgtctcataatgaggtcttcctgcccggatcccgtggtcccaggcggaggaagtcaaagcagcactttgtagaaaaaaacaagctgactctcggactacccacccctaaaaccgatagttacttgcagctgcacaataagaagcggggtgagtcccacccagaacagatttcctatcccgtgcgagttaccgacaaaacttccattcaaaatgcaaaggagatggaaaatgcggcaattgatcctgaggataaatggcatcagagggctcagcagctgaagaactatcaggagcattggtcacagtacgagagcaccaaatcctctaatgtacctcggggtcagcccagtgacatggtaaatgaccaccagccttctaggaggcccgcaaagctgaagatccggaagcaatgcaaacatcaaaacgggctcaaatcctcgactacagaagaagtgacagcaagtcagggaaaccaaaataacccacctcgacaacagcagaatcagaataaaccccttgataccagtacaaaaccagagagcatcgtaatcatgcacgcgtctaacaatgacgttcaggcttccagggccctgcggagccacaacctgaaggagacctcaaacactttcgcgccgcctaaacaggcattcgacaaggtgctaagtaaaaactcaactgggtgcgacagtggcttgaacgttaacaaagaaaggggacacaaggaccaggaggagaagaggttcagctaccagcagctccacaccctaagcgatatggacctgaataatctgaacgagttgtccaagcggcacgtgctactttcccagaagggttcccagttcgtgtaccacatcaatacacacggatcaacgaaaaacaagaaacaactgaagcaaccatatacagagacgaagtaccgaaacctggagatgctgtggaaattccattcatctagtgattctcaaaccgttagggccagtccagactcatggttaacccaaattatggaacagcatcagcaggcccttgtgcagctgaccgacgtgcagccctctgagggggctcttagctccgtaaccttaccacctatactttcacgagtggagagtgaaagtcaactcagctctgagcgttctcagcgaaaccaggtgaagattagcagatctaacagcgagggttatctcttccagctggagaagggcaagaaacataagaagcgttcctccagtaagaacactaagctcaaaggctatcagaaacgagacgttaagctgggtggattgggcccagatttcgaaagtattcgcgacaagacccagaaattaatccagcagaaagaatatgctaaacaggtcaaagagtacaacatgaagaccttgtctattcttagtaagccacagaccgagaagactcaaaagaagtctgctatcccacgtcagaaggctctggaatatgccaagacaatccccaagccgaaacccagcaacctgacccatcaggcctccaaagagcagaagaaccccacatatgcaggtaaggaagagtcgttacctgaaatatctctcctcgagattcttcagaaccgacatgaacgcgagaagcaagccgtggccgctttcaaggtacttcacatagtgtag

SEQ ID NO: 119597 - DNA, 1482 bp, synthetic construct
  misc_feature 1..1482: note = Description of Artificial Sequence: Synthetic coding sequence
  source 1..1482: mol_type = other DNA
atgtcgaagggccctgcggtcggcatcgacttgggtacaacctacagctgtgtaggggtgtttcagcacggcaaggtggagatcattgccaacgaccaaggtaacaggacaacaccgtcctatgtagctttcaccgacacggaacgtttgattggggatgctgctaaaaatcaggtggcaatgaatccaaccaacaccgtctttgacgcaaaaaggctaatcggaagacgcttcgatgacgcagtggtgcaaagtgatatgaagcattggccttttatggtggtgaatgacgctgggaggcctaaggtacaggttgaatacaagggcgaaactaaatctttctaccccgaggaggtgagtagcatggtgctcacaaaaatgaaggagattgccgaggcttatttagggaagactgtgactaatgcagtcgtcactgtacccgcgtattttaatgatagccagaggcaagctaccaaagatgcggggactattgccggcttgaacgtccttaggatcattaacgaacccacggctgctgcaattgcatatggattagataaaaaagtcggtgcggagagaaacgttctcatattcgacctggggggtggaaccttcgacgtctcaatcctcaccatcgaggacgggatattcgaagtcaaatccacggcaggcgacacacatctggggggagaggactttgataatagaatggtaaatcacttcatcgcagagtttaaaaggaagcataagaaagacattagtgaaaacaaacgggctgttcgtagactgagaactgcctgtgaaagggctaaaaggaccctctcttccagcacccaggcatccattgaaatcgactccctatatgaaggcattgatttttatacatccatcactcgggctagatttgaagaacttaacgccgatctgttcagggggacactggaccctgtcgagaaggccttaagggatgccaagctagataaatctcagatccatgatattgttctagtgggtggttctaccaggataccgaagatccagaaactgcttcaagactttttcaacggaaaggagctgaacaagtcaattaatccagacgaggccgtcgcgtacggagccgcagtccaggccgcaattctgtccggagataaaagcgagaatgtgcaggacctcctcctcctcgatgtaactccgttgtcacttggcattgagacggcaggcggggtgatgaccgttctgattaagcggaacacaacaattccaaccaagcaaacacaaactttcaccacctacagcgacaatcagcccggagtcctcattcaagtttatgagggagaaagagcaatgactaaagataataatctgctggggaagtttgagctgacaggtatgccaggtggcatgccgggcgggtttcccggggggggcgccccaccctcaggaggagcaagcagcggcccaactatcgaagaagtcgattag

SEQ ID NO: 119598 - DNA, 1884 bp, synthetic construct
  misc_feature 1..1884: note = Description of Artificial Sequence: Synthetic coding sequence
  source 1..1884: mol_type = other DNA
atgagcaagggacctgcagtcggaattgacctgggaacaacctacagttgcgtcggggtatttcagcacgggaaggtggaaattattgcaaatgatcaagggaacagaactacccccagctacgtggccttcacggataccgaacggttaatcggcgacgctgctaagaatcaggtggccatgaaccctacaaacacagtgtttgacgccaagagactgattggtcgcaggttcgacgatgcagtcgtgcagtcagatatgaaacactggcctttcatggtggtcaacgacgccggccgccccaaagtacaggtggaatataaaggtgagactaaatctttttaccctgaagaggtttcctcgatggttctgactaaaatgaaggagatcgctgaggcatatctgggcaaagccactaaagacgcaggcaccattgcaggactaaatgtcttgcgtatcataaacgaacccaccgcggccgcgatcgcttacggattggacaagaaagtgggggccgagcgcaacgtgttaatttttgatctgggcggtggaacatttgatgtgagcatcctaactatagaggacggaatcttcgaagtaaaaagcactgcgggcgacactcatctggggggtgaggattttgataacaggatggttaaccactttatagcagagttcaagcggaagcataagaaagacattagtgagaacaagcgcgcagtgcgccgcctcagaaccgcttgtgagagagctaagcggacgctgagcagctccacacaagcatctatcgaaatcgactccctgtacgagggaatcgacttttatacttcaatcacacgggcccgttttgaggaacttaacgccgatctcttcagggggactctggaccctgtggaaaaagcactccgcgatgctaagctggataaatcccaaatccatgatatagttctggtgggcggaagtacccggatccctaagatccagaagctcctgcaggacttcttcaatgggaaagaattgaataaatcaatcaatcccgatgaggctgtcgcctacggagctgctgtgcaggctgcaatcctgagcggcgataaatccgagaacgtacaggatttattgctgctagatgtaacaccactctcgctgggcatagagaccgccggaggtgtaatgacagtgttaataaagagaaacacaaccatccccaccaaacagactcagactttcacaacctactccgataaccaacctggagtcctcatccaagtatacgagggcgagcgggccatgactaaggataacaatctgctcggaaagttcgaactgaccggcatccccccggcgccaagaggcgtacctcaaatcgaagtcacattcgatatagatgctaatggtattctgaacgtctccgcagtagacaaatctacaggaaaagaaaataaaattaccattaccaatgacaagggccgcctgagcaaagaagatattgagagaatggtgcaagaagcagaaaaatataaggccgaagatgaaaaacaaagagacaaggtttcatctaagaactccctggaatcctacgctttcaacatgaaggccacagttgaggatgagaagctgcaaggcaagattaacgacgaagacaagcagaagatactggataagtgcaatgaaattattaactggctcgacaagaaccaaaccgcagaaaaggaagaatttgaacaccaacagaaagaattggagaaagtgtgcaaccccattatcacgaaattatatcagtctgccggggggatgccaggcggtatgcccggtgggttcccgggcgggggcgcgcccccatcagggggtgcatcatctggacctactatcgaagaagtggattag

SEQ ID NO: 119599 - DNA, 1941 bp, synthetic construct
  misc_feature 1..1941: note = Description of Artificial Sequence: Synthetic coding sequence
  source 1..1941: mol_type = other DNA
atgtctaaaggtcccgccgttggaatcgatctgggtacaacctactcctgtgtgggagtgttccagcacggtaaagtagagattattgcgaacgatcaaggaaaccgcaccaccccttcttacgtggctttcacagacacagagaggcttatcggagatgcagccaagaatcaggtggccatgaatcctacgaacaccgtgttcgatgcaaaacgcctgattgggagacgatttgatgatgcagtggtgcaatcagacatgaagcattggccatttatggtggtcaacgacgccggcaggcccaaggtccaggttgaatataagggggagacgaagtcattttaccctgaggaggtgtcttcaatggttctgactaaaatgaaggagattgccgaagcttacctgggcaagacagttacgaatgcggttgtgacagtgccagcctatttcaatgacagccagaggcaagccacgaaggacgcagggacgattgcgggcctgaacgtactgaggattatcaacgaaccaacagccgctgccatagcatacggtctcgataagaaagttggagctgaaagaaacgtcttgatcttcgatctgggcggaggtacatttgacgtatctattttaactattgaggatggaatctttgaggtgaaatcgacagccggtgatacccaccttggcggcgaggacttcgacaacagaatggtgaaccatttcattgcagagttcaagcgcaaacataaaaaagacatctcggagaataaacgggcggtgcgccggctaaggaccgcatgtgagagggccaaaaggactctgtcttcctccacgcaggccagcattgaaatcgactcattatatgaaggtattgatttttacacttctattacgcgcgcaagattcgaggaactgaatgcggatctgtttcggggaacattagacccggtggagaaagctcttcgagacgccaagttggataagtctcaaattcacgatattgtgctagtgggcggttccactcgcattcccaagattcagaagctgcttcaggatttctttaatgggaaggagcttaataaaagcatcaacccagacgaagctgtggcgtatggagcagcagtgcaggcggccatattgagcggagataagagcgagaacgtgcaggacttattactcctggatgtgaccccactgagtctgggtatcgagacagctggcggcgtgatgaccgttctgattaagcgaaataccacaattcccacaaaacagacccagaccttcaccacttattccgacaatcaacccggagtactgatacaagtgtacgagggagaacgagcgatgacgaaagacaacaatctgttgggcaagttcgagctgaccgggatcccccctgcgccccgcggtgtgccccagatagaagtcaccttcgacatcgatgccaacggcattctgaatgtgtccgcagttgacaagtccacaggcaaggagaataagataacaatcacaaatgataaaggcaggctttctaaagaggacattgagagaatggtccaagaagccgaaaagtacaaagccgaagacgagaagcaaagggataaggtgagcagcaagaactctttagagtcttacgctttcaatatgaaggcaaccgtcgaggatgaaaaacttcagggcaagatcaacgatgaggacaaacagaagatcctggataagtgcaatgaaatcataaactggctcgataaaaatcagactgccgagaaagaggaatttgaacaccaacagaaagagctcgagaaggtttgtaacccaatcattactaagctgtatcagtcggccgggggcatgcctggaggaatgcctggcggattccctggggggggagcaccacccagcggcggagccagcagcggccccaccatcgaagaagtggactag

SEQ ID NO: 119600 - DNA, 1503 bp, synthetic construct
  misc_feature 1..1503: note = Description of Artificial Sequence: Synthetic coding sequence
  source 1..1503: mol_type = other DNA
atgagcaagggccctgctgtgggcattgacctcggcacaacatattcctgcgtgggggtgtttcaacatggcaaggttgagattatcgcaaacgatcaaggaaatcgcacaactcctagttacgtggccttcacagatactgagaggttaattggcgacgcagctaagaatcaggtcgcaatgaaccccacaaacacggtttttgatgccaagaggctgatcggccgcaggtttgacgacgcagtcgtacaatctgacatgaagcattggcctttcatggtcgttaatgatgccggacgcccaaagcataagaaggacatatctgagaataagagggccgttcgtcgtcttcggactgcgtgcgagagggccaagcgaaccctctcgtcctctactcaggcgtccatcgagatagattcactttacgagggcattgatttctacacttcaattacgagggcacgctttgaagagcttaatgcagacctcttccgggggactctggaccccgtggagaaagccttaagggacgcaaagctcgataagtcccagatccacgatatcgtcctcgtaggtgggtccacacgaattccaaagattcaaaaactgctccaggactttttcaacggcaaagagctcaataaatcaatcaatccagatgaggcggtcgcctacggcgcagcagtgcaggctgcaattctgagcggggacaaatcagagaatgtgcaggaccttctgctgctggacgtgaccccactgtcactagggatcgagactgctggcggagtcatgactgtgctgatcaagcgtaacaccaccatccctaccaagcagactcaaacatttaccacctactccgataatcagcctggcgtgttgatccaggtctacgagggcgagcgtgcaatgacgaaggacaacaatttactcgggaagtttgaactaacagggatcccccctgcacccagaggtgtgccacagattgaagtaacgtttgacatcgacgcaaatgggatcctgaatgtgtccgcagttgacaaatccacgggcaaagaaaacaagataaccataaccaatgataaggggcgcctaagtaaggaggatattgagagaatggtgcaggaggctgaaaagtacaaggccgaggatgagaaacagcgagataaggtgtccagtaagaacagtttggaatcttatgctttcaatatgaaagctaccgttgaggatgagaagctgcagggaaaaattaacgacgaggataagcagaagattttggataagtgcaatgaaatcatcaactggttggacaagaaccagacagccgagaaggaggaattcgagcaccaacagaaggagctcgaaaaagtttgtaacccaatcattacaaagctttaccagagcgctggaggcatgcccggaggaatgcctggaggatttcctgggggcggtgcccctccaagtggcggagcctccagcgggcccacgatcgaggaggtggactag

SEQ ID NO: 119601 - DNA, 1233 bp, synthetic construct
  misc_feature 1..1233: note = Description of Artificial Sequence: Synthetic coding sequence
  source 1..1233: mol_type = other DNA
atggtaaatcactttatcgcggagttcaaacgtaagcataaaaaagacatatctgaaaataagcgtgcggtacggcggcttcggacagcttgcgagagagccaaaaggaccctgtcctcctccacgcaagcgagcatcgagatagacagcctgtatgaagggatcgacttttatactagtatcacaagagcaaggtttgaagagctgaacgcagacttgtttaggggaacactggaccccgtggaaaaagccctaagggatgctaaactggacaaatcccagattcatgatatagtgctggtgggcggtagcaccaggattcccaagatccagaaactgttacaggatttttttaacgggaaggaactgaacaagtctattaacccagacgaggctgttgcgtacggagcggccgtccaggctgctatcctgtccggcgacaaatccgagaacgtccaggaccttctactgctggatgttacacctctatccctcgggattgaaaccgcgggaggggtcatgactgtactcattaaaaggaacacaacgatacctactaagcagacccagacattcacaacttattcagataaccagcctggcgtgcttatccaggtgtacgagggcgagagagctatgactaaggacaacaatctgctgggaaaatttgaattgacaggcattcccccagcccctaggggcgtacctcaaattgaggtgacattcgatatcgacgccaatggcattcttaatgtgtcagccgtggacaagtctactggtaaggagaataagatcactattacaaacgataagggtaggctgagtaaggaggacatcgagagaatggtccaggaggccgagaagtacaaggctgaagatgaaaagcagcgtgacaaagtgagcagcaagaactctctggagtcctacgctttcaatatgaaggccacagtagaagatgagaagttgcagggcaaaatcaatgatgaagataaacagaaaattctagacaagtgtaatgaaatcattaactggttggacaaaaatcagacagccgagaaggaggagttcgaacaccagcagaaagagttggagaaggtctgcaaccctatcatcacgaagctgtatcaatcagctggtgggatgcctggcgggatgcccggtggttttccaggcggcggcgcccctccctcaggtggagctagctcagggcctacaatcgaagaagtcgactag

SEQ ID NO: 119602 - DNA, 1941 bp, synthetic construct
  misc_feature 1..1941: note = Description of Artificial Sequence: Synthetic coding sequence
  source 1..1941: mol_type = other DNA
atgtcaaagggtcctgccgtgggaatcgacctgggtactacctacagttgcgttggggtgtttcagcatgggaaggtggagattatcgccaatgatcaaggcaataggaccacgcctagctacgtagccttcaccgatactgaaagactgatcggagacgctgccaaaaatcaggtggcaatgaaccctacgaacacggtgtttgacgccaaacgcctaattggaagacgattcgatgacgccgtagtacaatccgatatgaagcattggcctttcatggtggtaaacgacgccggccgcccaaaagtgcaagtcgagtataagggtgaaacaaaaagcttctaccctgaggaagtctcttccatggtcttgactaaaatgaaggaaatcgctgaggcataccttggcaagacagtgaccaacgctgtcgtcacagtccctgcctacttcaatgactctcagaggcaggccacaaaggatgccggaaccattgccggcctgaatgtgctgcgcatcataaatgaaccaacagccgcagctatcgcttacggcctagataaaaaggtgggcgccgaaagaaatgtgctaatctttgacctcgggggaggaacttttgatgtgtctatcttgacgattgaagatggaatctttgaggttaagtccacagcaggtgatacacatttaggcggggaggactttgacaaccgaatggttaatcacttcatcgcagaatttaagcgaaagcataaaaaggacataagtgaaaataagagggctgtgaggcgcttgcgcaccgcctgtgagagggccaaaagaacgctgtcaagcagcacacaggcctccatcgaaatcgattccctctatgagggcattgatttctatacttctatcacacgcgcccggtttgaagagttaaacgccgacctatttcgcggtacgctcgatccagttgaaaaggcattacgcgatgcgaagttggacaaaagccagattcacgatatcgtgctcgtgggcgggtctactcgcattcccaaaatacagaaactgctgcaggatttcttcaacggtaaggagttgaataagagcatcaatcccgacgaggctgtggcgtatggggccgcggtgcaggcagctatcttaagtggggataagagtgaaaacgtccaggatttgctgttattggacgtgacccctttgagtctgggaattgaaaccgcaggcggagtgatgacagtgctgatcaagcgtaacactacaatccccactaagcagacgcagacattcacaacgtattcggataatcaacctggggtgctcatccaggtgtatgagggcgagcgtgcgatgaccaaagataataatctgcttgggaagtttgagttaacgggaatccctcccgcgcccagaggggtgccacagattgaagtaacattcgatatcgacgcaaacggcatcttgaatgtgagtgcagttgacaagtccaccgggaaagaaaacaaaatcaccatcacgaacgacaaaggtaggctctccaaagaggatattgaacggatggtgcaagaggctgaaaagtataaggcggaggatgaaaagcagcgtgataaggtgagctcgaaaaattccctcgagtcttacgcctttaatatgaaggccactgtggaggacgaaaaactacaaggaaagataaatgatgaagataagcagaagattctggacaaatgcaacgagattatcaattggttagataaaaatcagacggctgaaaaagaagaattcgagcatcaacagaaagagctcgaaaaggtgtgtaacccaataatcactaagttgtatcaatctgctgggggcatgcctggtggcatgccgggaggctttcctgggggaggggcgcccccctctggcggtgcttccagtggtcctaccatcgaagaagttgattag

SEQ ID NO: 119603 - DNA, 2040 bp, synthetic construct
  misc_feature 1..2040: note = Description of Artificial Sequence: Synthetic coding sequence
  source 1..2040: mol_type = other DNA
atgatctctgccagccgagctgctgcagctaggttagtaggcgctgcggcttctcgcgggccgacagcagcacggcaccaagattcctggaatggcctctctcacgaggctttcaggctggtcagcagacgggattacgcatccgaggccataaagggtgccgtggtaggcatagacttggggaccaccaattcttgcgtcgccgttatggagggcaagcaggccaaggtcttggagaacgctgagggtgcccgaacaacaccttctgtggtggccttcaccgcagatggcgagagactcgtcggaatgcccgctaaaaggcaggccgtcaccaaccctaataacactttctatgcaaccaagcggctgattgggcggagatatgacgatccggaagtacaaaaggatatcaaaaacgttcctttcaaaatcgtacgagcatccaacggagatgcatgggtggaggctcacggtaaattgtacagcccatcgcaaatcggggcgtttgttctcatgaaaatgaaagaaacggcagaaaattatctggggcatacagctaagaatgccgtaatcactgtccccgcatacttcaacgattcccagcgtcaggccactaaggacgccgggcagatcagcgggttgaacgtgctccgcgtcattaatgaaccgacagcagcggccctggcatacggtctggataagtccgaggataaggtgattgctgtctatgatctgggtggaggtacctttgatattagcattctggaaatccagaaaggtgtatttgaagtgaagtccacaaacggggatacattcctcggaggggaggattttgatcaggctctgctgcgccacatcgtcaaggaattcaaacgagagacaggagtggacctgacaaaggataacatggctctgcagagagttcgcgaggctgctgaaaaggccaagtgtgagctgtcttccagtgtgcagacagatatcaatctgccataccttaccatggactcctccggtccaaaacatctgaatatgaagctcaccagggctcagttcgagggcattgtgacggacctcatccgccgcacaatcgctccctgtcagaaagctatgcaagatgccgaggtgagcaagagcgatatcggagaggtgatcttagtgggcgggatgactcgtatgcccaaagtgcagcaaactgtgcaggacctgttcgggagagccccctcaaaggccgtcaatccagatgaggctgtggcaataggggccgccatacaggggggtgtactggccggcgacgttaccgacgtgctgctattggacgtgacaccactgagtctgggcattgagactttgggcggggtgtttaccaaacttatcaatcgaaacacaacaatcccaaccaagaaatcccaagtctttagcaccgccgccgacggtcaaacacaagtggagattaaggtgtgccagggcgaaagggagatggctggggataacaaactcctcggacagtttaccttaattggcataccccctgccccacggggagtaccacaaatagaagtgacatttgatattgatgcgaacggtattgtacatgtcagcgcaaaggacaagggtacagggagggaacaacaaatagttattcagtcatctggcggcctttctaaggacgacatcgagaatatggttaagaatgctgagaagtatgcagaggaagatcggcgcaaaaaggaacgtgttgaggccgtgaacatggcagagggcattatccatgacactgagacaaaaatggaggaatttaaggaccaactccccgccgacgaatgtaataaactcaaggaagaaattagcaaaatgagggagctgctggcccgcaaggattccgagaccggtgaaaatattagacaggccgccagttccttacagcaggcatctttgaaactctttgaaatggcgtataagaagatggcctccgaacgcgagggttcaggcagctctggcacaggtgaacagaaagaagatcagaaggaagaaaagcagtag

SEQ ID NO: 119604 - DNA, 1998 bp, synthetic construct
  misc_feature 1..1998: note = Description of Artificial Sequence: Synthetic coding sequence
  source 1..1998: mol_type = other DNA
atgatctctgccagccgtgctgcagcagcccgccaccaggactcatggaacggcctgtcgcacgaagcattcagactggtgagtcgcagagactacgcctcagaagctataaagggcgccgtagtaggcattgacttgggcaccacaaactcctgtgtagcagtgatggaaggcaaacaagccaaagtgctggaaaatgccgagggggctaggacaacaccaagtgtggtggcatttacggcggacggcgagcgattagtggggatgcccgccaaacggcaggccgtgacaaatcccaataatacattctacgccaccaagcggttgatcggccgcaggtacgatgatcccgaggtccagaaagatataaaaaacgttcccttcaagatcgtgagggcttccaacggcgacgcgtgggtggaggcccacggtaagctgtattcacctagtcagataggcgcctttgttctgatgaagatgaaggaaaccgcagagaattacctgggacacactgccaagaacgctgtaatcacagtgccggcttatttcaacgatagtcaacggcaggctactaaggacgcaggccagatttctggacttaacgtgctcagggttattaacgagcctacagccgccgccctggcatacgggctggataagtctgaagataaagttatcgctgtgtacgatttggggggcgggaccttcgacatcagcatcttagagatccagaagggcgtgtttgaggttaagtccacaaatggtgacaccttcttaggcggcgaggatttcgaccaggctctgctgaggcatatagtgaaggagtttaagagggagaccggagtcgatttaacaaaggacaacatggcacttcaacgcgtcagagaagccgccgaaaaggcaaagtgtgaactctcatctagcgtacagactgacataaatttgccctatcttacaatggacagctccgggcccaaacatctcaacatgaagctcacgcgggctcagtttgaaggcattgtgaccgacctcatcaggaggacaatcgctccctgccagaaggcaatgcaggatgctgaggtatctaagtccgacatcggcgaggtgattttggttggtgggatgacccgaatgcccaaggtgcagcaaactgtgcaggatctatttggacgtgcccctagcaaagccgtgaacccagacgaggccgttgctattggggcggcaatccaggggggggtcctggccggtgacgtcaccgatgtgctcctgttagacgttacccctcttagcctcggcatcgagactctcggtggggttttcaccaagctaattaataggaacaccactattcctacaaagaaatcccaagttttctccaccgccgcagatggccagacacaggttgagatcaaggtatgtcagggagaaagagagatggctggagacaataaactgctcgggcagtttactctgattggcatacctcccgctcctagaggggttccccagattgaagtgacgtttgacatcgacgcaaacggaattgtccatgtgagcgccaaggacaaaggaacgggtagagaacagcaaatcgttattcagtcctccggcgggctgagcaaggacgacatcgagaacatggtgaagaatgccgagaagtacgccgaagaggacagaagaaaaaaggaacgggtggaagctgttaacatggccgaaggcattatacatgataccgagacgaagatggaggaattcaaggaccaactgccggctgacgaatgcaacaagctaaaggaagagataagcaagatgcgggagctgctggcgcggaaggactcagaaacaggggagaatatccggcaggctgcgagctctttgcagcaggccagcctgaagcttttcgagatggcctataaaaagatggccagcgagcgggagggctccggatcatcaggtacaggagagcagaaagaggatcagaaagaggagaaacagtag

SEQ ID NO: 119605 - DNA, 1899 bp, synthetic construct
  misc_feature 1..1899: note = Description of Artificial Sequence: Synthetic coding sequence
  source 1..1899: mol_type = other DNA
atggccctcgtgatgagacttttagatttatttcagggcggtatcatgcatcagaaacaatcccgggaacaattactggtcctgatctgggttttacctaccccagcctggcaactgtggaaggtaaacaagcaaagatgctggaggatgcccaaggtgcctgagccccccctgcagctctggcctctacagcagatggtcagcgatctgctagaatgtcgaccttcggatcgtctttccccgacacagaccattcacttcatgctcccttccgtatccctggcaggcgacatgatgattctgaagtaccgcaagactctgaaaatgtttccacttaagctatccgtgccccctatggtgatgcccgtgttgatgaaaatgaaagagaccgccgagaactacctggggcacaccgccaagaacgccgtgattacagttcctgcctactttaacgactcgcagcggcaggccaccaaggacgctgggcagataagcggcctgaacgtgctccgggtcatcaatgaacctacagcagcagctcttgcgtacggactggataagagcgaggacaaagtcattgctgtgtacgatctggggggtgggacttttgatatttcaatcctagagatccagaagggcgttttcgaagtgaagagtaccaacggcgacacatttttgggtggggaggattttgatcaggcactgttgcgtcatattgtcaaggaattcaagcgggagacaggggtggatctgacgaaggataacatggctcttcagagggtgcgcgaagccgctgagaaggcaaagtgtgaactgagctcgtcagtgcagacagatataaatttgccctacctgacgatggatagcagcggccctaagcatcttaatatgaaactgactcgtgctcagtttgaggggatcgtaacggacctaatcaggcggacgatcgcaccctgccaaaaagcaatgcaggatgcagaagtgtccaagtccgatattggtgaagtgatactggtgggcggcatgacacgcatgcctaaagtccaacagaccgttcaggacctgtttggccgggccccttccaaggccgtcaatccagatgaggcggtagccatcggagctgcgatccagggcggtgtgctggccggtgatgtgaccgatgttctccttctggacgtcaccccactgtcgctgggaatcgaaacactcggaggtgtgttcacaaaacttataaaccggaatacaacaatacccaccaaaaagagtcaggtgttctctaccgcagccgatgggcagacccaggtggagattaaggtttgccaaggcgaacgtgagatggccggggacaacaagctgctggggcagttcacactgatcggtatcccccctgctccacgaggggtgccccaaattgaggtcacattcgacatcgacgctaacggtatcgttcatgtgtcagccaaagataaggggaccggccgcgaacagcagatcgtgatccagagttccggaggtctgtcaaaggatgacattgagaacatggtgaaaaatgcagaaaaatacgcagaggaagataggagaaagaaggaacgggtggaggccgtgaatatggctgagggcattattcacgatactgaaaccaagatggaagaattcaaagatcagctgcccgccgatgaatgtaataagttaaaagaggaaatcagcaagatgagagagctgcttgcacgcaaggactccgagaccggcgaaaatatcagacaggccgcctcctcactccagcaagcctctttaaaacttttcgagatggcgtataagaagatggccagcgagcgggaaggatcaggaagtagcggtaccggcgagcaaaaagaggatcagaaggaagagaaacaatag

SEQ ID NO: 119606 - DNA, 2175 bp, synthetic construct
  misc_feature 1..2175: note = Description of Artificial Sequence: Synthetic coding sequence
  source 1..2175: mol_type = other DNA
atgcctgaagaagtgcaccacggcgaggaggaagtggagacattcgcctttcaggccgagattgctcagcttatgagtctcattataaacacattttacagcaataaggaaatcttcttgcgggaactaatatctaatgctagcgacgccctcgataaaatacggtacgaatccctgactgacccttcgaagttggactcaggaaaagaactgaagattgatattattcctaacccccaagaacgtaccctcacattggtggacactggaatcgggatgacgaaggcagatttgattaataatcttgggacaatcgccaaatctggcacaaaggcttttatggaagcccttcaagccggcgcagacatttctatgattggccagttcggcgtcggtttttatagcgcatatctggttgctgaaaaggtggtggtcataacaaaacacaacgacgacgaacaatatgcctgggaatcttccgcgggcggaagcttcactgtgcgcgctgaccacggagaaccaataggacggggcactaaagttatcttacacctgaaagaagaccagactgagtacctggaagagcgccgagtgaaggaggttgtgaaaaaacactcgcagttcatcgggtatcccatcaccttgtacctggaaaaagagcgggaaaaagagatttctgatgatgaggccgaagaagaaaagggggagaaggaggaagaggataaagacgacgaggaaaaacccaaaattgaggatgtcggctccgatgaagaggacgattccggaaaagacaagaaaaaaaagaccaaaaagatcaaagaaaaatatattgaccaagaagagctgaacaaaaccaagcccatctggacaagaaaccccgatgacatcacccaggaagaatacggcgagttctacaaatccctgaccaacgactgggaggaccatctggcagtcaaacatttctctgtagagggacagctggaattcagggcactgctcttcataccccgacgcgccccctttgatctgtttgaaaataaaaagaaaaaaaacaatataaaactgtatgtgaggcgagtgttcataatggacagttgcgacgagctcatccctgagtacctgaatttcatccgcggcgtagttgatagcgaggaccttcccctcaatatttcacgcgaaatgctgcagcagtcaaagatactgaaggtcatcaggaagaacatcgtgaagaagtgtttagaactcttcagcgaactggcagaggacaaggaaaattacaaaaaattctacgaggctttcagtaagaatctgaagctgggtattcatgaagacagcactaatcggcgaagactgtccgaactcctgagatatcatacctcccaatccggagacgaaatgacgtcgctgtccgagtatgtgtctcgcatgaaggagacacagaaatctatttactacataactggcgagtcgaaggagcaagtggccaactctgcctttgtggaaagggtccgcaagagaggatttgaggtggtctacatgactgagcctattgatgagtactgtgtccagcaattgaaagaatttgatggtaaatctctggtgagcgtgacaaaagagggactcgaattgccagaagacgaggaagaaaaaaagaagatggaagaaagtaaagccaaatttgaaaacttgtgcaagttgatgaaagagatcctggacaagaaggtggagaaggttaccatcagtaatcgccttgtgagctctccatgctgcatcgtgacaagcacatatgggtggacagcaaatatggagagaattatgaaggcacaggcactccgcgacaactctacaatggggtatatgatggccaagaaacatttggaaattaatcccgatcaccccattgtggaaacactcaggcagaaagctgaggctgataagaatgacaaggcggtgaaggacctggtggttctgctcttcgagacggctctgctgtctagtggtttttccctggaggacccacagacacactccaacaggatttatcgcatgataaagctggggctggggatcgacgaagacgaggtggcggcggaggagccaaacgccgccgtccccgacgaaattccgccgctggagggcgacgaggacgcaagccggatggaagaggtagactag

SEQ ID NO: 119607 - DNA, 2175 bp, synthetic construct
  misc_feature 1..2175: note = Description of Artificial Sequence: Synthetic coding sequence
  source 1..2175: mol_type = other DNA
atgccagaagaagtgcatcacggggaagaagaagtggaaactttcgcctttcaggctgaaatcgcacagctgatgtccctgatcataaacacattctacagtaacaaagagatattcctgcgcgagcttatcagcaacgctagcgacgcccttgataaaatccgctacgagtcattgaccgatcctagtaagctggatagtggaaaggaactgaagattgacattattcccaacccacaggaacgtacactgacgctggtggatacaggcataggcatgaccaaagccgacctcatcaacaatcttggaacaattgccaaaagcggtactaaggcatttatggaagcccttcaggctggcgccgacatctccatgatcggccagttcggggtcggattctattctgcttacctggtcgcagagaaagtggtagttattacaaagcacaacgacgacgaacagtacgcctgggagtcctctgctggcgggtcgttcacagtgcgagctgaccatggagagccaatcgggcggggaactaaggtgatccttcatctgaaagaagaccagacagagtatctggaggagagaagagttaaggaagtggttaagaaacacagccagttcatcggctatccaattactctttacctggagaaagagcgggaaaaggaaatttcagacgacgaggccgaagaggagaagggagagaaggaagaggaggacaaagacgatgaagagaaaccaaagatcgaggatgtggggagcgacgaagaggatgactccggcaaggataaaaagaaaaagaccaagaaaattaaagagaaatatatcgaccaggaagaactgaacaaaaccaagcccatctggacacggaatcccgatgacattacacaggaagagtatggcgagttctacaaatctttgactaacgattgggaggaccacctcgccgtcaaacatttttcggttgaaggacagctcgaattccgcgcgttattattcattccccgaagggcacctttcgacctcttcgaaaataagaagaaaaagaataacatcaagctgtacgtgagacgggtgtttatcatggattcatgcgatgagctgattcccgagtatctcaacttcatccgcggggtggtggattccgaagacctgccgctcaacataagcagggaaatgttgcaacagtccaagattttgaaggtgatccgcaaaaatatagtgaagaaatgcctggagctcttttctgagctcgcagaagataaggagaattacaaaaagttttacgaggcttttagtaagaatcttaaactcggtattcatgaagattctaccaacaggagacgtctgtcagaactgctgagatatcacaccagccagtccggcgatgaaatgacgtcactctctgaatatgtctcacgcatgaaggaaacacagaaaagcatctattatattactggagagagcaaggagcaggtcgccaattcagcctttgtcgagagggtgaggaagcgaggctttgaggtggtgtacatgacagagccaatcgacgagtactgcgtgcaacagctcaaagaattcgatggcaaatcccttgtgagcgtgacaaaggagggcctcgaactgcccgaggatgaggaggagaagaaaaaaatggaggagtctaaggctaagtttgagaacctgtgcaagcttatgaaggagattctcgacaagaaagtagaaaaagtcacgattagcaatcgactggtttcctcaccctgttgtatcgttacgtctacctacggatggaccgcgaatatggaaagaataatgaaggctcaggcactccgggataattcaactatgggctatatgatggccaagaagcacctggagatcaatcctgatcatccgattgtggaaactcttaggcaaaaagccgaggccgacaagaacgataaagctgtgaaggatcttgttgtcttgcttttcgagacagcactgctttcctctgggtttagccttgaagatccccagacgcatagtaaccgcatctaccgaatgattaaactgggcctgggaatcgacgaggatgaggtggccgccgaggaaccaaacgcggccgtgcccgatgaaatcccccctctggagggcgatgaagatgccagtcggatggaggaggtggactag

SEQ ID NO: 119608 - DNA, 465 bp, synthetic construct
  misc_feature 1..465: note = Description of Artificial Sequence: Synthetic coding sequence
  source 1..465: mol_type = other DNA
atggattcatgtgacgaactgatacctgagtacctgaacttcattcgaggggtggtagattcagaggacctccccctcaacattagcagggagatgctgcaacaatctaagatcttgaaggtaattaggaaaaacattgtcaaaaagtgcttagaactcttttcagaactggcagaggataaggaaaactataagaagttttatgaggcattttcgaaaaacctcaagttaggaattcacgaggattccacaaaccgcagacggctgtctgaattattaaggtatcacaccagtcagagcggcgacgagatgacctccctgagcgaatacgtcagcagaatgaaggagacgcagaagtctatttactacatcaccggggaaagtaaagagcaggtttgcccttgccctacttggctccctctgctggtaagctccgtctttttccctctgctgtcgctgtgctag

SEQ ID NO: 119609 - DNA, 489 bp, synthetic construct
  misc_feature 1..489: note = Description of Artificial Sequence: Synthetic coding sequence
  source 1..489: mol_type = other DNA
atggattcttgtgacgagctgatacccgaatacctcaactttattagaggtgtggtggattcggaggatcttcctcttaacatctcccgggagatgctccaacagtctaagatcctgaaggtgatccgcaagaatatcgtcaaaaagtgtctagaactcttctccgaactggctgaggacaaggagaattacaagaaattctatgaagcattctctaagaatttgaagctgggtatccacgaggactctactaatagacggaggctgtctgagttactgaggtaccacacttcgcagagcggcgacgagatgacatccctctctgagtatgtatccaggatgaaagagacacagaaatccatctactacatcaccggagaatccaaggaacaggtggcaaattcggcatttgtcgagcggtgtccttgtcccacttggctcccgctccttgtctctagtgtgtttttcccactactcagtttgtgctag

SEQ ID NO: 119610 - DNA, 552 bp, synthetic construct
  misc_feature 1..552: note = Description of Artificial Sequence: Synthetic coding sequence
  source 1..552: mol_type = other DNA
atggatagttgcgacgagttgatacccgaatatctcaacttcattcggggcgttgtcgattccgaggatctgcccctgaacattagtagggagatgctccagcagagcaagatcctgaaagtgattcgcaagaacatcgtcaagaagtgtttggagctgttttctgaactcgcggaggacaaagagaattataagaaattttacgaggccttttccaaaaatctgaaacttggaatccatgaagattctactaatcgcaggaggctgtctgagctcttgagatatcatacgtcacagtctggagatgaaatgacctctctgtccgagtacgtctctcggatgaaggagacccagaaaagcatctattatatcaccggatctccctgctggtgcttagtgttcttctccctttcctgtccatgcgtcgaaggctccaaattaagggtcagctcgcctattcccagcctgctcctcacggcaggtcttgacgtggtatattgtggcctcttctactttctccacttcgttctcaaactgaagtacgcgaagtag

SEQ ID NO: 119611 - DNA, 2175 bp, synthetic construct
  misc_feature 1..2175: note = Description of Artificial Sequence: Synthetic coding sequence
  source 1..2175: mol_type = other DNA
atgcctgaggaggtccaccatggcgaagaggaggtggaaaccttcgcgtttcaggctgaaatcgctcaacttatgtctctgattatcaacaccttctactctaacaaagaaatatttctgcgggagctgatctctaacgcatccgatgctcttgataagattcggtatgagtcgctgacggatccgtcgaaactagatagcggcaaggagctgaaaattgatatcataccaaatccccaggaacggacgcttactctcgtggacactggaattgggatgacaaaggcggacctcattaacaaccttggaaccatagcgaagagcgggaccaaggcttttatggaggccttgcaggctggcgcagatatcagcatgatcgggcaattcggcgtgggcttctacagtgcatacctggttgcggagaaagtggttgtgataacaaaacacaacgacgatgagcaatacgcctgggaaagcagtgcagggggcagtttcaccgtacgcgccgaccacggagaacccattggtcgtggaacaaaagttatactgcatctgaaggaagatcagacagaatacctcgaggaacgaagagtaaaagaggtggtcaaaaagcactcccagttcattggctacccaattaccttgtacctggagaaagaacgggagaaggagataagtgatgatgaagccgaggaagagaagggtgagaaggaagaggaggacaaggacgacgaagaaaagcccaaaatcgaggacgtgggatctgacgaggaagacgacagtgggaaagacaaaaaaaagaagacaaagaagataaaggagaaatatatagatcaagaggagctcaataagacaaaaccgatttggactcgcaatccagatgacatcacccaggaggagtacggggaattttacaaaagcctgactaatgactgggaggatcatcttgctgtgaagcatttcagcgtggagggacagctcgaatttagggcactacttttcattccccgcagggccccgttcgacttgtttgaaaacaaaaaaaaaaagaacaatataaagctatacgtgagaagagtgtttatcatggactcgtgtgacgagttaattcctgaatacctgaattttattagaggcgtggtggatagcgaagatcttcccctgaatatctctagagagatgttacagcagagcaagatccttaaagtcattaggaaaaatatcgttaagaaatgcctggaactgttctcagagttagccgaagataaagaaaattacaagaagttctacgaggcctttagcaagaacttgaaacttggtatccatgaggatagcacgaatcgccgccgcttgagcgagctgctgaggtaccatactagccagtccggagacgagatgacctcactatctgaatacgtttctagaatgaaagaaactcagaaatcaatctactacataacaggcgagagtaaggagcaggtggctaatagcgccttcgttgagagagtacgaaaaagaggctttgaggtggtgtacatgaccgaaccaatagatgagtactgcgtccaacagctgaaagaattcgacggtaagagcctggtgtccgtgaccaaggaagggttggagcttcccgaggatgaggaggagaaaaaaaaaatggaagagtccaaagccaagttcgagaacctctgcaagctgatgaaagagatactagataaaaaggtagagaaggtcactatcagtaaccgccttgtttcgagcccatgctgcattgtgaccagcacctatggctggactgcaaacatggagcgaatcatgaaagctcaggccctgagagataattctacaatgggttatatgatggctaaaaagcatctagagattaatcctgatcacccaatagttgagacactgcgtcagaaggcagaggccgataagaacgataaagccgtaaaagacctagtggtcctgctcttcgaaactgccctgctgagcagcgggttctccctcgaagacccacagacgcacagtaataggatttacagaatgattaagctcggcttgggaatcgacgaggacgaggttgcagccgaagagcctaacgccgcagttcccgacgaaatcccacccttagaaggcgacgaggatgctagccgaatggaagaagtagattag

SEQ ID NO: 119612 - DNA, 429 bp, synthetic construct
  misc_feature 1..429: note = Description of Artificial Sequence: Synthetic coding sequence
  source 1..429: mol_type = other DNA
tagttcatcaggggtgtcgtagactccgaagatctccccctgaacatttctagagaaatgctccagcagagtaagatcctcaaagtgatccgaaagaatatcgtaaaaaaatgcctggagctgtttagtgaactcgccgaggataaagagaactacaagaaattctacgaggcattcagcaagaacctgaaactcggaattcatgaggattcaactaataggaggcgactgagtgaactcctacgctatcacacatcccagtcgggggacgaaatgacttcactgagcgaatacgtgtccaggatgaaggagacccagaaatctatctattatattacaggagagtccaaagagcaggtgtgcccctgtcccacatggctacctctgttggtgagtagcgtcttctttccattgctgtctttgtgttag

SEQ ID NO: 119613 - DNA, 453 bp, synthetic construct
  misc_feature 1..453: note = Description of Artificial Sequence: Synthetic coding sequence
  source 1..453: mol_type = other DNA
tgatttatccgaggggtagtggatagtgaggatttgcccctgaacatcagcagggagatgctacaacagtctaagatattgaaggtcattcggaaaaatatagtaaagaaatgtctggagctcttctctgagctagccgaggataaggaaaattataagaagttttacgaagcgttctcgaaaaatctgaaacttggaatccacgaagattcaacgaatcgtcgcaggctgagtgagctactgcggtatcacacctcacagagtggcgacgaaatgacatctttgtccgaatatgtatctaggatgaaggagactcaaaagtcgatttactatattactggcgagtccaaggaacaggtcgccaacagcgctttcgtggaacggtgtccatgtcctacctggttgcccctgctggtgagttctgtcttcttccccctgcttagcttatgttag

SEQ ID NO: 119614 - DNA, 516 bp, synthetic construct
  misc_feature 1..516: note = Description of Artificial Sequence: Synthetic coding sequence
  source 1..516: mol_type = other DNA
tgattcatccggggcgtggtggacagcgaggacttaccattgaacattagtcgggagatgttgcagcagagcaagatactaaaagtgatcaggaagaacatagtaaagaaatgtctggaactgtttagcgaattggccgaggacaaagaaaattataagaagttttatgaggcctttagcaagaacctgaagctgggaatacacgaggacagtaccaataggcgccggctctccgagctgctgagataccacacatcacaatctggggatgaaatgacctctctaagtgaatacgttagccggatgaaagagacccagaagtctatttactacataacagggtcaccatgttggtgtctggtatttttttctctgagctgcccctgtgtggagggtagcaagctgcgcgtctcatcacccatcccgtctctactactaaccgcggggctggatgtcgtctactgcgggctgttctattttctgcacttcgttctcaagctcaaatatgcaaagtag

SEQ ID NO: 119615 - DNA, 507 bp, synthetic construct
  misc_feature 1..507: note = Description of Artificial Sequence: Synthetic coding sequence
  source 1..507: mol_type = other DNA
atgcctgaagaagtgcatcacggggaagaagaagtggagacatttgcctttcaggccgagattgcacagctcatgagtctcataatcaacacattttatagcaataaggagatctttctcagagagctgatatcaaacgcctccgacgcgctggacaagattcggtacgagtcgctcacagatccttcgaaattagactccgggaaggaattgaaaatcgatatttcgatgatcgggcagttcggagttggcttttacagcgcttacctcgtcgccgaaaaggtcgtggtgattaccaagcataacgacgacgagcagtacgcatgggaatctagcgcgggcggctccttcactgttcgggctgaccatggggagcctatcggacgaggtaccaaagtaatcctgcacttgaaggaggaccagaccgagtatctcgaagagagacgggtcaaggaagtcgttaaaaagcattcacaatttatcgggtatcccataacgctctactag

SEQ ID NO: 119616 - DNA, 483 bp, synthetic construct
  misc_feature 1..483: note = Description of Artificial Sequence: Synthetic coding sequence
  source 1..483: mol_type = other DNA
atggaaatcccagttccagtgcagcctagttggttgcgacgagcgtctgcccccctgcctggtctctccgcacctggtcgccttttcgatcagagattcggcgagggactcctcgaggcagaactggcggccttgtgccctactactttggccccttactacctaagggcccctagtgtggcgctgccggtcgcccaggttcccacggaccccggacatttctcagtcctactggatgtgaaacatttcagcccagaagagattgccgtgaaggtggtgggcgaacacgtggaggtgcatgcaaggcatgaggaacgacctgacgagcatggttttgtggcacgcgagttccatcgcaggtacaggctaccacccggcgtcgacccagccgctgttacctccgctctaagccccgaaggcgtcctgtcgattcaggccgctcccgccagtgcccaagcaccccctcccgcagctgcaaaatag

SEQ ID NO: 119617 - DNA, 483 bp, synthetic construct
  misc_feature 1..483: note = Description of Artificial Sequence: Synthetic coding sequence
  source 1..483: mol_type = other DNA
atggaaattccagttcctgttcaaccaagttggctgcgcagggcctctgccccactgcccggactgtcagctccaggacgtctatttgaccagcgatttggagaggggctcctcgaggctgaactcgccgctctgtgccccactacattagccccttactacttgagagccccttctgtagccttaccggtcgcccaagtgcctaccgatccaggccatttcagcgttttgctagacgtgaagcacttcagcccagaagaaatcgccgtgaaggtggtgggcgaacatgtggaggtccacgcgcgtcacgaagagagacccgatgaacacgggttcgtcgctagagagttccataggcggtataggctgccacccggggtagaccccgcagccgtgacatctgccctctcacctgaaggggtgttgtcgatccaagctgctccagcatccgcccaggcaccgccccccgcagctgccaagtag

SEQ ID NO: 119618 - DNA, 591 bp, synthetic construct
  misc_feature 1..591: note = Description of Artificial Sequence: Synthetic coding sequence
  source 1..591: mol_type = other DNA
atggagattcccgtgcccgtgcagccttcgtggctgcgtagggcttctgctcctctgccagggctttcagcaccaggccggctgtttgaccagcgatttggagaggggctcctggaagccgaactcgcagctctttgcccaactactcttgccccttactaccttagagctccaagcgtggcactgcccgtggcgcaggtgccaacagatcccggacacttcagcgtcctcttggacgtaaaacattttagtcccgaggaaatcgccgtgaaggtggtgggcgaacacgtcgaagtgcacgccagacacgaggaacggcccgacgaacatgggttcgtcgctcgcgagtttcatcgacgctatagacttccccctggagttgatcccgccgcagtgacgtcagctctctcacccgagggggtgctgtcaattcaagccgctccggcgccacgggagcctccacaggcgccttcaatcaaggccgatctcactcctccttcccagatgtcgcgagtacgccaaggactgtcaagccaccccctgctagactctgcgctcacctctattctggacacagcgctcattacgtag

SEQ ID NO: 119619 - DNA, 1590 bp, synthetic construct
  misc_feature 1..1590: note = Description of Artificial Sequence: Synthetic coding sequence
  source 1..1590: mol_type = other DNA
atggacctccctgtggggcccggagccgccgggccatcgaacgtccccgccttcctgacaaagctgtggactctcgtgagcgatcctgatacagatgcactgatctgctggtcaccctccggaaatagcttccatgttttcgatcagggacagttcgctaaagaggtcctccccaagtactttaaacataacaatatggcctcctttgttaggcaactaaatatgtatggtttccgcaaggtcgtccacatagagcagggaggtctggtgaaaccagagcgggatgatacagagtttcagcacccatgtttccttagggggcaggaacaattgctggaaaacattaagagaaaagtcacaagcgtgtctacacttaagtctgaagacattaagatccggcaggactcagtaactaaactccttaccgatgtgcagctgatgaaaggaaagcaggaatgcatggactccaagctgcttgctatgaagcatgagaacgaggccctctggcgggaggtggccagcctaaggcagaaacacgcacagcagcagaaggtcgtcaataagctgatccagtttctcatctctctggtacagagcaatagaatcctgggcgttaagagaaagatcccactgatgttaaacgacagcgggtcagcacactctatgccgaaatacagccggcagttttcgctcgagcacgtgcatggctctggcccatacagcgctccttctcctgcttatagctcttccagtctgtatgccccggacgccgtggcttcttctggccccatcatcagtgatataactgagctggctccagcctcaccaatggcaagcccaggtggcagtattgacgaacggccactgagcagcagtccactggttagagtaaaggaggagccccctagtccacctcagagtcccagggtcgaggaggcgtccccaggaagaccctcctccgtggacaccctgctttcaccaacagctctcatcgatagcatcttacgggaaagcgagccagcacctgcttccgtgacagccctgacagacgcacgtggacatacggacacagaagggaggccccctagtccaccaccaacgtccacccctgagaaatgcctgtcggtcgcttgtttagataagaatgagttgagcgaccacctcgatgccatggactccaatttagataacttacagacaatgctttcttcccatggcttttccgtcgatacctcggccttgctggatcttttctccccgagcgttacagtacccgatatgtctctgcctgacctagacagtagtttggcctcaatccaagagttgctgtccccacaggagcctccacgccctccagaggcagagaacagttccccggattcaggcaagcagctcgtgcactatacggcgcaaccactgtttcttctggatccaggtagtgtggacacggggtccaacgatctgcccgtattatttgaacttggggagggttcatacttttcggaaggtgacggctttgctgaagacccaaccatctccctgctgacaggttccgaacccccgaaagctaaggaccccactgtgtcctag

SEQ ID NO: 119620 - DNA, 1611 bp, synthetic construct
  misc_feature 1..1611: note = Description of Artificial Sequence: Synthetic coding sequence
  source 1..1611: mol_type = other DNA
atgaagcagagctccaacgttcccgccttcctgtctaaactgtggacacttgtggaagagactcacactaatgagtttatcacctggagccagaacggccagtccttcctcgtcctggacgagcagcgcttcgccaaagagattcttcccaagtactttaagcataataacatggccagttttgtacggcaactcaatatgtacggattccggaaggtggtccatattgattcgggcatagtgaagcaggagcgagacggccctgtggaattccagcatccctacttcaagcaaggacaagacgacctgctagagaacatcaaaagaaaggtctcttcttctaagcctgaagagaacaagatacgccaggaagatcttacaaagattattagctccgcccagaaagttcagatcaaacaagagaccattgagtctagattgagtgaattgaagagcgagaacgagtccctctggaaagaggtttccgaacttcgcgcaaaacatgcgcaacagcagcaggttatccggaagatcgttcagttcattgtcaccctcgtgcagaacaaccagttggtctcacttaaacggaaacgcccccttctcttaaacacaaacggagcccaaaagaagaacctctttcagcatatcgttaaggaacctacagacaaccaccaccacaaggtcccccacagcagaaccgagggactgaagcctcgcgagcgtatctctgatgatattatcatatacgatgtcactgacgacaacgcagatgaggagaacattccagtgatccctgaaacaaacgaggatgttatcagtgatcccagcaattgcagccagtacccggacattgtgatcgtggaagatgacaatgaggatgaatatgccccggtcattcagtctggcgagcaaaacgaacctgctcgggagagcctctcttcgggctcagatggcagcagccccctgatgtcaagcgctgtgcagctgaacggctcttcgagcctgacatctgaggaccccgtcactatgatggattccattctgaacgacaacatcaatcttctcgggaaggtggaactgctagactatttagattctatcgactgttccctggaggattttcaagccatgttgtctgggaggcaatttagtatcgatcctgacctgctcgtggacctgttcacttcctctgtgcagatgaaccccaccgactatataaacaacaccaaatctgagaacaaagggctggaaactaccaagaataacgtcgttcagccagtcagcgaggaaggtcggaaatccaagagtaagcccgacaaacaactcatccagtacacagctttccctttgcttgccttcttagacggtaatccagcgtcttcagtcgagcaggcgtcaacaacagcttcgtccgaagtgctgagtagcgtggacaagcccatcgaggtggacgagctgctggacagctctttggatcccgaacccactcaatccaaactggtgcggttagaacctttaacggaagcggaggcctctgaggcaactctattctatctatgcgagttggcgcccgcacctctcgactccgatatgccgcttctcgattcttag

SEQ ID NO: 119621 - DNA, 1557 bp, synthetic construct
  misc_feature 1..1557: note = Description of Artificial Sequence: Synthetic coding sequence
  source 1..1557: mol_type = other DNA
atgaaacagtccagcaatgtacccgcattcctctcgaaactgtggacccttgtggaagagacccacaccaacgagttcatcacttggagccagaatgggcaaagctttctggtacttgacgagcagcggttcgccaaagagatcctcccaaagtacttcaagcataataatatggcctcattcgtacggcagcttaacatgtatggctttcgcaaagttgtacacattgatagtggcattgtaaaacaggaacgggacggtccagttgaattccagcatccgtattttaaacaaggtcaggatgaccttctggagaacataaagcgaaaagtgagcagtagcaaaccggaagagaacaagatccgccaggaggacctgacaaaaatcatttcctccgctcagaaagtgcagattaaacaggaaacaatcgagagcagactaagcgaactaaaatctgagaatgagtcactttggaaagaagtgtcagagttgagggcgaagcacgctcagcaacagcaggtcataagaaagatcgtgcagtttattgtgactctggtgcaaaataaccaattagtcagtctgaaaaggaagcggccactcctgctcaacactaacggtgcccagaaaaagaacctgttccagcatatcgttaaagagcctaccgataaccatcaccataaagtcccccactcccgaactgaagggctgaagccgcgggagaggatttctgatgatatcattatctacgatgtgactgacgacaatgctgatgaggaaaacatccccgtcatccccgaaacaaacgaggatgtcatcagtgatccgtcaaattgtagccagtacccagacatcgtaatagtggaggatgacaacgaggatgaatacgccccggtcattcagtcaggggaacagaacgaacccgcacgggagtctctctcatcgggttccgatggctcgtctccactgatgtcctccgctgtacaattaaacggctcatctagcctgaccagcgaggatcccgtgactatgatggacagcatcttgaacgataacattaatctcttgggtaaagtggagttgcttgattatctggactctattgactgttccctcgaagatttccaggctatgttgtccggccgacagttcagcatcgacccggatctgcttgtcgattccgagaacaaagggcttgaaactaccaagaataatgtcgtgcagcccgtgtccgaggagggacggaagtcgaaatctaaaccggacaaacagttgatccagtataccgctttccccctcttagccttcttagatggtaaccctgcatcctcagtggaacaggcgagtacaactgcctcctccgaggtgctaagcagcgtcgacaaaccaatcgaggtcgatgagctgctggacagtagcttggatccagagcccacacaatcaaaactcgtccgactggagccactgacagaggccgaggcttccgaagccaccctcttttacctgtgcgagctggcaccggctcctttggattccgacatgcccctcttggattcttag

SEQ ID NO: 119622 - DNA, 1005 bp, synthetic construct
  misc_feature 1..1005: note = Description of Artificial Sequence: Synthetic coding sequence
  source 1..1005: mol_type = other DNA
atgggtgaagccggagcggccgaggaagcttgcagacatatgggcactaaagaagaattcgtcaaggtgagaaagaaggatcttgagcgccttaccaccgaagtaatgcagatccgggactttctcccccgcattctaaacggtgaggtgttggagagcttccaaaaattgaagatagtggaaaagaatctggaacggaaggagcaggaattggaacagcttaaaatggattgcgaacacttcaaggcgaggctagaaaccgtgcaggccgataatatacgagagaagaaggaaaaactggccctaaggcaacagctaaatgaagctaaacagcagctgctgcagcaggcagaatactgcaccgagatgggcgccgcagcctgcacccttctttggggtgtgtccagcagtgaagaggtcgtgaaagctattcttggcggggataaagcgttgaagtttttctccattacaggacagactatggagtcctttgtgaagagtctagacggagacgtccaggaactcgactccgacgaatcccagtttgtgtttgccctcgccggtatagtcacgaacgtggcagctattgcatgcggcagagaattcctggtaaacagcagcagagtcttactggataccatcctgcagttgctgggggatctgaaaccggggcagtgtacaaagttgaaagtactgatgctgatgtctttgtacaacgtgtctataaatttgaaagggctcaagtacatcagcgaatctccaggatttatcccgctcttgtggtggctcttgtctgatcctgacgctgaagtgtgtctgcacgtcctcagattggtgcaatccgtcgttctggaaccagaagtctttagcaaatctgcaagcgaattccgttcctctttacccctgcagagaatccttgctatgagtaagtcacggaaccctagactgcagaccgccgctcaggagctgctagaggacctcagaacattggagcataatgtgtag

SEQ ID NO: 119623 - DNA, 780 bp, synthetic construct
  misc_feature 1..780: note = Description of Artificial Sequence: Synthetic coding sequence
  source 1..780: mol_type = other DNA
atggattgtgaacacttcaaagctcggctggagacggtgcaggccgacaatattagagagaaaaaggaaaagctggctctcaggcagcagctgaatgaggccaaacagcagcttctgcagcaagcggaatactgtaccgaaatgggagctgctgcatgcacactgctgtggggggtctctagttccgaggaggtggtcaaggccattttaggcggcgataaggctttgaagttcttcagcattacagggcagactatggagagcttcgtgaaaagcctggatggggacgtccaggagctcgacagcgatgaatcgcaattcgtgtttgcactggcaggcatcgtcacaaacgtggcggcaattgcttgcgggcgggagtttctcgtgaattctagccgtgttctgctggacactatactgcagctgcttggcgaccttaagcccgggcagtgtaccaaactgaaggttttgatgctgatgagtctttataacgtaagtattaacctaaaggggttgaaatacatcagcgaatctcccgggtttatcccccttctgtggtggctgctgtctgaccctgatgccgaagtgtgcctgcacgttctgaggctcgtgcagtctgtggtattggaacctgaggtgttttccaagagtgcctcagagtttcgctccagcctgcctttacagagaattttggccatgagcaagtctcgtaatcctcggttacagaccgccgcgcaagagctgttggaggacctgcgcacactcgagcacaatgtttag

SEQ ID NO: 119624 - DNA, 1479 bp, synthetic construct
  misc_feature 1..1479: note = Description of Artificial Sequence: Synthetic coding sequence
  source 1..1479: mol_type = other DNA
atgcaagaagcacccgccgccctcccaaccgaacctgggccctctccggtccctgctttcctgggaaaactatgggctctcgtcggagatccaggtactgatcatttgatcaggtggtctccctctgggacaagcttccttgtgtctgaccagtcacgattcgctaaggaagttttgccacagtactttaaacactctaacatggctagttttgtccggcaactcaacatgtatgggtttaggaaggtcgtgtctatagagcaaggtggactccttagacccgagcgagatcatgttgagtttcagcatcctagttttgttaggggccgggagcagttactggagagggtgagaagaaaggtgcctgcactgagaggggatgacggacggtggcggcctgaggatttgggacgactactgggcgaagtccaggccctaaggggggtacaggaatccactgaagcaagactgcgggagctcaggcagcagaacgagatcttgtggagggaagtagttactttgcgccagtctcacggacagcagcatagggtgatcggcaaacttatccagtgcctgttcggtccccttcaggccggcccatccaatgcagggggcaaaaggaagttatccctgatgctagacgagggtagtagctgtcccacgcctgccaaatttaatacctgccctcttcctggcgccctgctgcaggatccatattttattcagagccccctgcccgagacgaatcttggattgtcgccacaccgagctagggggcccattattagcgacatccccgaagatagtccaagccccgagggtacgcggctgtcgccctcaagtgacggaagacgggagaaaggactagccttgctgaaggaggaaccagctagcccaggcggggatggggaagccggcctggcccttgctcctaacgagtgcgatttttgcgtgaccgctccaccaccgctgcccgtcgccgtggtgcaggctattctcgaaggaaaaggaagcttctctcctgagggcccacgtaacgctcagcagcccgaacccggagaccctagagaaatcccagacagggggcccctgggcctggagtctggcgacagatctcccgaatctttgctacctcccatgctgctgcagcctccccaggagagtgtggaaccggcgggaccactggacgttctgggtccatctctccaggggagagaatggactctaatggatctagatatggagctcagtcttatgcagccattggtaccagagagaggagaaccggagctagccgtgaagggactgaacagtccctcacccggaaaggacccgaccctgggcgcacccctgttgcttgatgtccaggctgcccttggggggcctgctctcggcctgcctggagcgctgacaatttatagcacacctgagagcagaaccgcctcatatctggggcccgaagcatcccctagtccatag

SEQ ID NO: 119625 - DNA, 1389 bp, synthetic construct
  misc_feature 1..1389: note = Description of Artificial Sequence: Synthetic coding sequence
  source 1..1389: mol_type = other DNA
atgcaagaagcccctgcagccctgccaaccgagcctggcccgtctcctgtgcccgcgttcctaggaaaactgtgggctctggtgggagatccaggcactgatcacctcatcagatggtcaccgagtggaacctcctttctggtatccgatcaatcgcgatttgccaaagaagtgctgccacagtattttaaacatagcaatatggcttcctttgtgaggcaactcaatatgtacggctttagaaaggtagtttccatcgagcagggcggccttctgcgccctgagagggatcatgtcgagttccagcatcccagctttgttaggggtcgggagcagctgctcgagagggttcgccgcaaggtgcccgcccttcgcggcgatgacggtcggtggcgccccgaggacttggggcgcctactgggcgaggtccaggctttacgaggagttcaagagtccactgaggccaggctgcgcgagctgagacagcagaatgagatcctctggagggaagtagttacattgaggcagagccatgggcaacagcaccgcgttatagggaagttgattcagtgtctgtttggtccacttcaggcaggacccagcaatgctggcggaaagcgcaaactgagcctaatgctcgatgaaggatctagctgcccaacacctgccaaattcaacacatgtcccctgcctggggccctactgcaggacccatactttatccagagcccgtcgacgtactcactgtcccagcgccaaatctgggccttggctctgactggacctggcgccccttcttcactaacctcccagaagacgttgcaccctttaaggggccctggtttcctgccacccgtgatggccggggcaccccctcccctgccagtggctgtggtccaggcaattcttgaggggaagggatctttcagcccagagggtccgcgaaacgcccagcagcccgaacccggcgatccccgggaaatccccgatagagggcctcttggcttagaaagtggcgacaggtcgcctgagagtctgctgcctcccatgcttttgcagcccccacaagagtcagttgagccagcaggcccactagacgtgttgggccctagcctccaaggccgggaatggacccttatggacctcgacatggagttatctctgatgcagcccctcgttcccgagcgtggcgagccagaactggcagtgaagggattaaacagcccaagccctggcaaggacccgactctcggcgccccactgttacttgacgtacaagctgccctgggagggccggcactgggtctccccggtgcccttacgatttattccacgccagagagtcgcacagcctcttatctcggcccggaggccagtccatctccatag

SEQ ID NO: 119626 - DNA, 1251 bp, synthetic construct
  misc_feature 1..1251: note = Description of Artificial Sequence: Synthetic coding sequence
  source 1..1251: mol_type = other DNA
atgcaggaagcacctgccgctctgccgactgagcccggtccgagtcccgtgcctgcctttttgggtaaactgtgggctttagttggcgacccaggtacagaccacctcataaggtggagtccctccggaacctccttcctggtttccgaccagagccggtttgccaaggaggtattgccgcagtactttaagcacagcaatatggcctcattcgtgaggcagttgaatatgtatggtttccggaaggtcgtgagtatcgaacaaggcgggctgctccgaccagaaagggaccatgtggagtttcagcacccaagtttcgtgagaggccgagagcagctccttgagcgagtgcgccgcaaggtccctgccctgcgtggagacgatggccgctggagacccgaagacctaggccgcctgctgggggaagtgcaggcccttaggggagtgcaggaaagcaccgaggctcggcttcgggaactgcgacagcagaacgaaatcctgtggcgggaagtcgtgaccttgcgccagtcacacggacagcagcatcgagttatcggcaagcttatccagtgtctattcggccccctccaggccggtccttctaacgccgggggtaaacggaaactgagtctgatgttagatgagggttcctcctgcccaacacctgcaaagtttaatacctgtcctctccctggggccctcctgcaggacccctattttatacaaagccctttgcccgaaacgaaccttggactgtccccgcatcgggccagaggccccatcatctccgacattccggaagattcaccgagtccggaagggacaaggctcagtcctagctcagacggacggcgtggtccgcttggcctggagagtggagatcggagccccgagtctcttttgccgccaatgttgctgcagccacctcaggagagcgtggagccagcaggccctttagacgtgcttggaccaagcctgcagggaagggagtggaccttgatggatctggatatggagttgagcttgatgcaaccattagtgccagaacgtggtgagccagaactggcagtgaaggggctgaatagcccatcacctggcaaagacccgacattgggcgctcctctactgctggatgtgcaggcggcattgggcgggcctgccctggggctgccaggcgccttgaccatttacagcacacccgagagccggacagcaagttacctaggtccagaggcaagccccagcccatag

SEQ ID NO: 119627 - DNA, 1479 bp, synthetic construct
  misc_feature 1..1479: note = Description of Artificial Sequence: Synthetic coding sequence
  source 1..1479: mol_type = other DNA
atgcaggaggctcccgcagcgctgcccaccgaaccgggtccaagtcccgtcccagcattcctgggaaaactgtgggccttggttggcgaccctgggactgatcatctcatccggtggtccccaagcgggacgagcttcttggtgtccgaccagtcaagatttgccaaggaggtgctgccccaatattttaaacacagtaacatggccagcttcgtgaggcagctgaatatgtacggattcaggaaagtcgttagcattgagcagggggggctgctacgccctgagcgcgaccatgtggaattccagcatcccagcttcgttcgagggcgtgagcagttgctggaaagagtcagaagaaaggtcccggctctgcggggtgacgacgggcggtggaggcctgaggatttgggaaggctcctgggggaggtgcaggcacttaggggagtgcaggagtctactgaagcaaggctgagggaactgcgccagcagaacgagatcctgtggagggaggtagtgaccctgaggcagtcacacgggcagcagcacagggttatcggaaagctcatacagtgtctgttcggtcccctccaagctgggccatctaatgccggcggaaaaaggaagctttcactcatgttggacgaggggtcttcgtgcccgacgcccgccaagtttaacacatgtccgctacctggggccctgcttcaagatccctattttatccaatctccactgccggaaaccaatctaggactgtccccccatcgggctagaggccccatcattagtgatataccagaggactcgccttctcccgaaggcacacggctgagccctagctctgacggacggcgcgagaagggactcgcgctgttgaaggaggagcctgcctcacccggaggcgatggcgaagccgggctggcgttagcacctaacgaatgtgacttttgcgttacagcacctccacctctcccagtggcagtcgtgcaggccattctagaaggtaaggggtccttttctccggaaggtccccgaaacgcgcagcaacctgaaccaggtgaccctcgcgaaatccctgacagggggccactgggccttgagagcggggaccgttcaccagagtctctgctcccgcctatgttactgcagccaccgcaggaatccgtcgagccagccggtccgctggacgtgctgggcccgagtttgcagggacgtgaatggaccctcatggatctcgacatggaactctccttgatgcaaccactggtccccgaacggggagagcctgaacttgccgtgaaaggcctgaattctcctagccctggtaaagatcctaccctgggcgcccctctactgctggatgtacaggccgcgttaggagggcctgcgctggggttgccgggggccctcacgatctattccacaccagagagccgcactgcatcatatctggggccagaggcatccccctctccgtag

SEQ ID NO: 119628 - skipped

SEQ ID NO: 119629 - DNA, 414 bp, synthetic construct
  misc_feature 1..414: note = Description of Artificial Sequence: Synthetic coding sequence
  source 1..414: mol_type = other DNA
atgagttctctcatccgtcgggtaatctccaccgcaaaggcccccggggccattgggccttatagccaggccgtactggtggaccgcacgatctatatttcggggcagatcggtatggatccatccagcgggcagctcgtctccggcggggtggctgaggaagcaaaacaggccctcaaaaatatgggcgaaatcctgaaggccgcgggatgcgactttaccaatgtggtgaaaacaactgtcctgttagccgatatcaatgacttcaacacagttaacgaaatctataaacaatattttaagagcaatttcccagctagagctgcttaccaagtggccgctctgcccaaaggctcaagaatcgaaatagaagctgtggcaatccagggacctctgactacagcttcactctag

SEQ ID NO: 119630 - DNA, 14505 bp, synthetic construct
  misc_feature 1..14505: note = Description of Artificial Sequence: Synthetic coding sequence
  source 1..14505: mol_type = other DNA
atgccttcggaatccttctgcctcgcagctcaggctcgtctggattctaaatggttgaaaacggacatacagttggccttcacccgtgatggattatgtggactctggaacgagatggtgaaggacggcgaaattgtatacacagggaccgagtccacacaaaacggggaacttccaccacgaaaagatgacagcgtcgagccctccggcaccaaaaaggaggacctgaacgataaggagaaaaaggatgaggaagaaacccctgccccaatttatagagccaagtctatcctggattcctgggtgtggggaaagcagcccgatgtcaatgagctaaaagagtgcctcagtgtactggtcaaggaacagcaggcattggcggtccagagcgccactacgacactctccgccctgcgcctgaagcaacgattagtgatcctggagaggtacttcatcgctctgaataggacggtgtttcaagagaacgtgaaggttaagtggaagagctctggcatttcgcttcccccagtcgacaagaagtcatcacggccagctggtaaaggggtcgaaggccttgcgcgcgtgggaagccgtgccgcactgtcattcgcttttgcgtttctgcgtagggcttggcgatctggcgaagacgctgatctgtgttccgagctgcttcaggagtcacttgatgctcttagggctctcccggaggcctcactgttcgatgaaagcaccgtttctagtgtttggctcgaggtggtggagcgggccactcgctttttaaggagtgtcgtgactggcgatgtccacggaactcccgccacaaaaggccccggaagtatacctctccaagatcagcatctggcactcgcgatactgctggagctagccgtgcagaggggaacactgagccaaatgctttcagccatcctgcttctgctccagctctgggactctggagcccaggagacggataatgaacggtctgcacaagggacgtcagcgcccctgctgccactgctgcaacggttccagtcaatcatctgccggaaggacgctcctcatagtgagggggatatgcacctcctttctggacctctctcacccaacgaaagtttcttgcgttacctcaccctgccacaggacaatgagcttgctatagacctcagacagactgcggtcgttgttatggctcacctcgatcggctggcaaccccctgtatgccccccttgtgctcaagccctacctcccataagggaagtctccaagaggttatcggctggggactgatagggtggaagtattacgccaacgtaatcggtccaattcagtgtgagggacttgccaacctcggtgtgactcaaattgcctgcgctgagaaacgctttctgatcctgtctcgcaatggaagagtttatacccaggcctacaactctgataccttggcaccgcagctcgtccaaggcttggccagccgtaatatagtaaaaatcgccgcacactcggatggtcaccattatctcgcgctggcggcgaccggagaagtctactcttggggctgcggggatggaggaaggctcggacacggcgatacggtgcccttagaggaaccaaaggttatctcggctttcagtggcaagcaggctggaaaacatgtcgtgcacatcgcttgtggaagtacatactctgcagcaatcaccgcagaaggtgagctgtacacctggggacgcgggaactacggcaggttgggccatgggtccagcgaggatgaggccatccccatgctggtggccggcctcaaaggtctcaaggtgatcgatgtcgcctgtggctcaggcgacgctcagactctagctgtgactgaaaacggccaggtgtggagctggggggacggagactacgggaaactgggcaggggtgggtcagacgggtgtaaaacacccaagctgatcgagaaattacaggatttggacgtcgtaaaagtgcgatgtggtagccagttctcaatcgctctcacgaaggacggacaagtgtattcttggggtaaaggggataaccagaggctggggcacgggaccgaagagcatgtgcggtatcctaagctgttggaaggtctgcagggaaaaaaagtgattgatgtggctgctggctctacacactgtttagcgttaactgaggatagcgaggttcactcatggggcagcaacgaccaatgccaacatttcgatactctgagagtcaccaagccagagccggcagcactgccgggactcgacactaagcacatcgttggcattgcttgcggccctgctcagtccttcgcctggtcgtcctgtagcgaatggtctataggactgagagtcccttttgtcgtggatatttgctcaatgacctttgagcagctggacttactcctacgacaggtcagcgaggggatggatgggagcgctgactggcctcccccccaggagaaggagtgtgtcgcagtggccaccttaaaccttctgagactgcaactccatgccgcaataagccatcaggtcgaccctgagttcctcggactcggcctgggctctatcctgctgaactctctcaaacagaccgtggtaacattggcttctagtgctggggttctctcgacagttcaatctgccgcgcaggccgtgctgcagtctgggtggtccgtcctgctgcctaccgcagaggagagagcccgcgctctgagtgccttgctgccttgcgcggtctcaggaaacgaagtgaatatttctcccgggcggaggtttatgatcgatttacttgtcgggtcattaatggccgacggagggttggaaagcgctctgcatgccgcgatcactgcagagattcaggacatcgaggctaagaaagaggcacagaaagagaaagaaatcgacgagcaggaggcaaatgcctctacttttcaccgctccagaacccccctcgacaaagaccttatcaatacgggtatctgcgaaagcagcggaaaacagtgcttgcctctggtccagttgattcagcaattgctgagaaatatcgcctcccagaccgtggccagactcaaggacgtagctcggagaatcagttcttgcctggactttgaacagcatagtcgagaacgcagtgcctcactcgacctgctgttgaggttccagagacttttgattagtaaactttatcccggcgagtccattggacaaacgtctgatattagttctcctgagctcatgggggtgggaagccttttaaagaaatacacagcgctcttatgtactcacataggcgacattctgccagtagctgcaagtatcgccagcacaagctggcgacacttcgctgaggtcgcctacatagtggagggtgactttaccggtgtgctgctgcctgagctcgtcgtgtccattgtgctacttctctctaaaaatgccggactcatgcaggaggccggagcggtgcctctgctgggcggactcttagaacatctggatagattcaatcacctggctccaggaaaggagcgtgacgatcatgaggaactggcctggcccggcatcatggagtccttttttaccggccagaactgccgtaataatgaagaggttactttgatcaggaaggcggacctggagaatcacaacaaggatggcggcttctggactgtgatagacgggaaggtatacgacattaaggactttcagacgcagtccttgacaggcaacagcatactggctcagtttgccggagaagatcctgtcgtcgctctggaggccgcattgcagtttgaggacactcgcgagtcaatgcacgccttctgcgttggacagtacttggagccagatcaggagatcgtaactatcccagacctgggaagtctctccagcccccttatcgacactgagagaaacctcggactgctgctgggtctgcacgcttcttaccttgcgatgtctacaccactctccccggtagagatcgagtgtgctaagtggctgcagtccagcatcttttccggcggactccagacatctcagatccactactcctacaacgaggaaaaagacgaagaccattgctcatctcccgggggcactccagcctctaagtcaagactatgcagtcacaggcgcgcacttggtgatcattctcaggccttcttgcaggcaattgcggataacaatatccaggaccacaatgtgaaggatttcctgtgccagatcgagagatactgccgccagtgtcacttgacaaccccgattatgttcccgcctgagcatccagtcgaggaggtgggcagactgctgctctgttgtttgctgaaacacgaagatctcgggcacgttgctctctccttagtgcacgccggagcactcggcatcgagcaggtcaaacatagaactctgcccaagagtgtggtcgatgtctgtagagtagtgtatcaagctaagtgctctctcatcaaaacacaccaagagcagggtagatcctataaagaagtgtgtgcaccagttatcgagcggctgagattcctcttcaacgagcttcgacccgccgtgtgcaacgatctgtctatcatgagcaaattcaaattactttcttctctgccacgctggcgcaggattgcacagaagattatccgggagagacgtaaaaagagggtccctaagaaacctgaatctacagacgacgaagaaaagatcgggaatgaggaatctgatctggaggaggcctgcatcttgcctcactctccgataaatgtggataagcggcccatcgccattaagtctccaaaggacaagtggcagcctttattgtccacggttacgggtgtacacaagtacaagtggctgaagcaaaacgtgcaggggctgtaccctcagagtcccttactgtccaccatcgctgaatttgccttgaaggaggagccggtggatgtggagaagatgagaaagtgcctgctgaagcaactggaacgcgctgaggtgcgcctggaaggcatcgacaccatcctgaaattggcgtctaaaaacttcctgcttccaagcgtgcagtacgccatgttctgcggctggcagcgactgatccctgaggggattgacattggagagcctttaacagattgcctgaaggacgtggatctaattcctcctttcaatcggatgctcctagaggtgacatttggcaagctctacgcctgggccgtgcagaacattcgcaacgttcttatggacgcgagtgccaagtttaaagaactaggcatccaacctgtgcccctgcagaccatcacgaacgaaaatccttctggcccttccctgggtactattccccaggcccgcttcctcctcgttatgctcagcatgttgactctgcaacatggtgcaaataatctcgatttgctgctgaatagcgggatgctggcattgactcagactgcgctacgcctgatcgggccatcttgtgataacgtcgaggaagacatgaatgcctcagctcagggagcctccgccaccgtactggaggaaacaaggaaggagacggcccccgtccagctccccgtgagcgggcctgagctcgccgccatgatgaagattgggactcgggtgatgagaggagtagattggaaatggggggaccaagatggtcctccccccggcctcggcagggttatcggcgaacttggagaagatgggtggattagagtgcagtgggataccgggagtaccaacagctaccgtatgggcaaggaaggaaaatacgatctgaaattggcggagctccccgcggctgcacagccatcagccgaagattcagataccgaggacgacagcgaagctgagcaaactgagagaaacatccatcccactgccatgatgtttacaagtacaatcaatctgctgcagactttatgcctgagtgcaggggtacatgccgaaatcatgcagtctgaagccacaaaaacactttgcggattactgcgcatgttagtggagagtggaactacggacaagacttcttcaccaaataggctggtctatcgagaacagcatagatcctggtgcactctgggatttgttagatcgattgctctgacaccacaagtctgcggcgccttgtcctcaccacagtggatcaccctgctgatgaaggtcgtcgaggggcatgctcccttcaccgccacatctctccaacggcagatcctcgcagtacaccttctccaagctgtgctacctagttgggataagaccgaacgtgccagagacatgaagtgcctggtggagaaattatttgacttcctggggtcattgctgaccacatgttcaagcgacgtcccacttttgcgcgaaagcactttgaggaggagaagagtccgccctcaagccagcttgacagctacacacagcagcactctggctgaagaggtcgtggcccttctccggacactacattcactgacccaatggaacggcctgatcaataaatacatcaattcccaattaaggtccattacccactctttcgtgggcaggcctagcgaaggagcccagttggaggactactttcctgactccgagaatccagaagtcggaggtctgatggctgtcctcgcggtgattggtggcattgatggtcgattaagattgggcggtcaggtgatgcacgacgagtttggcgaaggtacagtgaccagaattacgccaaaagggaagattactgtgcagttctccgacatgcggacttgtagggtctgtcctcttaatcagctcaaacctttgcccgcagtggcgtttaatgtcaacaacctaccattcacagaacctatgttgtctgtgtgggcgcagttggtcaatctcgcaggatctaagctggagaaacacaaaataaagaagagtactaagcaggcgtttgccggacaggtagatctggatctgctgcgctgccaacagctgaaattgtacatcctgaaggccggcagggcactgctatcacaccaggataagctccggcaaatcctctctcagccagctgtgcaagaaacaggcaccgttcacacagatgatggggctgtagtaagtcctgaccttggggatatgtctcccgagggtccccaaccaccgatgattctcctgcagcagctcctagccagcgccacccagccctcccccgttaaggcaatctttgacaagcaggaactcgaagccgccgccctggcagtgtgccagtgcttagccgtggagtccacacatccgagctctccgggcttcgaggactgttctagctccgaagctacgacccccgtggcggtacagcacatcaggccagcccgggtgaaacgccggaagcagtctcctgttccagctctgcctattgtcgttcagctgatggagatggggttttctaggagaaatattgagtttgctttgaaatcccttacaggggcctccggaaacgcctcttcattgccgggcgtcgaagccctagtgggatggctcttagaccactccgacatccaggtgaccgaactgtcagacgccgatacagtgagcgacgagtactccgatgaggaggtggtagaggatgtggatgacgccgcgtacagtatgtctacaggcgccgttgtcaccgagtcgcaaacatataagaagcgagcagacttcctgtctaacgacgattacgccgtttacgtacgtgaaaacattcaggttggcatgatggtgcgatgctgccgggcatacgaagaggtttgcgagggcgatgtggggaaggtgattaagttggaccgagatggcctccatgaccttaatgtgcagtgcgactggcaacagaagggggggacttattgggtcagatatatccacgtagagcttatcggctacccccccccatcaagctcttctcatatcaaaattggggataaagttcgagttaaagcttctgtgaccaccccaaaatacaagtgggggtccgtgacccaccagagcgtgggagtagtcaaagccttctcagccaacgggaaggatattatcgttgattttccgcagcaaagtcattggacgggcttgttatccgagatggaactcgtgccaagtatccatccgggcgttacatgcgacgggtgccagatgttcccaatcaatggatcacgttttaaatgccgcaattgcgatgacttcgatttttgtgaaacatgttttaaaaccaagaagcataatacaagacatacgttcggacggatcaatgaaccagggcagtccgctgtgttctgtgggaggtccggtaagcagctgaagcgatgtcacagttctcaacccggaatgctgctggattcttggagtagaatggtgaaatctctcaatgtgagcagttctgtaaaccaggcgtcccggttaatcgacggaagcgagccctgttggcagtcatctggttctcagggtaagcactggatacggctcgaaattttccccgatgtgttagtacatagactaaagatgatcgtcgatcccgccgattcatcatatatgccttcactggttgttgtgtcaggagggaactctcttaataaccttatcgagttgaagaccattaacatcaacccctcagatacaaccgtgcctctgctgaatgattgtaccgaataccatcgctatatcgagattgctatcaaacaatgccggtcctccgggatagattgtaagatccatggtctgattctattggggcgaatccgcgcagaggaggaggatctggccgctgttcctttcctggcctccgataacgaagaagaggaagatgagaaaggcaattctggatcactaattaggaagaaagctgccggcctagagtctgccgcaaccatacgcacaaaagtctttgtttggggcttgaacgacaaggatcagctgggaggactgaaaggaagtaagatcaaagtcccctccttctcagagacactctcggctcttaacgttgtgcaggtcgcgggaggatccaagtcactgtttgcggttacagttgaagggaaggtctacgcctgcggagaggcaaccaatgggagactggggctgggcatcagttcaggtaccgtcccaattccaagacagatcacggcgttaagttcttatgttgtcaaaaaagttgcggtacacagtggcggccgtcatgctacagcattaacagtcgatggaaaagtgttttcttggggcgagggcgacgatggtaagctggggcacttttccagaatgaactgcgacaagcctcggctcattgaggcactcaagacaaaacgcatcagggatattgcttgtggcagctctcattccgccgcactgacctcatctggggagctgtatacatgggggctgggcgagtacgggcggcttggacacggggacaacactactcagctgaaaccaaagatggtcaaggttctgctcggccacagagtcattcaggttgcgtgcggatccagagacgctcagaccctcgcactcaccgacgaaggcttggtgttttcttggggtgatggggacttcggcaaactcggacgagggggatctgaaggctgcaatatcccccagaacatcgagcgcttgaatggccagggggtgtgccagatcgagtgcggcgcccagttcagtctggctctgaccaaatctggtgttgtatggacctggggcaaaggcgattacttccgactcggccatggctccgatgtgcacgttcgcaagccacaggtcgtggagggtctcaggggaaagaagatagtgcacgtggccgtcggagcactccactgcttagcagttacggattcggggcaggtctatgcctggggagacaacgatcatggccagcagggcaatggaacaacgaccgttaacagaaagccaaccctcgtgcagggacttgaggggcagaaaataacgcgagtggcctgtggttcctctcactccgtggcctggactaccgtcgacgtagcaactccttccgtgcatgaaccggtgctgttccagaccgccagagatcctctgggcgcgtcctatttaggagtgccgagcgatgctgacagcagcgccgccagcaacaaaattagtggagcaagcaacagcaagcccaacaggcctagcctggccaagattttgttgtcgctagacggtaacttagccaagcagcaggcacttagtcatatactgacagctcttcaaatcatgtatgccagggacgcggtagtcggagccctgatgccagccgcgatgatcgcccctgtcgagtgcccgagtttcagttcagccgctccctccgatgctagcgccatggccagtcccatgaacggcgaggagtgcatgctggccgtagacattgaggacaggttgtctccaaacccctggcaagagaagcgggaaatcgtgtcaagcgaggatgctgtgaccccctcggcggtcaccccctctgctccctcagcaagtgcccggccctttattccagtgacggacgatttgggagctgcgagcatcattgccgagacaatgacaaaaaccaaggaggatgtcgaatcgcagaataaagccgcaggtccagagccccaggcacttgacgagtttacgtccttactgattgccgacgatacgagggtggtcgtcgaccttctgaagttatcggtgtgcagcagagccggggaccgagggagagatgtactgtcagccgtgctgtccgggatgggcactgcatacccacaagtggccgacatgctgcttgaattgtgcgtgaccgagctggaggatgtggccactgacagccaaagcggacggctgtccagccagcccgtcgtggtagagagtagccacccatacacggatgacacttccacttccggcaccgtgaagatcccaggagctgagggactgcgagttgaatttgacaggcagtgctctacagaaagacgccacgatcccctaacagttatggatggagtgaacaggattgtcagcgtccggagcggcagagagtggagtgactggtcctctgaattaagaatacctggagacgaacttaaatggaagttcatctctgacggtagcgtcaacgggtggggttggcgctttaccgtgtaccccattatgcccgccgccggtccgaaagagctgttgagcgatcggtgtgtcctgtcttgtccatctatggacttggtaacctgtttgctggacttccggctaaaccttgcgagtaaccgctccattgtccctcgtctcgccgcctccctggccgcttgcgcccagctttctgctcttgcggcaagtcatcggatgtgggctctccaaagactcagaaaactgctcaccaccgaatttggccagagcattaatatcaatcggctcctcggggagaatgacggggaaactagggcgctgagcttcacaggctccgcgttagctgcactggttaaggggttacccgaggccttgcagaggcagtttgagtacgaggatcccatcgtgcgaggcggaaagcaactgctgcactcgccattctttaaggtgctagtcgcgctggcttgcgacctcgaactggacactctgccatgttgtgccgagacacacaaatgggcttggtttagacggtattgtatggcaagccgggtggccgtggccttggacaagcggacgccccttccacgcttgtttctggatgaagtcgccaaaaagattagagagctcatggccgactcggaaaacatggacgtcctccacgagtcacatgacatcttcaagcgggaacaggacgaacaacttgtccagtggatgaatagacgcccagacgattggactctatcagcagggggatccggtactatttatggctgggggcacaaccacagggggcagctcggaggcatcgagggggccaaagttaaggttcccaccccctgtgaagcactggctaccttgaggccagttcagctgattggcggagaacaaactttgtttgctgtaacggcagacggcaaactgtacgctaccgggtatggagccggaggtcgtctgggcattgggggcacggagtccgtcagtactcccactctgttagagtccattcaacacgtattcattaaaaaggtggccgtcaacagtgggggaaagcactgtctggcccttagttccgaaggggaggtttacagttggggggaggccgaagatgggaaactggggcacggcaatagatccccttgcgataggccccgtgtgatcgaatccctccgcggcattgaggtagtagacgtggccgcaggaggtgcccacagcgcttgcgtcacggccgctggagacctgtacacttgggggaagggtcgctatggacgactgggtcactccgatagtgaagatcagctcaaacccaaactggtcgaggctcttcagggtcatagagtggtggatatcgcatgtggcagcggagatgcgcagaccctttgcctaaccgatgacgatacagtgtggtcatggggggacggtgactacggaaagcttgggcggggtggcagcgatggatgtaaggtgccgatgaagatcgacagcctcaccggcctaggtgtagtcaaagtggaatgtgggtctcagttttccgtcgccttaaccaaatctggagcggtgtacacatggggaaagggggattaccataggctcggccatggatctgacgaccatgtccgcagacccaggcaggtgcagggtctgcaggggaagaaggttatcgcaatagccaccgggtcactccattgtgtgtgctgcacggaggacggcgaggtctacacgtggggggacaatgatgaagggcagttaggcgacggcacaaccaacgctattcagagaccaaggctggtggctgctctacagggcaagaaagtaaatagagtcgcctgtggatccgcccataccttggcctggagcacatcaaaacccgcctccgctggtaagctgcccgctcaagtaccaatggagtataaccatcttcaggagatccctatcatcgcactgcgaaaccggttgctcctgctgcatcatctgagtgaactgttttgcccgtgtatcccaatgttcgatctggaggggtctctcgatgagacgggacttggcccctccgtcggctttgacacattgcggggcattttaataagccagggaaaagaagccgcctttcggaaggtggttcaggcaacaatggtccgggacaggcagcatgggcctgtcgtcgagctgaacagaatacaggttaagcgctcaagatcaaaggggggtttggccggaccggatggcacaaaatctgtctttggacaaatgtgtgcaaaaatgtcatcgtttggcccggattcccttctcctccctcaccgggtttggaaggttaaatttgtcggtgagagcgtggacgactgtggcggagggtattccgagtccatcgccgagatatgtgaggagctacaaaacggactgacaccactgttgattgtaactcccaatggaagggatgaaagtggcgctaaccgcgactgctatctcctgtcccccgccgcaagggcacctgtccattccagcatgttccggtttttgggagtgttactgggaattgcgatcaggaccggatcccctctcagtctgaatcttgctgaaccagtatggaaacaactggccggaatgtccctgaccattgccgacttgtcagaggtcgacaaagacttcatcccgggtcttatgtacattagagataatgaggctacatctgaagagtttgaggccatgtctctccctttcaccgtgccatctgcttctggacaagacatccagctctcatcaaaacatacccatattacccttgacaaccgagcggagtatgtgcgcctggcgatcaactaccgactgcatgaattcgatgaacaggtcgctgctgtgcgggaaggcatggccagagtggtgcctgtacctctgctgtcactgttcacggggtacgagctggagactatggtgtgtggatccccagacattcccctgcatctgctgaagtccgtggctacgtacaaagggatcgagccaagtgcatctctcatacagtggttctgggaagtcatggagagttttagcaacacggagagaagcctctttcttcgtttcgtttggggccggaccaggctcccccgcacaattgctgattttcgaggacgtgacttcgtgatccaggtgctggataaatacaatccgcctgatcactttctgcccgaatcatacacgtgctttttccttctgaagctgcccaggtacagctgcaagcaggtattggaggaaaagctaaagtacgctatccatttctgtaaatcaattgataccgatgactacgcccgaattgccctgaccggagaaccggccgccgacgactcctcagacgactccgacaatgaagatgttgactcattcgcctctgattcgacacaggactatctgaccgggcattag

SEQ ID NO: 119631 - DNA, 3075 bp, synthetic construct
  misc_feature 1..3075: note = Description of Artificial Sequence: Synthetic coding sequence
  source 1..3075: mol_type = other DNA
atggaaagacgatcccgccgaaagagccggagaaacggcaggtccacggccggcaaagctgcggccacccagcccgccaagtctcctggggctcaactgtggctctttccttccgccgctgggttacatcgggctttactaagacgcgtggaggtgacacgccagttgtgttgttctcctggccgcttggctgtgctcgagagaggcggcgctggcgtccaggtccaccaactgttagccgggtccggcggcgcacggactcctaaatgtattaaactggggaagaatatgaaaatccacagcgttgatcagggcgcagaacacatgctgatcctctcaagcgacggcaagcccttcgagtacgacaattatagcatgaaacatttgcgcttcgaatccatcttacaagagaagaagattattcaaataacctgcggcgactatcacagcttagccctcagcaagggcggggaactttttgcctggggccagaatctgcacggtcaattgggcgttggccgcaaatttccatctaccaccactcctcagatcgtcgagcatctggcaggcgtgcctttggctcagatttccgccggagaggcccattcaatggccttgagcatgagcggaaacatttattcttggggcaaaaatgagtgcggccagttaggactcgggcatactgaaagtaaagatgatcctagcctcatcgaggggcttgataaccaaaaggtggaattcgtggcttgtggaggctcgcacagcgctttgctgactcaggacggactgctgtttaccttcggggctgggaaacacggccagcttggtcataattcaacccaaaacgaattacgtccatgtctggtggctgagctggtcggttaccgtgtgactcagattgcctgtggacggtggcatacgctggcatacgtgtccgatttaggaaaagtcttctcttttgggagcggaaaagacggacagttggggaacgggggcactagggatcaactaatgcccctgccggtcaaagtgtcatcatcagaggaattaaaactggaaagccacacctccgaaaaagaattaatcatgatcgcagggggcaatcagtccattttgctatggattaagaaagagaattcatacgtgaacctgaagcgcacgatccctaccttgaacgaaggtaccgtgaaacgctggatcgccgacgtcgagacaaagcggtggcagagtaccaaacgagagattcaggagatcttctccagcccagcatgcctgacaggctcttttttaaggaaacgtcgaacaaccgagatgatgcctgtgtacctcgatctcaataaggcccgcaatatctttaaggaactcacacagaaggattggatcacaaacatgatcacaacctgtctaaaggacaatctgcttaaacggctcccctttcactctccaccacaggaggcattagagattttcttcctcctgcctgaatgccctatgatgcacataagtaacaattgggagagtctagtcgtaccattcgcaaaggtggtgtgcaagatgtcagatcagagttcgttggtccttgaggaatactgggccacactgcaggagagtaccttcagtaaacttgtgcagatgttcaaaacagctgtgatctgtcagttagactattgggacgagagcgctgaggaaaacggcaacgtccaggcactgctcgaaatgctgaaaaaactccaccgggtgaatcaggtcaagtgtcaactaccagagagtatcttccaagtggatgagcttttgcaccggctcaatttctttgtagaagtctgtaggcggtatttgtggaagatgaccgtcgacgcgtcagagaatgtgcagtgctgtgtcatcttcagccactttccctttatcttcaataatctctctaagattaagctgcttcacacagacaccctgctgaagatcgagtcaaagaagcacaaggcatatcttaggagtgctgccattgaagaggaacgggagtctgaatttgccctgcggcctacatttgatctcacggtacggagaaaccatttgattgaggacgtcctgaaccagttgtctcagtttgaaaacgaagacctgcgcaaagagctttgggttagcttttcaggagagattggttacgaccttggaggagtgaaaaaggagttcttctattgtctattcgctgagatgatccagccagagtatggtatgttcatgtatccagaaggggcttcctgtatgtggttccctgtgaagcccaagttcgagaagaagcgctactttttctttggggtgctgtgtgggttgtctctctttaattgtaatgtcgcaaatttgccttttcccctggcactgtttaaaaagctcctagatcaaatgccctcactggaggacctcaaggagctgtccccagatctcggaaaaaacctgcagacactcctcgatgatgagggggataatttcgaggaagtgttttacattcatttcaacgtacactgggaccgcaatgatactaatttgattcccaatggatcaagcatcactgtaaatcaaaccaataaacgcgactatgtgtccaagtatattaactacattttcaacgacagcgtgaaagctgtctatgaggagtttaggagaggattctacaaaatgtgtgacgaggacattatcaagttgtttcaccccgaggaactcaaagatgtgattgttggtaatacagattatgactggaaaacttttgaaaaaaatgctcgctatgagcccgggtacaactcctctcacccaacaatcgttatgttttggaaagcatttcacaaacttacactggaagagaaaaagaagttcttagtctttcttactggcacagacaggctccagatgaaagacctgaataatatgaagatcacattttgttgccctgagagctggaatgagcgcgatccaattcgtgcccttacctgtttctccgtcctgttcttgcccaagtatagcaccatggaaaccgttgaagaggctcttcaggaagccatcaacaacaataggggattcggctag

SEQ ID NO: 119632 - DNA, 1854 bp, synthetic construct
  misc_feature 1..1854: note = Description of Artificial Sequence: Synthetic coding sequence
  source 1..1854: mol_type = other DNA
atgggtcccaccctggctgtacccacaccttacggttgtatcggatgcaaactcccgcagcctgagtatccacctgccctgattatcttcatgttttgtgccatggtcatcacaatcgttgtcgatttgattggaaattcaatggtgattctggcggttaccaaaaataagaaattgcgtaactcaggcaatatcttcgttgtgagcctgtcggtggcagatatgctggtggccatttatccctatcccctaatgttgcatgctatgtcaatcggcggatgggacctctctcagctgcagtgtcaaatggtgggtttcatcacaggcctatccgtggtggggagtatctttaacatcgtggccattgcaattaatcgttactgttatatttgccacagcttgcagtatgagcgcattttttccgtgcgcaatacatgtatctaccttgtgattacttggatcatgaccgtccttgctgtgctgcccaatatgtatatagggactatcgagtacgatccccgtacctacacgtgtatcttcaattatttgaacaaccccgttttcacggtgaccatagtgtgcatacacttcgtgctcccgctactgattgtgggattttgctacgtgcgaatctggactaaggttctggcagcccgtgacccagcgggtcagaaccccgacaatcaactcgctgaggtgcggaactttttgactatgttcgtaatttttttgttattcgctgtgtgttggtgcccaataaatgtcctgactgtgctggtggccgtcagtcccaaggagatggctggaaagatccccaattggctgtacctcgctgcgtatttcatcgcatacttcaatagctgcctgaatgctgtgatctacggactgctgaatgagaacttcaggcgggagtactggacaattttccatgccatgcgacacccaatcatattcttctccgggctgatctcagatatacgtgagatgcaagaagcaaggacgttagcaagggcacgcgcacacgctcgagatcaggctcgcgagcaagatcgagcccacgcctgtcctgccgtggaggaaactcccatgaatgtgaggaacgtgcccctgcctggtgatgcagcagctggccatcctgatcgtgcttccggccatccgaagcctcactcaaggtcatcgtcagcctatcgcaagtccgccagcacacaccataaaagtgtgttctcgcacagcaaggctgctagcgggcacctgaaacctgtatccggccattccaagcccgcgtctggccaccctaaaagtgccaccgtttaccctaaaccggcttcagtccacttcaaggccgacagcgtccactttaaaggtgattcggtacattttaaacctgatagcgtgcactttaagccggcctcctccaaccctaaacccattacaggacatcatgtatctgccggcagtcacagtaaaagcgctttctctgccgccaccagccatccaaaaccgacgaccgggcacatcaagcccgctaccagccacgccgaacctacgacggcagattacccaaagcccgcaactacctcccaccctaagccaacggcagccgacaacccagaactgtctgcctcccattgcccggagatccctgccatcgctcaccccgtcagcgacgatagtgacttgccagaatctgccagctccccagcagctggcccaacgaaaccagccgcatcccagctggagtccgacacaatagcagatctaccggaccccaccgtggtgactacctctacgaacgattaccacgacgtggtcgtgatcgatgtggaagacgacccagacgaaatggcggtgtag

SEQ ID NO: 119633 - DNA, 13125 bp, synthetic construct
  misc_feature 1..13125: note = Description of Artificial Sequence: Synthetic coding sequence
  source 1..13125: mol_type = other DNA
atgaaggttgaccgaaccaaactcaaaaaaacccccactgaagcccctgccgattgtcgcgcactcatcgacaagctgaaagtgtgcaacgacgagcaacttctgctggaattacagcaaatcaagacctggaacatcggcaaatgtgagctgtaccactgggtcgatctactggacaggttcgatggcatcctagctgacgctggacagaccgttgaaaacatgagttggatgctggtgtgtgaccggccagagcgcgagcagctcaaaatgttgttgttggccgtgctgaactttaccgccctgctgatagagtattccttcagcaggcatctctatagcagcatcgaacaccttaccacgctactcgcaagtagcgacatgcaggttgtgttggctgttctgaatctcctgtatgtgttttccaagcgcagcaattacataactcgtcttggtagcgacaagaggacgccccttctgactaggcttcagcaccttgcggagtcatgggggggcaaagagaacgggttcggtctcgccgagtgctgtcgggacctccatatgatgaaatacccaccttccgcgacgactttacacttcgagttttatgcagaccccggtgccgaggtaaagatagagaaaaggactacatcaaacactctccactacatccatatcgagcaactcgacaagatcagtgaaagtcctagtgagatcatggagtccctgacaaagatgtatagcatccccaaggataagcagatgctcctgttcacccatatcaggctggcacacggattcagtaaccacagaaaacggttgcaagcagtccaggccaggcttcacgccataagcatactcgtgtatagtaacgccctgcaagagtccgcgaatagtattctgtacaacgggctcatcgaggagttggtagacgtcctccagatcactgacaagcagctgatggaaatcaaggctgcctcactccgaacattgacgagtatcgtgcacctggagaggacaccaaaactgagttccattatcgactgcacagggactgcaagctaccacggcttcctgccagtgctcgtgcggaactgtattcaggctatgattgatccttcaatggacccctatcctcaccaattcgcgacagccctgttttctttcctgtatcatctggcatcctatgatgccggtggagaggctctcgtttcttgcggaatgatggaagccctcctcaaggtgatcaaattcctcggcgacgagcaagaccagattacctttgtaacaagagctgtgcgcgtcgtggatctgattaccaacctcgatatggccgcttttcagtcacacagcggactgtcgatattcatttatcggctggagcacgaggtggatctgtgtcgcaaggagtgtccctttgtcatcaaaccaaaaattcagagaccaaacaccacccaggagggggaggagatggagactgatatggacggcgtacagtgcattcctcagcgagccgccctgcttaagagtatgctgaactttctaaagaaggcgatccaggatcccgccttcagtgacgggataaggcacgtgatggacggtagcctgcccacctctctcaagcacatcatctccaatgccgagtactacggcccctctttatttttgttggctaccgaagtggtcactgtattcgtattccaggagccaagcctactctctagcctgcaggacaatggtctaactgacgtgatgcttcacgcccttctcatcaaagacgtacctgctacgcgcgaggtgctggggagcttgccgaacgtgtttagcgccctgtgcttgaatgcgcggggcttgcagagctttgtgcaatgccagccgtttgaacgtctgttcaaggtcctactgagccccgattatctccccgccatgcgacgccgcagatcttcagatcccctgggcgacactgcttcgaatttgggttcagcagtggatgagcttatgagacatcaacctaccctcaaaactgatgccacaacggctattatcaagttgctcgaagagatttgtaatctgggcagagaccctaagtacatctgtcaaaaaccttccattcagaaagcagatgggacggccacagcaccccccccccgatccaatcatgcagctgaagaggccagctcagaggacgaggaggaagaagaggtgcaggcgatgcaaagcttcaactccacgcagcagaatgagacagagccaaaccagcaggtggtaggaactgaagagcgcatccctatccctctgatggactatattctgaacgttatgaagtttgtcgagtctatcctgtcgaataacaccaccgacgaccactgccaggagttcgtgaatcagaagggactcctaccactcgtgaccattctgggcctcccaaacctgccgatcgactttcccaccagtgcagcctgtcaggcagtcgctggcgtgtgcaaatctatcctgactttgtcgcatgaaccaaaagtcctacaggaggggctgttacaattggattcaatcctcagtagccttgaacccctccacagacctatcgagtccccgggagggagtgtgttactcagggaactcgcatgtgcgggaaacgtcgccgacgccaccctctctgcccaggcaacccctttgctgcacgcattgaccgctgcccacgcctacatcatgatgtttgtgcatacttgcagggttggccagtccgaaattagatccatctcagttaatcagtgggggtctcagctaggattgtccgtactgagtaagctgagtcagttgtattgttcgctagtttgggagagtaccgtgcttctgagtctttgcactcccaactcgctgccctcaggatgtgagttcggtcaagccgacatgcagaagctggttccaaaggacgaaaaagctggcacaactcagggtggtaagcgttccgacggcgagcaggacggtgcagccggctctatggatgcctccacacagggactgttagaaggcatcggacttgacggagatacattagctccgatggagacggatgagcccactgcgtccgacagcaagggaaagagcaaaatcactcccgctatggcagcaaggattaagcagattaaaccactgctcagcgcatccagccgactgggaagagcccttgccgagctgtttggactgctcgtcaaactctgcgtcgggtccccagtgcggcagcgtaggtcccatcacgctgcgtctaccaccacagccccaacgccggccgcccgtagcacagcatccgcccttacaaagctccttactaagggtttaagttggcagcctccaccttacactcccacaccaaggttccggcttaccttcttcatctgctcagttggtttcacttcccctatgctcttcgacgagcggaagtacccatatcacctaatgctccagaagttcctttgtagcgggggtcacaatgccttgtttgaaaccttcaactgggcactttctatgggtgggaaggttcccgtgtccgaaggcctggagcatagcgatcttcccgacggcactggagagttcctggatgcctggttgatgctggtggagaagatggttaaccctacaacggtccttgagagccctcactccctcccggcaaagttacccggaggagtgcaaaattttccgcagttttctgcgctgcgatttctggtagtcactcaaaaggccgcttttacgtgtattaagaatctctggaatagaaagccgctcaaagtgtacggtggcagaatggctgagagcatgctggcaatactgtgtcacatcttgcgaggcgaacccgttattcgagagcggctctctaaagagaaggaagggtctcgcggcgaggaggacactgggcaggaagagggtgggtctaggcgcgagccccaggttaatcagcaacaactgcagcagctcatggacatgggtttcaccagggaacatgcaatggaggccctcctgaacaccagtaccatggagcaggccacagaatatctgcttactcatccacctcctatcatgggaggggtggttcgagatctctccatgtccgaagaggaccaaatgatgcgagcaattgcaatgagccttggccaggatatacccatggaccaaagagccgaaagtccggaggaagtcgcttgccgcaaggaagaagaggagcggaaagccagagagaagcaagaagaagaagaagccaagtgcttggagaagtttcaggatgctgatccccttgagcaggatgaactccacacctttaccgataccatgctgccaggctgcttccatctactggacgaactccctgatacagtataccgagtgtgtgacttgatcatgacggctatcaaaagaaacggtgctgattatagagacatgatcctcaagcaggttgtgaatcaagtctgggaggccgctgacgtcctgattaaagcggcccttcctcttactacaagcgacaccaaaactgtcagtgaatggatttcacaaatggccacactgccgcaggcttctaatctcgctactagaattctgctactgactctgctctttgaggaactgaaattgccttgtgcttgggtcgtagagtcatctgggatcttaaatgtgctcatcaagctgctcgaagtcgttcagccttgtttgcaggccgccaaggagcagaaggaggtgcagacacctaaatggatcacgccagtgctcctgctgatcgatttctatgaaaaaactgctatatctagcaaacggagagctcagatgaccaagtatctccagagcaatagcaataattggcggtggttcgacgacagaagtggccgatggtgttcctacagtgcctccaacaactctaccatcgatagtgcatggaagagcggggagacatcggttcgctttacggccgggagacggagatacacagtccaattcacaacaatggttcaggttaatgaagaaaccgggaatcgccggccagtgatgcttacattgcttcgcgtgccgagactgaacaaaaactccaaaaatagcaatggtcaggagctggaaaagaccctggaagagagtaaggaaatggacattaagaggaaggagaacaagggcaatgatacccctctcgcattagaaagcactaacactgagaaagagacgtctctcgaggaaaccaaaatcggcgaaatcctgattcagggtctgacggaagatatggtgactgtgctgatccgtgcctgtgtttcaatgctgggagtgcccgtggaccccgacactttacacgcaacactcagactgtgtcttcgccttacgcgcgaccacaaatatgcaatgatgtttgctgaattgaagagcacaagaatgattctgaacctcactcagagtagcggatttaacgggttcacccctctcgtgaccctgttattgaggcatatcatagaggacccctgcactctaaggcataccatggagaaagttgtccgctctgctgcaaccagcggcgccggaagtaccacctctggcgtcgtcagcggatctctggggagtagggagatcaactacattcttagagtgcttgggcctgcagcatgcaggaatcctgacattttcaccgaggttgcgaattgctgtataagaatcgccctcccagctccccgcggtagcggtactgcatccgacgatgaattcgagaacctccgtattaaagggccaaacgctgtacagctggtgaagacaactccactcaagcccagtccacttcccgtgattcccgatacaattaaggaggttatttatgacatgctgaacgccctggctgcctatcacgctccagaagaggcagataagagtgatcctaaacccggtgtgatgacccaagaagtgggacagcttctccaggacatgggcgacgatgtctatcaacagtaccgatccctgacacggcagtcttccgactttgatacccagtccgggttttccataaacagtcaggtgttcgccgccgatggcgccagtactgagacgtctgcctccgggaccagtcagggcgaagcaagcactccagaagagagccgagatggcaaaaaggataaggaaggagaccgcgcctctgaggagggaaagcagaaagggaagggatccaagccacttatgcccactagcaccattctgcgcctgctggccgaactggtgcggagctacgtgggcattgctacactgatcgcgaactattcctatactgtggggcagtccgagttgatcaaagaggattgttccgtgctggctttcgtgctcgaccacctgctcccacacacacagaacgccgaagacaaagacacacccgccttggcgcgactgttccttgccagcctggccgccgctggatccgggactgacgcccaggtggctcttgtcaatgaggtcaaggcggctctgggaagggcactggctatggccgagagcacagagaagcacgctcgtctgcaagctgttatgtgcatcatctccactatcatggagtcatgcccgagtacctctagcttctatagctccgctacggctaagacccagcacaacggcatgaacaatatcataaggctcttcttgaaaaaaggactcgttaatgacctggcaagggtcccacacagcctcgatctgagtagtcccaacatggccaataccgtgaatgccgctctgaagcccttagaaacactgagcagaatagtcaatcaacccagctctctgttcggtagtaagagtgcctcatctaaaaataagagcgaacaggatgctcaaggggcatcacaggacagtagttccaatcaacaggaccccggggagccgggcgaggctgaagttcaggaagaagatcatgacgtaacccagaccgaggttgccgatggagatatcatggatggcgaagccgagacagacagcgttgtgatcgccggtcagcccgaggtcctctctagtcaggagatgcaggtggagaatgaactcgaagatcttatcgatgaactgctggaacgagatgggggatccggtaattctactattatcgtctcccggagcggcgaggacgagtctcaggaggatgtgctaatggacgaagctcccagtaatctgtcacaggcgagtacgttgcaggccaaccgcgaagactccatgaacatattagaccctgaggatgaagaggagcacacccaggaggaggacagtagcggtagcaatgaggatgaagatgacagtcaggatgaggaggaggaagaggaagaggacgaggaggatgaccaggaagatgacgagggcgaggagggcgacgaggacgatgacgatgacggcagcgaaatggagcttgacgaagattaccctgacatgaatgcctctcctctcgttcgtttcgaaagatttgatcgagaggatgaccttatcatagagtttgataatatgttttcctccgctacagacattccaccttcccccgggaacattccaaccacccatccactaatggttcgccacgcagaccacagctccctcaccctcggtagcgggtcgtctactacaaggctaacccagggaatcggccgcagccagaggacccttcgccaactcaccgcaaacaccggccatacgatccatgtccactatcctggaaatcggcagccaaatccacccctcatcctgcaaaggctcctaggcccttccgccgccgccgacatattgcaactgtcttccagcctgcctctgcagtctcggggcagagccaggctcttggtgggaaacgacgatgttcatattatagcccgttctgatgatgagttgctggacgattttttccatgaccagtctacggccacctcacaagccggcactttgtccagcatcccaaccgctctgactcgatggactgaagagtgcaaggttctcgacgctgagtccatgcatgattgcgtcagcgtggttaaagtaagtatcgtgaaccacctggaattcctgagggatgaggaacttgaagaacgtcgagaaaagcggcgaaaacaattggcggaagaagaaacaaagataacggacaaggggaaggaggataaagagaaccgcgatcaatcagctcagtgtacggcctctaagagcaacgatagcaccgaacagaatctctccgacgggactcctatgccggactcgtaccccaccactcctagttccacagacgcagccaccagcgagtctaaggagactcttgggactctgcagagttctcagcaacaacccacactgccaaccccccctgctcttggtgaagtgcctcaggagctccagagccccgcaggcgagggaggcagtagtacccagctgctgatgcccgtcgaacccgaggagcttggcccaacaaggccgagtggtgaggctgaaacaacgcagatggagttaagtccagcacccaccataacttccctgtcacccgagagggccgaggactctgatgccctcaccgcagtgagtagtcaacttgaaggaagcccaatggacacttcctctcttgcgtcttgcactctggaggaggccgtgggagacacttcggcagcgggcagtagcgagcagcccagggccggttctagcactcctggggacgcccctccagccgtagctgaggttcagggcaggagtgatggatcgggcgaatccgcacagccaccggaagacagcagccctccagcctcaagtgagtcctcctccactagagacagcgctgtggctatttccggagccgatagtcgggggattttagaagagcctttgccgagcacctcttccgaggaggaggacccgctcgcaggcatctcgcttccggagggagtcgacccgtccttccttgccgcactgcccgacgacatccgccgtgaggtgttgcaaaaccagctggggatccgtccgcccaccaggaccgcaccctccacaaactcatccgcccctgccgttgtggggaaccccggagtgacagaagtgagccctgagtttctagccgccctgccccctgctatccaagaagaggtgttggcccagcaaagagcggaacaacaaagacgcgagctggcccagaacgcttccagtgatactcctatggatcctgtaacgttcattcagaccctcccttcagatctccgaagaagtgtgctggaggatatggaggattccgttctggccgttatgcctcccgacatcgcagccgaggcgcaggctctgcggagagagcaggaagccaggcagcgtcagctcatgcacgaaaggctcttcgggcattctagtacatctgccctgagcgccatactccgctctccggcattcacgagcaggctgtcaggcaataggggtgtgcaatacactcggttagccgtgcaaaggggcgggaccttccaaatgggcggcagctcttcccataacaggccaagcggatcaaacgtggacactttgctgagactccgtggcagattgctgctagatcatgaagccttatcatgtctgctcgtgcttttgttcgtggatgagccgaaactaaacacaagtaggctgcacagagtgctgcgcaacctgtgttaccatgctcaaacgcggcactgggtgattcgttcgctattgtccattctccagcgttcttctgagtctgagttgtgtattgagactcctaaacttactactagcgaggagaaggggaagaagtctagtaagtcttgcggcagctcaagccacgagaacagaccattggatttattgcacaagatggagagcaaatccagtaatcagttgtcctggttgagcgtctctatggacgccgccctgggctgtcggacaaacattttccaaatacaaagaagtgggggtaggaagcacacagagaagcacgcaagtggaggaagcaccgttcatatacacccacaggcagcccctgtcgtttgtcgccacgtgctggataccctgattcagctggcgaaggtctttccatcacactttacccagcaacgaaccaaagagaccaactgtgaaagtgatcgggaacggggaaacaaagcctgctccccatgctcatcccagagcagctcttccggaatttgcaccgacttttgggacctcttggtcaagctggacaacatgaacgtctccaggaaaggaaagaattccgtcaaatccgtgcccgtttctgcgggtggtgaaggcgagacctccccttattccctggaagctagccctctggggcaattgatgaacatgctctcacacccggtgatcaggcggtcaagtctactaaccgagaagttgctgcggctgctgagcttgattagcatagccctgccagagaacaaggttagcgaggcacaagccaactcaggttccggggcctcatctacaaccaccgccaccagtaccacttccaccacaactacaacagcagcatcaactacaccgacccccccaaccgcacccacaccagtaacaagcgcccccgctttagtcgctgctaccgctattagtactattgtggtggccgcatctactacagtcactacaccaacaacggctacgaccacagtgagcatcagccccacgaccaagggcagcaagtcacctgccaaggtttcagatggtggcagctccagcaccgacttcaaaatggtaagcagcggattgaccgagaatcagctacagttaagcgtagaagtactgacctcccattcctgtagcgaggaaggcttggaagatgcggctaacgtgctgctccagctctcgagaggtgattctggtacccgcgatactgtccttaaacttctcctgaacggagcgagacaccttgggtataccctgtgtaaacagataggcacactcctggcggagcttagagagtataatttggagcagcagaggagagctcaatgcgagaccttgtcgcccgatggcctgccagaggaacagccacaaacaactaagcttaaggggaaaatgcagtcgcggtttgacatggccgagaacgtggtcatcgtggcctcccagaagagacccttagggggccgtgagctacagctgccttccatgtcgatgctgacatcaaaaacctccactcaaaaattcttcctgcgagtgctgcaggtgatcattcaactgagggacgacacaagacgggccaataagaaggccaagcagaccggcagactcggctcaagtgggctcgggagtgccagctctatccaggcagctgttcgtcagctggaggctgaagccgacgcgatcatccagatggtgagagaaggccagcgtgcccgacgacaacagcaggccgccaccagcgaatccagccagtccgaggcttccgttagaagagaagaaagccccatggatgttgaccagcccagccctagtgcacaggatacgcaatccattgcttcagacggtacaccccaaggtgagaaggagaaggaggagcggccacctgagctgccactcctaagtgagcagctttcactagacgagctatgggacatgctgggggaatgtttgaaagaactggaagaaagccacgatcagcatgctgtcctggtcctgcagcccgccgtggaggcgttcttcttggtacacgccacagagcgcgaatcaaagcctcccgtgcgtgatacaagagagagccagctagcgcacattaaggacgaacccccacccctcagtcccgctccgctgactcccgccaccccatcatcgcttgatcctttctttagcagagaaccctctagcatgcacataagctcttctctgcctcccgacacccagaagtttctgaggttcgctgagacacataggacagtgcttaatcagatcctgaggcagtctaccacccacctggcagacggaccttttgctgtgttagtggactatatccgggtcctggattttgacgtcaagaggaagtactttaggcaggagctggagaggctggacgaaggcctgaggaaagaagacatggcggtgcacgtaagacgggaccatgtgtttgaggattcttaccgcgagttacacagaaagagcccagaggagatgaagaaccggctgtacatcgtgtttgagggcgaggaaggccaggacgccggtggcctcttaagagaatggtatatgatcatctcacgcgagatgttcaaccctatgtatgccctgtttagaacgtccccaggagatcgtgtgacttacactatcaaccccagctcccattgcaatcccaatcacctaagttacttcaaatttgtggggcgaatcgtagctaaggctgtgtacgacaaccgtctgcttgaatgttactttaccagatccttctacaaacacattctgggcaagtccgtgagatacacggatatggagagcgaggactaccacttctaccagggactagtgtacctattagaaaatgacgtgtccacgctcgggtacgatctgaccttctctaccgaagtgcaggaattcggcgtctgtgaagtccgagatctcaagcccaatggagccaacatactggttacagaggaaaacaaaaaagaatatgtgcatctcgtgtgccaaatgagaatgactggggctatcaggaagcagttggccgcttttctggaaggtttttacgagattatcccgaaaaggctcatcagcatcttcaccgagcaggaactcgagttgctgatctccggcctccctacgattgacattgacgaccttaaatctaatactgagtatcataaataccaaagcaattccatccaaatacagtggttctggagggcactacggagcttcgatcaagcagatcgggccaaatttctccagttcgtaaccgggacctctaaggtgcctctccagggcttcgcagctctagaaggaatgaacggaatccagaagttccagatccatcgggatgaccgcagtacagatagattgcccagcgctcacacgtgttttaaccagctggacctacccgcctatgagagctttgaaaagctcaggcacatgttgctgctggccatccaggaatgctctgagggattcgggctcgcttag

SEQ ID NO: 119634 - DNA, 13125 bp, synthetic construct
  misc_feature 1..13125: note = Description of Artificial Sequence: Synthetic coding sequence
  source 1..13125: mol_type = other DNA
atgaaggtggatcggactaagttaaagaagactcctacagaagcccccgccgattgtcgtgcgctgatcgataagctgaaggtctgcaatgacgaacagctgttactggaactgcagcaaataaagacctggaacattggaaaatgcgaactgtatcactgggtggatctgctcgacaggttcgatgggatcttggccgacgcaggccagactgtggaaaacatgtcatggatgcttgtatgcgataggccagaaagggaacaacttaagatgctgttgctggctgtcctcaactttacagctcttctgatcgaatacagcttctcccggcacctctactcatcgatcgaacatctcactactctgttggcctcctcagacatgcaggtggtgctggcagtactcaaccttctgtatgtgttctctaagaggtccaactatatcactcgcctcggcagcgacaagagaacccccctcctaacaaggctgcagcacctggccgaatcctgggggggcaaagagaacggcttcggattagccgagtgttgccgggacctgcacatgatgaaataccctccctccgccaccacactccacttcgaattttatgcagaccctggcgccgaagtgaagatcgaaaagagaacgacttccaataccctgcactatattcacattgagcaacttgataagatatctgagtcccctagcgagattatggagtcactgaccaagatgtattccattcctaaggacaagcagatgctgctgttcactcatattcggctggcccacggcttctctaaccatcgcaagcgcttgcaggcagtccaggctaggttgcacgcaattagcatcctcgtatattccaatgccctgcaggaatccgccaactctatcctctacaacggcctaatcgaagaactcgtggacgtcctgcagataaccgataagcagctgatggaaatcaaggcagcttccctgcggaccttaacctccatcgtgcacctggaacggacacccaaactgtcctcgattatcgattgtacaggtacagcttcttatcacgggttccttccagtgcttgtccgcaactgcatacaggctatgatcgaccccagtatggatccttacccacaccaattcgctactgcccttttttctttcctctatcatctcgcatcgtatgatgctggaggcgaggccctagtgtcttgcggaatgatggaggccctacttaaggtgatcaagttcttgggcgacgaacaagatcagattaccttcgtgacaagagccgttagagttgtagatctgattactaacttagacatggcagccttccagagccattctggccttagcatctttatttaccggttggaacacgaggtggacctgtgtcggaaagaatgcccctttgtgatcaagcctaaaatccagcggcccaacaccacccaagagggagaagagatggaaaccgatatggacggcgtgcaatgtatccctcaacgggctgctctgcttaagtccatgttgaattttctgaagaaggccatccaagatccagctttcagcgatggtataagacacgtaatggatggaagtctccccacttctcttaagcacattatctctaacgctgagtactacgggcccagcctctttctgcttgccaccgaggtggtaaccgtgtttgtcttccaggagccctcactgttgagttcccttcaggacaatggactgacagacgttatgttacacgcactcctgatcaaggatgtgccagctacccgcgaagtgctcgggtccctgcctaacgtgtttagcgctctgtgtctaaacgcccgcggcttgcagagtttcgtccagtgtcagccctttgagcggctatttaaggttttactcagtcctgattacctgcccgctatgcgtaggagacgaagctccgatcccctgggcgataccgcttctaatcttggctccgccgtagatgagctgatgcgacaccagcccactctgaagacagacgcaactacagccataatcaagctgctggaagagatctgcaacttggggcgggaccctaagtatatctgccagaagccttcaattcagaaggcagatggcacggctaccgcgcctccccctaggagcaaccacgcggccgaggaggcctcttctgaggacgaagaggaggaagaagtgcaggcaatgcaaagcttcaattccacccaacaaaacgagaccgaaccaaaccagcaggtggtcgggacagaggagcggataccaattcctctaatggactacatccttaatgttatgaaatttgttgaatctatcctgagtaataatacaacagacgaccactgccaggaattcgtgaaccaaaagggcctcctgccactggtcaccattctcgggctgcctaatctcccaatagactttcccaccagcgctgcatgccaggctgtggccggcgtgtgcaaatcaattcttaccctttctcatgagcccaaggtcctgcaagaaggcctgcttcaattggactcgatcctcagtagcctggagcccctccaccgccctattgagtccccgggaggctccgtgttgctgagggaattagcatgcgccggcaacgtggcagacgctaccctatctgcacaggcaaccccactcctccacgcgttgactgctgctcacgcctacatcatgatgtttgtccatacctgtagggtgggccagagcgagataaggagcatttctgtgaaccaatggggttctcagttgggcctgtctgtcctctccaaactgtctcagctgtactgctccttggtgtgggagtcaacagtcctgcttagtctctgtacccccaacagtttaccttccggatgcgagttcgggcaggctgacatgcagaagcttgtgccgaaggacgagaaagctggtaccacccaaggcggaaaacgatccgacggtgaacaagatggtgcagccggcagtatggacgcatcgacacagggcctgcttgagggcataggtctggatggtgacacactcgctcccatggagactgacgagcccacggcgtcagactcaaagggaaagtctaaaattaccccggccatggccgcccgaatcaaacaaatcaagccgttattgagtgccagcagtcgtcttggacgagcgctcgccgaactgtttggcctactcgtgaaactgtgtgtgggaagtcccgtgcggcagcgacgatctcaccacgctgcatccactaccactgccccaacgccagctgcgcgctcgaccgcttctgcccttaccaagttgctgactaagggcttatcctggcagccacccccctataccccgacccctcgctttaggctcacctttttcatatgtagcgtgggattcacatctcctatgctcttcgatgaaaggaaatacccctatcatttgatgctccagaagttcctgtgttcgggcggtcataatgccctcttcgaaaccttcaactgggccctatctatggggggtaaagtgcccgtatccgagggactggaacactctgaccttcctgacgggacaggggaattcctcgatgcatggcttatgctggttgagaagatggtcaatcccactactgtgctcgagtctcctcatagcctgcccgcaaagttgcctggcggcgtgcagaatttcccacaattcagcgcgctccggtttctggtcgtcacccaaaaggcagcattcacttgtatcaaaaacctgtggaatcggaaacctctcaaagtctatggaggtcggatggccgagagcatgctcgccatattgtgtcacattttgcgtggcgagccagtgatccgggagcgactgtctaaagagaaagagggctcccgtggcgaagaagataccggtcaggaggagggcggaagtcgtcgggaaccgcaagtaaaccagcaacagctgcagcagctaatggacatgggcttcaccagggagcatgccatggaggcactgttgaacacaagtaccatggagcaagccaccgagtatctgctgactcatcctccgcccatcatgggaggggtagtacgtgatctgtcaatgtccgaagaggatcagatgatgagagccatagccatgtcgctgggtcaggacattcccatggatcaaagggcagaatcccctgaagaggtggcatgccgcaaagaagaggaggagcgaaaggcacgtgaaaagcaagaagaggaggaggccaagtgcctcgagaagtttcaggacgctgaccccctagagcaggacgaattgcacacgtttaccgacaccatgctgcccggctgtttccacctgttggatgaactccctgacaccgtataccgggtttgcgatctgatcatgacagcaattaaaagaaatggcgccgattacagagatatgatcctgaagcaagtggtaaaccaggtgtgggaggctgcagacgtgctcataaaagctgctctgcccctgactactagtgacaccaagacagtgagtgagtggatcagtcagatggccacactgccgcaagcttccaacttggccaccagaatcctgttgctaacactgctctttgaggaattgaagctgccgtgcgcgtgggtggtggaaagtagtggtatcctaaatgttctgatcaagttgctcgaagtggttcagccctgcctgcaggccgcgaaagagcagaaagaggttcagacccctaagtggatcacacccgtattactcttgattgacttttatgagaagaccgccatcagtagcaagcggcgggcacagatgacgaagtacctccaatccaactcaaacaattggcgttggttcgacgaccgcagcggccgctggtgttcatacagcgcctctaacaatagcaccatcgacagtgcctggaagagtggtgaaacaagcgtcaggttcaccgccgggcgaagacggtataccgttcagttcacaaccatggtacaagtgaatgaggagacgggtaaccgccggcctgtaatgctgacactactgcgcgtccctcggttgaataagaactctaagaactccaatggccaagagttggaaaagactctggaagagtccaaggagatggatatcaagcggaaggagaataagggaaacgatacccctctggcccttgagtcaacaaatacggagaaagagacgtctctggaggagacaaagataggcgaaatcctgatacagggcctaacagaggacatggtcaccgtcttgattagagcttgcgtatcgatgttaggcgtacctgtagatccggacactctgcacgctaccttgaggctctgcctgcgcctaactagggatcacaagtacgctatgatgtttgctgagcttaagagcacccgcatgattctgaatctgactcagtcaagtggttttaacggctttacacctctggtcaccttactgctgcgccacattatcgaagacccatgtaccttaagacatactatggaaaaggtggttaggagcgcggccactagcggggctggctccaccacctcaggggtggtcagcggtagcctgggctctagggagattaattacattctgcgtgtgctcgggccggctgcttgtagaaacccagatatttttaccgaggtggccaattgctgcataaggatcgctctgccagccccacgcgggtctggcacagctagcgacgatgagtttgaaaatttgcgaattaagggccctaatgcggtgcagcttgtgaaaaccactccccttaagcccagccctcttcctgtgatcccagatactattaaagaggtaatctatgacatgctgaatgctctggccgcataccacgcgccggaggaggccgataaaagtgaccccaagcctggtgttatgacccaggaagtggggcaactgctgcaggatatgggagacgacgtgtaccagcagtaccgaagcctcacccgacagagtagcgactttgacactcagtcaggcttttccattaactcccaagtgttcgcagccgatggtgcaagcaccgaaaccagcgcctccggaacatctcagggcgaggcctctaccccagaagaatcccgcgatgggaaaaaggacaaagaaggtgaccgggcttctgaagagggcaaacagaaggggaagggcagcaagccgctaatgccaacttctaccattctgcggctactggccgaactcgtgcggagttacgtgggtattgccactcttattgctaattatagttacactgtgggccagtcagaactgatcaaagaggactgctccgtgctggcttttgttcttgaccatctcttacctcacacacagaatgccgaggacaaggatactcctgcacttgcacggctcttcctggcttcccttgccgctgccgggagcggcacagacgctcaagtcgcactggtcaacgaggtgaaggctgctctggggcgggctctcgccatggctgaaagcacagagaagcacgccaggcttcaggctgtcatgtgcattattagtaccatcatggagagttgtccatcaacaagtagtttttattcaagtgctaccgctaagacgcagcacaacgggatgaacaatatcatccgccttttcctgaagaaaggactggttaacgaccttgctcgggtaccgcattcacttgatctctcgtcccctaacatggctaatactgtcaacgcagccctaaaacctcttgagacactttctcgaatcgtgaaccagccatcctcattgtttggatccaagtctgctagcagcaaaaacaaaagtgagcaggatgcccagggagccagccaagatagctcctccaaccaacaagatcctggcgaacccggagaggcggaggtccaggaggaggaccacgacgtcacacagactgaggttgccgacggggacattatggatggtgaggccgaaaccgattcagttgttatagctggacagcccgaggtcctgtctagtcaggagatgcaggtggagaacgagctcgaggacttgatcgacgaactcctggaacgcgatggcggaagtggaaattcaaccattatagtttcgcgttcaggcgaagacgaatcccaagaggatgtccttatggacgaggcaccctcaaacctttcccaggcttccacgctacaggctaacagggaggactccatgaacatactggatcccgaagatgaagaggagcacactcaggaggaagatagcagtggctctaatgaggacgaagacgacagtcaggacgaagaggaggaagaggaggaggatgaggaggacgaccaagaagacgatgaaggtgaggagggtgatgaagacgacgacgacgacggctctgaaatggaactggacgaggattacccagacatgaacgcctctccgttggtacggttcgagcgattcgacagagaagacgatctgatcattgaattcgataacatgttctcgtctgcgacagatattcccccgtctcctggcaatataccaacaacacaccccttgatggttcgccacgcagatcattcaagcctaaccctgggctccggatcttccaccacgaggcttacacaagggataggccgctcccaaagaacactgaggcagttaacggccaatacaggccacacaatacacgtccattacccagggaatcggcaacccaatccccccttgatcctgcagcggctgttaggaccgtctgccgccgccgacatccttcagctttcttctagcctaccgctccagagccggggccgtgcgcggctgctcgtgggtaacgacgacgtacacataatcgcgcgtagcgatgatgagctattagatgatttcttccatgaccaatctactgccaccagtcaagctggcacactcagcagcatcccaacggcacttactaggtggactgaggaatgcaaggtcctggatgcggagtcaatgcacgattgtgtgtcagtggtgaaggtgagcatagtgaaccacctggagtttcttagagatgaagagctggaggaaaggagggagaaacgcaggaagcagctagcggaggaggagactaaaattaccgataaaggaaaggaagacaaagaaaatcgtgatcagtctgctcagtgtacggcctccaagtcgaatgattccaccgagcagaacttgtcagacggcacaccgatgcctgattcttacccaacaacacccagcagcaccgacgctgctactagcgagagtaaagagactctgggtacactgcagagcagccagcagcaaccaacattgcctactcctcccgccttgggggaggtcccccaggagctacaatccccagccggtgagggtggctcctcgactcaactcttaatgcctgtggaaccggaggaactggggccaacccgcccgagtggcgaagccgagactacacaaatggaactgagtcccgccccaaccataactagcctttccccagagcgcgctgaggatagcgatgccttaacagccgtgtcctcgcagctggaggggagtcccatggatacatccagcctggcctcgtgtaccctagaggaggccgtgggtgatacatctgcagccggctcgagcgagcagccacgggctgggtcatcaaccccgggagacgccccgcctgcagtggccgaagttcaagggaggtcagatggttccggcgagtcagcccagcctcctgaggattcttcaccccctgcaagttccgagtcatcatccacaagggacagtgccgtcgccatcagcggcgctgactcccggggaatcttggaggagcctttgccaagcacttcttctgaagaggaggatcctttagctggcattagcctgcctgagggcgtggacccctcctttctcgccgccctccctgatgacataagaagggaagtgctccagaatcagctcgggatccgcccaccaaccagaactgccccaagtaccaacagcagtgctccagctgtggtggggaaccccggggtgactgaagtgagtccggaattcctggccgccttaccacccgctattcaggaggaggtgctcgcccaacagcgtgcagagcagcaacgtagggagttggcacagaatgctagttcagacacccccatggatccagtgacttttatccagacattgcccagcgatctgcggagaagcgttttggaggacatggaggactctgtcctcgccgtgatgcctccggacatcgccgcagaggcacaggcattgaggcgggagcaggaagccaggcagcgtcagctgatgcacgagcggttgtttggccattcctcaacgagcgcacttagcgctatactgaggtctccagcatttaccagccggctttcaggcaacagaggtgtgcagtatactagactggctgtgcaaagagggggtacattccagatgggcggttcatcctctcataatcgcccgagtggaagtaatgtggacacgctactgcggctgaggggacgccttcttctggaccatgaggccctgtcctgcctgctagttctactgtttgttgacgagcccaagctcaacacctctcgcctacacagggtgctcaggaacctgtgctaccacgctcagacgagacactgggtgatccgaagtctgctttctatcctgcaacgatcctcagaaagcgagctatgtatagaaacccctaaacttacgacgtccgaagagaaggggaaaaaaagcagtaagagttgcggctcgagctctcacgagaataggcctcttgaccttcttcacaagatggagtcaaagtcatctaaccagttgagctggctttccgtgtccatggacgccgccctcgggtgccggaccaatatttttcaaattcagcgtagcgggggaaggaaacacaccgaaaagcacgcatcaggtggtagcacagtacatatccatcctcaggccgcacccgttgtgtgccgccatgtgctggacactctgatccagttagccaaggtgtttccgtctcactttactcagcagcggactaaggaaaccaactgtgaatccgatcgggagagaggtaacaaggcctgtagcccatgtagcagtcagtcttcaagttcaggcatttgtaccgatttttgggatcttctcgtgaagcttgacaacatgaacgtttctcgaaagggcaaaaatagcgtgaagtctgtgccggtgagtgccggtggcgaaggagaaacttccccctactcgctggaagcatcccctctggggcagctgatgaacatgttgtcgcacccggttatccgccgctcatctctgctgactgagaaattgctgcgactgttgtcactcataagtattgctctccccgaaaacaaggtgtcagaggctcaggccaacagtggcagcggggctagtagtacaactacggccacatcgactacgtccactaccaccactacagccgcctctacaactcccacccctcctactgctcctacccctgttacatccgcaccagctctggtggcagctaccgctattagtaccatcgtcgtggcagctagcaccactgttaccactcctactactgcaactacaactgttagtataagccccacgaccaagggctccaagtctcccgccaaggtgagcgacggcggatccagctctaccgacttcaagatggtgagtagtggtctgactgagaatcagctacaactctcagtggaagtgctaacttcccactcatgctcagaagagggtttggaagatgcggcaaatgtcctcctccagctcagcagaggagattccgggactagagacacggtgctgaagctcttactaaacggcgcgaggcatctggggtatactctatgtaaacaaatcggcactcttttagctgagctccgagaatataacctggagcagcagaggagggcccagtgtgaaacactttctccggatggcctacctgaggaacagcctcaaaccacaaagctgaagggcaagatgcaaagtcgttttgacatggctgaaaacgtcgttatcgttgctagccaaaagcgacctctgggagggcgggaactgcagttgccttcaatgagcatgctgacttcgaagacctctacccagaaattcttcctacgcgtccttcaggtgataatccagctgagagatgacacacgaagggcaaataagaaggctaagcagacaggccgactaggctcttccggcctcggcagcgctagctccatccaggccgctgttcgccaactcgaggccgaagccgatgccatcatccaaatggttagggaaggccagcgagcgcgacggcagcaacaggctgctaccagcgagagcagtcagtccgaggcaagtgtgcgccgagaagagtcgcctatggacgtagaccaaccaagcccctccgcccaggacacccaatctattgctagcgacgggacaccccagggagaaaaagagaaggaggaaaggccccctgagctgccacttctctctgagcagctttctctagacgagctctgggatatgctgggtgagtgtttaaaggaactggaggaatctcacgatcaacatgcagttctggtcctccagccggcagtagaagccttctttctggtgcacgcaacagaacgggaatctaaaccccccgtgagggacactagggagtcccaactggcgcatatcaaagatgaacctccacctttaagtccagcacctctgacccctgcaacgcctagtagcctagacccatttttttctcgggagccgtctagcatgcatatctccagtagcctgcctcccgacacccaaaaattcttaaggttcgcggagacacatcgtacagtcttaaaccagatcttaagacagagtaccactcatctggctgacggtcccttcgcagtcctggtggattatatcagggttctggatttcgacgtgaaaagaaagtacttccgccaggagttagagcgcctggacgaagggttgcggaaggaggatatggcggtccacgtcagacgggatcatgtctttgaggatagttatcgggagctgcaccgtaagtcccccgaagaaatgaagaatcgtttgtacatcgtgttcgaaggagaagaaggacaggacgcaggcgggcttttgagagaatggtacatgattatctctcgcgagatgtttaaccccatgtacgctctttttagaacatccccaggcgatagggtgacttacacaatcaatcctagcagtcactgcaacccaaatcacctcagctactttaagtttgtgggcagaattgtcgctaaggcggtatatgacaacagattgttggagtgttattttacaagaagcttctataagcacattctgggtaagtctgtcagatatactgacatggagtccgaggattatcacttttatcaggggttagtttaccttctggagaatgatgtctctacgttaggatacgacctcactttcagcaccgaggttcaggagtttggcgtttgtgaagtgcgtgatctgaaacctaacggggcaaacatcctggttactgaggagaataaaaaagagtatgttcacctcgtatgccagatgcgcatgacaggggcgatccggaaacagctggctgcttttttggagggcttctacgagattatcccaaagcgtctgatcagcattttcacagaacaggagctcgagctgcttatctctggcctgccgacaattgacatagacgatctcaaatctaacaccgagtaccataagtatcaaagcaacagcattcagattcagtggttttggagagctctacggtcttttgaccaggccgatagggcaaaattcctccagtttgtcaccggcacttctaaggtccctctccagggctttgctgcgctggaaggcatgaatggcatccagaagtttcagatccatcgggatgaccggagcactgacagactccctagcgctcacacatgcttcaatcagctggatctgccagcttatgagagcttcgagaagctgagacacatgctgctgctcgctatacaggagtgctccgaaggattcggcctcgcctag

SEQ ID NO: 119635 - DNA, 771 bp, synthetic construct
  misc_feature 1..771: note = Description of Artificial Sequence: Synthetic coding sequence
  source 1..771: mol_type = other DNA
atggatccttacccacaccagtttgccacagccctcttttctttcctgtatcacctggccagttatgatgcaggaggagaagccctcgtgtcgtgcggcatgatggaggccttgctgaaagttatcaaatttctgggagatgagcaggaccaaattacatttgtaacccgcgcagtgagagtggtggacctgatcaccaatctggacatggccgctttccagtcccatagtggtctgtccatctttatataccgcctggaacatgaagtggatttgtgtagaaaggagtgccccttcgtgattaagccgaagatccagagaccaaacacaacccaggagggtgaggagatggaaacagatatggatgtggcagatgttgcaatggagtccagtccaggaagtagtatctcaatggagcaccgtctggacgtggaacttcgcgcctcggggagttctagttccactaatatcagtagtgggccatcccccggtccaagccctggcactgggccaggcccggggcccggacctggaccaggaccgggccccggccctggcccaggccctgggcccggcccgggaccgggaccggggccaggtcccagaccgggtgtgcagtgcatcccccaaagagctgcgctcctgaagtctatgctaaatttcctcaagaaggcgatccaggacccagctttctctgacggaatccgccacgtaatggacggcagcctccccaccagcctaaaacacattatctctaatgctgaatattag

SEQ ID NO: 119636 - DNA, 687 bp, synthetic construct
  misc_feature 1..687: note = Description of Artificial Sequence: Synthetic coding sequence
  source 1..687: mol_type = other DNA
tgagtgagctgtggcatgatggaggccctgctgaaggtgatcaaattcctcggtgatgaacaggaccagattacattcgtgacgcgggccgttcgggtggttgacctgattaccaacctcgatatggccgcttttcagtctcattcagggttgtctatattcatctatagactcgagcatgaagtggacttatgtcggaaagaatgccccttcgtgattaaacccaagatccagagaccgaacacaacgcaggagggagaggagatggaaacagacatggatgttgcggacgtcgccatggagagtagtccagggtcttccatttccatggaacatagactggacgtggagctgagagcttctggatcctccagttcaacaaacattagttcaggtcccagcccaggcccatccccagggaccgggccaggcccaggccccggacctggcccgggccccgggcccgggcctggccccggccctggacccgggccgggtccaggcccaggaccgggcccccgacctggcgttcagtgcataccacaacgggctgcgctcttgaaaagcatgctcaacttcttgaagaaggctatccaagaccctgctttcagtgacggtatccgacacgtcatggacggctcccttccaaccagcctgaagcatattatctctaatgctgagtactag

SEQ ID NO: 119637 - DNA, 3594 bp, synthetic construct
  misc_feature 1..3594: note = Description of Artificial Sequence: Synthetic coding sequence
  source 1..3594: mol_type = other DNA
taaccatccgggagtaatgtggacactctgctacgcctgagaggtaggttgctactggaccacgaggccctctcatgtttgctggtattactatttgtggacgaaccaaagctgaacacgtcacggctccatagggtgcttcggaacctgtgttaccacgctcagacccggcactgggtgattcggtccctactgtcaattctgcagcgcagtagtgaatccgaactttgcattgaaacaccgaagctgaccacctctgaagaaaaggggaagaaaagcagcaagtcctgtggatcctccagtcacgaaaatagaccacttgacctgttacacaagatggagagcaaaagtagcaaccagctcagctggttatccgtatccatggatgctgcccttggatgccggactaacatctttcaaatacaacgctctgggggccgtaagcatacagagaaacacgcatcaggggggagcacagttcacatccacccgcaggctgctcccgtcgtttgccgccatgtcctggacaccctgattcagctggccaaggtctttccaagccacttcactcaacaacgcaccaaagaaactaactgcgaatccgaccgtgaacgagggaacaaagcttgctccccctgttcctctcagagctcctcttccggaatctgcactgacttctgggatctgctggtcaagcttgacaatatgaacgtcagtcgaaagggcaagaacagcgtgaaaagcgtccctgtgtctgcggggggggagggggagacgagcccatattctctcgaggcctctcccctgggccagttaatgaacatgctgtctcatcccgtcattcgtcggagttctcttctcactgagaagctgctccgactgttatctctgatctccattgccctgcctgaaaacaaagtctctgaagcgcaagctaatagcggctctggggcaagcagcacaacaacggcgacttccaccaccagcacaaccacaactaccgccgcttccacaacccccactccacctacagctccaacccccgtgacttccgctcctgcgctcgtcgcagctacggcaatctctacaattgtggtcgctgcttcaactacggtcaccacgccaacaaccgcaaccacaactgtgagcatcagcccaactactaagggctcgaagtctccggcaaaggtgtccgatggcgggtcctcctcaactgatttcaaaatggtgtcctcagggttgactgagaatcaacttcagctgtctgtcgaggtgcttaccagccacagctgctctgaagaagggctggaggacgccgccaacgtgctgttgcagctcagccgaggggactccgggactcgggatacggtgttgaagctgctcctgaacggagctagacacctgggctatactctctgcaagcagattggaaccctgctagccgaattgcgagaatataacctggaacagcagcggagggcacagtgtgagactctgagccctgatggcctgccagaggagcagcctcagactacaaagctgaaaggaaaaatgcagagcagatttgacatggctgagaatgtggtaattgttgcttcccaaaagcggcccctggggggcagagagctgcagctcccaagcatgtcaatgcttacgtctaagacatccactcagaagttcttcctgagggtactgcaggtgatcatccagctcagagatgacacaaggcgagccaacaaaaaggcaaagcaaacagggagactgggttcttctggcctgggttctgctagctcaattcaggcagctgtcaggcagctggaggccgaagcagatgccatcatacaaatgtccgagtcgagccaatccgaagctagtgtaaggcgcgaggagagccctatggatgtggaccaaccctcgccctccgcccaggacacgcagtccatagcaagtgacggaacacctcaaggcgagaaggaaaaagaggaaagaccacccgagctcccgctgctgtcagagcagctttctcttgatgagctgtgggatatgctgggagagtgcctgaaagaattggaggagtcccatgaccagcatgctgtcctcgtcctccagcctgccgttgaggcttttttcctcgtccacgctacagaacgcgagagcaagccgcctgtgcgagataccagggaatcacagctagcccatataaaagacgagccaccccccctgtctccagctcccctgacccctgctaccccgtccagtctggaccccttcttctcccgggagccgtcgagtatgcacatatctagctctctgcctcccgacacacagaagtttctacgatttgccgagactcacaggacagtgctgaaccagatcctgagacagtccactacacacctggccgacggacctttcgccgttctcgttgactatatccgcgttctggacttcgatgtgaagaggaagtattttcgccaagagctagagcggctggacgaagggctccgcaaagaggacatggccgtccatgtgcggcgtgaccacgtcttcgaggatagctaccgagagctccatagaaaatcacccgaggaaatgaagaatcggctctacatcgtgttcgaaggggaggaggggcaggatgccgggggccttttgcgagagtggtatatgataatatcacgagagatgtttaacccaatgtatgccttgttccggacatctccaggcgaccgcgtgacctacaccatcaacccgagttctcactgtaatccaaatcatctgtcttatttcaagtttgtagggaggatcgtggcaaaagctgtatacgataacaggctgctggaatgttactttacacggagtttttacaagcacatactgggcaaatccgtccggtatactgacatggagagcgaagattaccatttttaccaaggcctggtctatttgttggagaatgacgtctccacactcggctatgatttgacattcagtactgaggtgcaggagttcggcgtgtgtgaagtgagagatcttaaacctaatggcgcaaacatccttgtgaccgaagaaaataaaaaagagtatgtgcacctggtgtgccagatgcggatgaccggggcaatccggaagcaactggcggcatttctggaggggttctatgaaatcatcccaaagcgtctaataagtatctttacagaacaggaactagaactcctgatctccggtctgccaacgattgacatcgacgaccttaagtccaacacagagtaccacaagtatcagagtaactcaattcaaatccagtggttttggagggccctgaggagcttcgaccaggcagatcgggcaaagtttctccagtttgtgaccggcacttctaaggtcccactgcagggcttcgcagcattggagggcatgaacggaatccagaagtttcagatccatcgcgatgaccgctctacggacaggctgccaagtgcacacacctgcttcaatcagttggatctccctgcctatgagtcttttgaaaaattgcgacatatgctgcttctggcaattcaggagtgctccgagggcttcggtctggcctag

SEQ ID NO: 119638 - DNA, 10227 bp, synthetic construct
  misc_feature 1..10227: note = Description of Artificial Sequence: Synthetic coding sequence
  source 1..10227: mol_type = other DNA
tgaagcctcccaagcggctgtgagttcggacaggcagacatgcagaaactcgtaccaaaggatgaaaaagccgatggagagcaggacggtgccgccggcagtatggacgcttctacccagggactgcttgagggtataggcttagatggagacactctagcgccaatggaaactgatgaacccacagcctctgatagcaaggggaagtctaaaataactcccgctatggctgccaggattaagcagatcaaacctctgctgtctgcgtcctccaggctcgggagagcattggccgagctgttcgggctgctggtcaagctgtgtgtgggatcacccgtgcgccagcggaggtctcatcacgcggcaagtacaacaaccgctcctacccctgctgcccgctccaccgcaagtgcgctgaccaagctgcttaccaaaggattaagttggcagcctcctccgtatacacctactccccgcttccggctgacattttttatctgttcagtgggctttaccagccccatgttatttgacgagcgtaagtacccttaccatctcatgctgcaaaagtttctttgctctggtgggcataacgccctgtttgaaactttcaattgggccctgagtatggggggcaaagttccagtatccgagggcttagaacattcagaccttccggacggcactggcgagtttctcgacgcatggctgatgttagttgagaaaatggtgaacccaacgacggtgctcgagagccctcacagcctgcccgccaagctgccgggcggtgtgcagaatttcccccagttttcagctctccgattcttggtggtgactcagaaggcagcgtttacatgcataaaaaatctgtggaacagaaagccacttaaggtgtatggcggaagaatggccgagtcaatgctcgccatattatgtcacatcctcaggggggaaccggtgataagagaaagactatctaaggagaaggaaggatcgcgaggagaggaggacactggacaagaagaaggtggatcacgccgggagccgcaagtgaaccagcaacagctccaacagctcatggacatggggtttactcgagagcacgccatggaagctcttcttaacacctccaccatggagcaagccacagagtatctgctgacacatccaccacctatcatgggaggcgtcgtgagagatttgtctatgtctgaagaagaccagatgatgcgggcaatcgcaatgagcctcggtcaagatataccaatggatcagagggcagagtcccccgaagaagtcgcatgtagaaaggaagaagaagagcgtaaggccagggagaagcaggaggaggaagaagcgaagtgcctggagaaattccaagacgccgacccgctggagcaggacgaattgcatacctttacagatacgatgctgcctgggtgctttcatctgttagatgaattaccggataccgtgtatcgagtgtgtgatctcatcatgactgctattaagcggaatggggcagattatcgagatatgattcttaaacaggtggtgaaccaggtgtgggaagctgccgatgtcctcattaaggctgctctccccttgaccacttcagacaccaaaacagtttctgaatggatctctcagatggcaaccctgccccaggcctctaatttagcaacccgaattcttctgctgaccctgttgttcgaagaactcaaacttccctgcgcttgggtggtcgaatcttctggcattctgaacgtactaatcaaactgctcgaggtagtgcagccatgtctccaagctgccaaggagcagaaggaggtgcaaactcctaaatggattactccagtgttactgctgatcgatttttacgaaaagaccgctatcagctccaaacgacgagcccagatgactaagtacctgcagtctaattcaaataactggaggtggttcgatgacagatctggacgctggtgcagctattctgcatctaataactcaacaattgattctgcctggaagtccggagagacctccgtgcgtttcacagccggccgtcgccgctacactgttcagtttacaacaatggtccaggtcaacgaagaaactggaaaccggcgaccagtgatgctgactttgctgcgtgtccctcgcctgaataagaattcaaaaaacagtaatgggcaggagctggagaaaaccctagaggagtcaaaagagatggatattaagagaaaagagaataaagggaacgatactccccttgcgctggaatcaacaaatactgagaaggagacttccctcgaggagaccaaaatcggggagatactgattcagggacttacagaggacatggtgactgtgctcatccgcgcatgcgtttccatgctaggggtcccggttgatcctgacacactccacgctactctgcgcctgtgtctccgactgactcgtgaccacaagtacgccatgatgtttgctgagctgaaaagtacacgcatgattctgaatttaacccagagcagcggctttaatggctttacacccttggtgacattactcttaagacacatcatcgaggatccatgcactctgcgccacacaatggagaaagtggtgcgatccgcggcgacatcgggggcgggaagtacaacttcgggcgtggtttccggaagcctcggcagtagagaaataaattatatcttgagggtgctgggacctgctgcttgtcggaaccccgacatattcactgaggtggcaaattgctgtattcggattgccctgcccgctccaagaggcagcggtacagcctctgatgacgagttcgagaatttaagaattaagggtcccaacgctgtgcagctagttaaaacaacacctctgaagccatcaccgttgcccgtcatcccagacaccatcaaagaggtcatatacgacatgcttaatgcattggcagcctaccacgcccctgaagaggctgataagtctgatcccaaacccggggtgatgacccaagaggtgggccagctcctgcaggatatgggcgatgacgtttatcagcagtaccgaagcctgacacgacagtcgtctgatttcgatacacaaagtggttttagcattaattcccaggtgtttgctgccgatggagcatctacagagacaagtgcttctggtacatcacaaggagaagctagcaccccagaggaaagccgagatgggaaaaaagacaaagaaggggacagggcttccgaggagggcaagcaaaaaggcaagggaagcaagcctctgatgccaacctccactattctgcggttactggcagaactggtgagatcttacgtcgggattgctactttgattgccaactacagttacacagtgggtcaaagcgagctgatcaaggaggactgttccgtgctagcgttcgtccttgaccatctgcttccacatacacagaacgccgaggataaggatactccagcccttgccaggctcttccttgcatctttagccgcagcaggatctggaacagacgcacaggtagccctggtgaacgaggtgaaggccgctctgggcagagcactggccatggctgaaagcactgagaaacatgcaaggttgcaagccgtgatgtgtataatcagcactataatggaaagttgcccctctaccagcagtttttacagcagcgctaccgccaagacacaacacaacgggatgaacaacatcatcagactgtttctgaagaaaggcctagtaaacgatctggctcgagtcccccattcccttgacctctcctctcccaatatggccaatactgttaacgccgccctcaagcctctggaaactctgtcccgcattgtcaatcaacctagcagtcttttcgggagtaaaagcgcctctagcaaaaacaagtccgagcaggacgctcagggagcaagccaggacagctccagcaaccagcaggacccgggtgagccgggcgaggccgaggtgcaggaggaggaccatgacgtgacccagacagaggtggcagacggcgacattatggacggggaagccgaaacagattcagtcgtcattgctggccagcccgaagtgctgagcagccaggagatgcaagttgagaatgagctggaggatttgatcgacgagctgttggaaagagatggtgggagcgggaatagtacaatcattgtttcccggagcggggaggacgaatcacaggaggatgtgctgatggatgaagctccttccaacctttcccaggcatccactctgcaggcaaatcgcgaagacagtatgaatatcttagaccctgaagacgaagaagagcacactcaggaagaggactcctctggaagcaacgaggatgaggatgacagccaggacgaagaagaggaagaggaggaagacgaagaggatgatcaggaagacgacgaaggcgaggagggcgacgaagatgacgacgatgacggatccgagatggagctggatgaagattatcccgacatgaacgcctctccgctcgttagattcgaacgatttgatcgggaggacgacttaattattgaatttgacaacatgttctcctccgccaccgacatcccaccctcccccggcaacatcccaacaactcatcctctcatggtgcggcatgctgaccattcttcgttgaccttgggaagcggcagctccaccaccaggctgactcagggaattggccgaagccagcgaacactgcggcagctgacggctaacactggacatacaattcatgtccattatcctggtaaccgccaaccaaacccccctctgattctgcaacgactcctcgggccgagtgctgctgcagacatcctccaactgtccagtagtctgcccttgcagtccaggggccgggctcggctgctcgttggcaacgatgatgttcacattattgcaagatccgatgacgagctcttggatgacttttttcatgaccaatcgacggcaacatcgcaggcgggaaccctgagtagtatacccaccgcattgacaagatggacagaggagtgcaaggtcctcgacgcggagagtatgcatgattgcgtttctgtggtcaaagtcagtattgtcaaccacctcgaattcctgagggatgaggagctcgaagagcgtagggagaaacgccgtaaacagttggccgaggaggaaacaaaaatcactgataaaggcaaggaggacaaagaaaacagagaccagagcgctcaatgcaccgcgtcgaaatctaacgactctaccgagcagaatctatcagatggaacacccatgcctgacagctaccccactaccccttcatctacagatgccgccacttcagagtcgaaagagacccttggaacactgcagtctagccagcaacagcctaccctccctacaccccccgctcttggtgaagttccacaagaacttcagagccctgcaggcgaaggcggtagcagcacccagctcctgatgccagttgaacctgaagaactggggccaacacggccaagtggtgaggcggaaacaacccagatggaactctcacctgctcctaccattaccagtctcagccccgagcgagcagaagattccgatgcattaactgccgtctcttctcagcttgagggctcccccatggatacatcatctctcgcttcctgtacactggaagaagccgttggtgacacgagcgccgccggatcgagcgaacagcccagggcaggatcttcaacccccggtgatgcgccccctgctgtcgcagaagtccagggtaggagtgacggttccggggagtcagcccagccacccgaagatagcagcccgccagcctcctccgagtcatccagcacacgcgattctgccgttgccatttcaggggcagatagcagaggcatactcgaggaaccactgccctcaacatcttcggaggaagaggatcctttggctggtatttcccttcctgaaggagtggatcccagttttctcgcagctttgcccgacgatattcgccgtgaggtgctccagaaccagctagggattcgaccacctaccaggactgcaccatctacaaatagctctgcccctgctgtcgtggggaatccaggagtgactgaggtcagccccgagttcttggcagcactgccccccgctatccaggaggaggtattggcccagcaacgggccgagcaacagaggagggagctcgctcagaacgcaagcagcgatacgccaatggatcccgtaacttttatccagactctgcccagtgacctgaggagatctgtcctggaggacatggaggatagcgtccttgccgtgatgccgccagatatcgctgctgaggcacaagccctacgaagagagcaggaagcacgccagcgacagctgatgcacgagcggttatttgggcactcatccacaagtgcactgtccgcaatattgcgttcacctgccttcacgagcaggctgtccgggaatcgcggcgtccagtacactcggctcgcagtgcagaggggaggtacctttcaaatgggcgggtcttcatctcacaatcgcccgagtggatcaaatgttgatactcttttacggctgagaggacggctgctcctcgaccatgaggccctgagttgccttctggtcctgctgttcgttgacgagcctaagctgaatacaagtaggcttcatagagttttgaggaacttgtgttatcacgcccagacaagacattgggtgatacgatcacttctgagtattctgcagcgcagttccgagtccgagctttgtattgaaacccccaagctgacaacttcagaagagaagggcaagaagtccagcaagagctgtggatccagctctcacgagaatagaccccttgacctgttgcataaaatggagagtaagtctagtaaccagctgtcgtggttatctgtgagtatggacgctgccctcggctgtaggaccaacatctttcagatacagcgctccggaggtagaaagcatacagagaagcatgcatcaggcggttccacggtgcacattcaccctcaggcagcgcccgtggtgtgccggcatgtgctcgatacgttaatacagctggctaaggtgttcccctctcacttcactcagcagagaactaaggaaacgaattgcgagagcgacagagagagaggcaacaaagcctgctcgccttgcagcagtcagtctagttcaagcgggatttgtactgacttttgggatctattggtgaagctggataatatgaatgttagtcggaaggggaagaacagcgttaaaagtgtcccggtgagtgctggtggcgaaggcgaaacttctccatacagccttgaagcctccccgttaggacagttaatgaacatgctgtctcatccggtcatcagacggtcctctcttttgaccgagaaactcctgcggctgctgtcactgatcagcattgcccttcctgaaaataaggtatctgaggctcaggccaattctggcagcggcgcctccagtaccactactgccacctctacaacaagcactacgacaacaacagcagccagcacgacccctaccccccctacggccccaaccccagtaactagcgccccagcactggtcgcagcgacagctatatctaccattgtggtggcagcttctacaaccgtcacaacaccaacgactgctactacaactgtgagcatttccccaaccaccaagggcagcaaatccccggccaaggtctctgacggcggctcctcatccactgatttcaagatggtgagcagtggtctcaccgagaatcagttgcagctgtcggttgaagtattgacgagccacagttgtagcgaggaaggcctggaggacgccgcaaacgtcctcctccagctgagccgcggggatagtgggacccgggatacagtgctgaaactcctgttaaacggagcccgccacctgggctacacactctgcaaacaaatcggtacgctgctagccgagctgcgcgagtacaatctcgagcagcagcgaagagctcagtgcgaaactctcagcccggacggcttacctgaggaacagccccaaaccacaaagctgaagggaaagatgcagtcccgtttcgacatggcagagaacgtggtaatcgtggcctcccaaaaacgccctctgggtggccgggagctccagttgccatccatgagcatgctgacatcaaagacctctacacagaagttttttttgcgggtgttacaggtaattatccagctacgcgacgacactagaagagccaataaaaaggctaagcagactggacggctaggcagttctggacttggcagcgcctcaagtatccaggccgctgtgagacagttagaggctgaggcagatgcaattattcaaatggtgagggagggacagagagcgcgacgacagcagcaggccgcaacttctgagagttctcagagcgaagccagtgtgcgccgggaagaatccccgatggacgtcgaccaaccatccccatcagctcaggatacgcaaagcatcgcgtcagatggaacaccccagggagaaaaagagaaagaagagagaccgcctgagctgcccttgctcagtgagcagctttcgcttgacgaactttgggacatgctcggtgaatgtttgaaggagctggaagagagccacgaccagcatgctgttctcgtcttacagcccgctgtggaggcatttttcctggttcatgcaacagagagagaaagcaaaccacctgtgcgcgataccagagagtcacagctcgcccacattaaagatgaaccaccgcctctgtcccccgccccactgacacccgccaccccctccagtcttgatccttttttctcacgagagcccagttccatgcacataagtagcagtctgcctcctgatactcagaagttcctgcgcttcgccgaaacccacagaactgtattaaaccagatcttgaggcagagcactacacacttggctgacggcccatttgccgtcttggtggactacataagggttttggacttcgacgttaagaggaagtactttaggcaggagctcgagcggttagatgaagggttacgcaaagaagatatggctgtgcacgttagacgggatcatgtctttgaagactcctaccgggaactgcataggaagtctccagaagaaatgaagaacagactgtacatagtgttcgaaggcgaggagggccaggatgccggcgggttgttgagggaatggtatatgattatttctcgcgagatgttcaaccccatgtatgcactttttcgcacaagtccaggcgatagagtcacttacaccattaacccctccagccattgtaatccaaaccacctatcttattttaagttcgtgggaagaatcgtggccaaagcagtgtacgacaaccgccttctagagtgctatttcaccaggtcattctacaagcatatcctcggtaaatccgtacgttacaccgacatggagagtgaagattaccacttctaccaggggcttgtttatctactggagaacgatgtatccaccctggggtatgatctaaccttctccactgaagtccaggagttcggcgtgtgcgaggtcagggatctcaaaccaaatggcgccaacatcctagtgactgaggaaaataagaaggagtatgttcacctggtgtgtcagatgaggatgactggcgccatccgcaagcaattggccgctttcttggaaggcttctacgaaatcataccaaagaggctcatatctatcttcactgagcaggagttagaactgctgatctccggcctgcctacaatagacatcgacgacctcaagtctaatactgagtaccacaagtatcagagcaacagcatccaaatacagtggttctggagagcgttgcggtctttcgaccaggccgatcgcgcaaagtttttgcagttcgtgaccgggacctccaaagtgcccctccagggctttgccgcccttgagggaatgaatggcatccaaaaattccagattcatcgggacgataggtccacagaccgactgccgagcgcccatacatgcttcaatcagctggatctaccagcttatgagtctttcgaaaaacttcggcacatgctcctattggccattcaggagtgttccgaggggttcggcctggcttag

SEQ ID NO: 119639 - DNA, 651 bp, synthetic construct
  misc_feature 1..651: note = Description of Artificial Sequence: Synthetic coding sequence
  source 1..651: mol_type = other DNA
atgaaggtggacagaacaaaactgaagaagacgcccaccgaggctccggctgactgccgtgccctgattgacaagctgaaagtctgcaacgacgagcagctgctcttggaactgcagcaaatcaagacgtggaatattggcaaatgtgagctatatcattgggtggatctgctggataggtttgatgggatcttggcggatgccggccaaaccgtggagaacatgagctggatgctggtttgcgaccgtcccgaaagagagcagttgaagatgctgctgcttgccgtgttgaatttcactgcactcttgatcgagtactctttttctcgccacctgtattcatccatcgagcacctcaccacattactggcctcaagtgacatgcaggtcgtcctggctgtgttgaatttgttgtatgtttttagcaaaaggagtaactatatcacacgccttggctccgacaagagaacaccacttctgacccggctacaacatttggcggagagctggggcggaaaggagaacggctttggcctcgcagagtgttgccgcgacctgcacatgatgaaatatcctccatcagccactactctgcacttcgaattttacgcggacccaggtgctgaagtgaaaattgaaaaacggaaatag

SEQ ID NO: 119640 - DNA, 282 bp, synthetic construct
  misc_feature 1..282: note = Description of Artificial Sequence: Synthetic coding sequence
  source 1..282: mol_type = other DNA
atgaaggtggaccgtaccaaactgaaaaaaactcctaccgaggctcccgcggactgcagagctctgatagacaagctcaaggtgtgcaatgacgaacagctccttcttgaattacagcagattaagacttggaacatagggaaatgtgaactgtaccattgggtggatctcctggaccgattcgatgggatactggccgatgctggccagaccgtggagaatatgtcgtggatgctggtctgcgatagacccgaacgcgaacagctgaaaatgctgctgtag

SEQ ID NO: 119641 - DNA, 1482 bp, synthetic construct
  misc_feature 1..1482: note = Description of Artificial Sequence: Synthetic coding sequence
  source 1..1482: mol_type = other DNA
atgttgccaagatgggagcttgccctctatctgctcgcctctctgggattccacttctactctttctatgaggtctacaaggtcagcagagaacacgaagaggagttagaccaggagttcgagctggaaacagataccctgtttgggggactgaaaaaagacgctactgacttcgaatggtccttttggatggagtggggcaagcagtggctggtttggctgcttctcggccacatggtggttagtcagatggccaccctactggcaagaaagcatagaccttggatcctgatgctctacgggatgtgggcctgctggtgtgtgctgggcactcccggagtcgccatggtcctgctgcacacaaccattagtttttgtgttgcgcagttccgaagccagctcctgacctggttgtgtagcctcttattactgagcacgttgcgcctgcagggggtggaggaagtgaaacggaggtggtacaaaaccgaaaacgaatattatctgcttcagtttactctaactgttaggtgcttgtactataccagcttttccctggagctgtgctggcagcagctgcctgctgcctctaccagctacagcttcccgtggatgttggcctacgtattttactatcccgtgttgcataatggacctattttgtctttttccgagtttatcaaacagatgcagcaacaggagcacgactccctgaaggcctcactgtgtgtgctcgcactcggattgggccgccttttgtgctggtggtggctggcagagttaatggcacacctaatgtacatgcatgccatatactccagcatcccgctcttggaaactgtgtcctgttggactctaggaggccttgcccttgctcaggttctctttttctacgtgaagtacctcgtattattcggggtgcctgccctcctcatgaggctcgatggcctaaccccaccagcattgccaagatgtgtatctacaatgttctcgttcactggaatgtggcgttatttcgatgtggggctccacaatttcctgatcaggtacgtgtatattcccgttggcgggtcccagcacggactcctggggaccctgttttctacggccatgacctttgcttttgttagctattggcacggtgggtacgactacctttggtgctgggctgccctgaattggctgggtgtgactgtggagaatggagttcgccggctggtcgagaccccttgtattcaggatagtctcgcacggtacttcagcccgcaggcgcgaagacggttccacgctgcgctggctagctgctctacctccatgctgattttgagtaacctggtattcttggggggaaacgaggttggcaagacttactggaatcgcatatttatccaaggatggccctgggtgaccctgagcgtgcttggtttcctttattgttacagtcatgtcggcattgcctgggcccagacctatgcaaccgattag

SEQ ID NO: 119642 - DNA, 1347 bp, synthetic construct
  misc_feature 1..1347: note = Description of Artificial Sequence: Synthetic coding sequence
  source 1..1347: mol_type = other DNA
atgaagttcacaaagagccctgaggatgcaactgattttgaatggtctttttggatggaatggggcaaacagtggttggtttggttgctgttgggccacatggtcgtgtctcagatggccacacttcttgcccggaagcacagaccatggatcttgatgctgtacggaatgtgggcctgctggtgtgtgctgggaacacctggtgtggccatggtgctcctgcacacgactattagcttttgcgtggcccagttccgtagtcagctgctgacatggctctgtagcttattactgctgtccacccttcggttgcagggagtggaggaggtaaaacgtcgctggtacaaaacggagaatgagtattacctcctccagtttacattaactgtgcgatgtctctactataccagcttctcccttgagctgtgttggcagcaactccccgccgcatccacctcgtatagctttccttggatgctcgcatatgtgttttattatccggttctgcataacgggccaattctctccttctctgaattcatcaaacagatgcagcagcaggaacatgactcactgaaagcatccctatgtgtgctagccctgggcctggggcggcttctgtgctggtggtggctggccgagctcatggcccacttgatgtacatgcacgctatatactcatctattcccctgctggaaaccgtctcatgttggaccctcggtggactcgcactagctcaagtcctgttcttttacgtcaaatatcttgtgctgttcggggttcctgcgcttttaatgcggctcgacggcctgacccctcctgccctgcctcggtgcgtgtcgaccatgttcagtttcactgggatgtggcgatacttcgacgtgggtctgcataatttcttgatcaggtacgtttacatcccagtaggagggtcacaacacggcctgttgggaactctgttcagtactgccatgacattcgctttcgtaagctactggcacggaggctacgattacctctggtgttgggccgctctgaattggctgggtgtaaccgtggaaaatggggttaggagattggtcgagactccttgcattcaggactctctagcacggtatttcagcccacaagcacggcggcgttttcatgcggcacttgcatcatgctcgaccagtatgctgattctcagtaatctggtctttctgggcggcaacgaggtcggaaaaacatactggaacagaatattcattcaagggtggccatgggttaccctgtcagtcttgggcttcctgtattgctactcccacgttggcattgcctgggcccagacctatgctaccgattag

SEQ ID NO: 119643 - DNA, 552 bp, synthetic construct
  misc_feature 1..552: note = Description of Artificial Sequence: Synthetic coding sequence
  source 1..552: mol_type = other DNA
atgcgactggacggactgacaccaccggctctacctcgctgcgtgtcaactatgttttcatttacgggaatgtggcgttacttcgatgtcggcctgcataattttttaatccgctacgtctatatccctgtcggaggatctcagcacggccttttggggactctgtttagcaccgctatgacattcgcttttgtgtcatactggcatggcgggtacgattatctttggtgctgggcggccctgaactggttaggggttacagtggagaacggagtcagaaggctagtcgaaactccctgcatccaggatagcctggcccgttacttcagtcctcaagccagaagacggttccacgctgctctcgcctcctgttctaccagtatgctcattttatccaacctggtcttcttgggaggaaatgaggtggggaaaacatactggaacagaatctttatccagggctggccctgggtgactttgtccgtcctgggtttcctttattgctatagtcacgtcggtatcgcctgggctcagacatatgcaacggactag

SEQ ID NO: 119644 - DNA, 1482 bp, synthetic construct
  misc_feature 1..1482: note = Description of Artificial Sequence: Synthetic coding sequence
  source 1..1482: mol_type = other DNA
atgctgcctcggtgggagttagccctctacctcctagcatccctgggttttcacttttattccttctatgaggtgtacaaggtgtctcgggaacacgaggaggaactggatcaggagtttgaactggagacagatactctgttcggcgggttgaagaaggatgctacagacttcgagtggagcttctggatggagtggggtaaacagtggctggtgtggcttcttttggggcacatggtggttagccagatggctacacttctggcaagaaagcacaggccatggatcctgatgctgtatggcatgtgggcatgctggtgcgtcttagggacgcctggggtcgcaatggtattactgcacacaaccatctcattctgcgtggcgcagttcaggtcacaattgctgacttggctctgttctctgctgttgttatcaacgctacggctccagggcgtcgaagaagtgaagaggcgctggtacaagacagaaaacgagtattatttgttacaattcaccctcacggtgcgctgcctgtactacacaagtttctctctggagttgtgctggcagcagcttcccgcggcctcaacttcctactccttcccgtggatgttggcgtatgtgttctattatccagtcctgcacaacggacccatattgtctttttcagagttcattaagcaaatgcagcagcaggagcacgattctctgaaagccagcctctgtgttcttgccctgggcctggggaggctgctgtgttggtggtggcttgccgagcttatggctcacttgatgtatatgcacgcgatatactcctccatcccactgctagaaactgtgtcctgttggacactgggtggccttgcgttggcacaggtactgtttttctatgtcaagtatttggtgctgtttggtgttcctgccctgctcatgcgactggacgggctgacacccccagccttaccccgttgcgtatctaccatgttcagtttcacaggcatgtggcgatacttcgacgtgggtctccacaacttcctgatccgatacgtatacatcccagttgggggaagtcagcacgggctgctgggtaccctgtttagcactgcaatgacatttgcgtttgtgagctactggcacggaggctacgattacttgtggtgctgggccgcacttaactggctgggagttaccgtggaaaacggagttcgtcggctggtggaaacaccctgtattcaggacagtctagcccgatacttcagtccacaggcgcggcgaagatttcacgctgccttagcctcctgcagcacctctatgctgatcctttcgaatttggtatttctcggtgggaatgaggttggcaaaacttattggaaccgcatttttatccagggatggccttgggtcaccttgtccgtgcttggatttctctactgttattctcacgtgggcatagcatgggcccagacctatgccaccgattag

SEQ ID NO: 119645 - DNA, 1557 bp, synthetic construct
  misc_feature 1..1557: note = Description of Artificial Sequence: Synthetic coding sequence
  source 1..1557: mol_type = other DNA
atgttgccaagatgggagctggctctgtacctcctggcatccctcgggttccatttttactctttttacgaggtctacaaggtgtcccgtgagcacgaagaggagctggatcaggaattcgagctggagaccgatacactctttggagggctcaaaaaggacgcaacagacttcgagtggtctttctggatggaatggggcaagcagtggctggtatggctgctcttgggtcacatggtagtgtcacagatggccactctcctggcccgaaaacatcgcccctggattctgatgctgtacggcatgtgggcgtgttggtgtgttttgggaactcctggggtggcaatggtcctcctccataccactatcagcttttgcgtggcacagttcagaagccagctgcttacctggctatgtagcttgctgcttctatcaacgctgagactgcagggagttgaagaggttaagagacggtggtacaaaaccgagaacgagtattaccttttacagttcacactgactgtaagatgcttatactatacctcattttctctagaactgtgttggcaacagctgcccgccgccagcactagctacagctttccctggatgctggcatatgtgttttactaccccgtcctgcataatggtcccattctatccttcagtgaatttatcaagcagatgcaacagcaggaacacgacagcctgaaagctagcctatgcgtgctcgctctggggctaggccgccttctgtgctggtggtggttagcagagttgatggcccacctcatgtacatgcacgccatctattcctcaatccctctgctggagacagtcagctgctggaccctgggcggcctggctctcgctcaggtcctcttcttttatgttaaatacctcgtacttttcggcgtgccagccctcctaatgcgtctggacggtctgacaccccctgctttgcctcggtgtgtgagtacaatgttttcgttcactggcatgtggagatatttcgatgtggggctccacaatttcctcatcagatacgtttacatccccgtgggcggttcacagcacggtctcctcggcaccctgtttagtactgccatgacattcgccttcgttagttactggcacgggggctacgactacctttggtgttgggccgcgctgaattggctcggggtcacggtagagaatggagtgcgccgattggtagagactccctgtatacaagactccctcgccaggtatttcagccctcaggctaggcggcggtttcatgccgccttggccagttgctccacatcgatgctgatcctgtccaatctggtattcctcggtggaaacgaggtgggtaagacttactggaaccgaatcttcattcaaggaggcctgttcctattttttttgctaaatccatgctgggaaactgctttccagggattcccggtctttctgcacttccttcaaacagaagtcctcgcaaccttcgtgcccaattacttctcttggaatatctgcattgaaaacaccagcgagctcagcagctactag

SEQ ID NO: 119646 - DNA, 1482 bp, synthetic construct
  misc_feature 1..1482: note = Description of Artificial Sequence: Synthetic coding sequence
  source 1..1482: mol_type = other DNA
atgctacccaggtgggagctggccctgtacctgctcgccagcctaggatttcatttctactccttctatgaggtctacaaggtctcccgtgagcatgaggaggagctcgaccaggagtttgagcttgagactgacacgttattcggtggcctcaagaaggacgcaaccgattttgaatggagtttttggatggagtgggggaagcagtggctggtgtggttactgcttggacatatggtcgtctcccagatggccactctgctcgcgaggaaacaccgcccttggatacttatgctctacgggatgtgggcatgttggtgcgtcctgggtacacccggcgttgccatggtgctcttgcataccacgatatcattttgtgtggcccagtttcgatctcaactcctcacttggctctgtagcctactcttattatctacgctgcggctccaaggcgttgaggaggtgaagaggcgatggtacaaaacagagaacgaatattatttgctccaattcacattgactgtgaggtgtctttactacacatctttctcgctggagctctgctggcagcagcttcccgcagccagtacttcttactcattcccttggatgcttgcctacgttttttactatcctgtcctgcataatggccccatcttaagcttctccgagtttattaaacagatgcaacagcaggaacacgatagcctcaaggcgtcgctgtgtgtcctggctcttggacttggcaggcttttatgctggtggtggttggctgagctcatggcacacctgatgtacatgcatgctatctacagcagcatccctctgctggagaccgtgagttgttggaccctcgggggcctcgctctggcacaggtactgtttttttatgtgaagtatctcgtgctgtttggcgttccagcactactgatgaggctggacggtctgactccccccgccctccccagatgtgtgtcaacaatgttttcttttactggaatgtggagatatttcgacgttgggctccacaactttctgatccgttatgtgtacatccctgtgggtggctcacagcacggccttttgggcactctgttttcaactgccatgacatttgcattcgtgtcctactggcacggaggatatgactatctctggtgctgggcagccctcaattggctcggtgtgacagtggagaatggggtgcggaggcttgttgagacaccctgtatacaggactctttagcgcggtacttctctcctcaggcccgaaggcggttccatgcggcactggccagctgctccacctcgatgctcattctcagtaaccttgtctttctcggagggaatgaggtcggcaagacatactggaaccgcatctttattcaaggctggccttgggtgacactctccgtgcttggctttctgtattgctactctcatgtaggaatcgcatgggcacaaacatacgcgactgactag

SEQ ID NO: 119647 - DNA, 624 bp, synthetic construct
  misc_feature 1..624: note = Description of Artificial Sequence: Synthetic coding sequence
  source 1..624: mol_type = other DNA
atggagtggggcaaacaatggttggtgtggctgttgctaggtcacatggtggtcagtcagatggccaccctgttggcaaggaaacggcgttggtataaaaccgagaatgaatactaccttctgcagtttacccttaccgttagatgtctatactacacttcttttagccttgagctctgctggcagcagctgcctgccgcatctactagttatagcttcccatggatgcttgcatatgtgttctattaccccgtgctccacaacggccctattctcagtttcagcgagttcattaagcagatgcagcaacaggagcacgatagcctgaaagcctccttatgtgtgcttgcgctaggcctcggaaggctgttatgctggtggtggctggcagagctgatggcccatctaatgtacatgcatgccatctattcatcgatccctctgttggaaacggtttcatgctggacgctcggggggctcgcactggctcaggtgctcttcttttacgtgaaatacctggtgctgtttggagtcccagctctcctgatgaggctggacgggttgactccacccgccctgccgagatgcgtctctaccatgttttccttcaccggaatgtggtag

SEQ ID NO: 119648 - DNA, 1287 bp, synthetic construct
  misc_feature 1..1287: note = Description of Artificial Sequence: Synthetic coding sequence
  source 1..1287: mol_type = other DNA
atgctgcctcgctgggagctggccctgtatcttctcgcctctctggggttccatttttacagcttctatgaggtgtacaaagtttcccgcgagcatgaggaagaattagatcaggagttcgaattggagacagacacactctttggcggactgaaaaaagatgccacagacttcgagtggagcttttggatggagtggggtaaacagtggcttgtgtggcttctcctcggccacatggtcgtgagccaaatggctacactgctggcgcgaaagaggcgatggtacaaaaccgaaaacgaatactacctgttgcagttcactctgaccgtgcgctgcctctactacaccagcttcagtctggagctctgttggcagcagctgcctgcagccagcactagttatagttttccgtggatgcttgcttatgtgttctactacccagtgctgcataatggccccatcttgagcttctcagaatttataaaacagatgcagcagcaagagcacgatagcctgaaggcctccctctgcgtactggccttgggcctaggcagattgctgtgttggtggtggttagccgagctgatggcccatcttatgtacatgcacgctatctactcttccatccctcttctcgagactgtgtcttgttggactctaggtggcctggcgctcgcacaggtgctgttcttttatgttaaatatctcgtgctctttggcgtccccgccctgctgatgaggctcgatgggcttaccccaccagcacttcctcgatgcgtctcaaccatgttctcattcacagggatgtggagatattttgacgtggggctgcacaatttcctgattagatacgtgtacatccctgtaggagggtcgcagcatggcctcctcggaacgcttttctccaccgcaatgacatttgccttcgtaagttattggcacgggggctacgactatctctggtgttgggcagccctgaattggttgggggtcactgtggagaacggtgtacgccggcttgtggaaaccccgtgtatccaggactccctggccagatacttttctccccaagcccggcgccgtttccatgccgctttagcttcatgttcaacttcaatgttgatcttatcaaatctggtgttcttaggaggcaatgaggtcggcaagacgtattggaaccgaattttcatccaaggatggccctgggtgactctctctgttctaggatttttgtactgttattcccatgtgggcattgcttgggctcaaacatatgcgaccgactag

SEQ ID NO: 119649 - DNA, 1071 bp, synthetic construct
  misc_feature 1..1071: note = Description of Artificial Sequence: Synthetic coding sequence
  source 1..1071: mol_type = other DNA
atgttgccaaggtgggaactcgctctctatctactggcttcactcggcttccatttctactctttctacgaggtgtataaagtttcaagggagcacgaagaagaactggatcaggagtttgagcttgagactgacacactcttcgggggcctcaaaaaagacgccacagacttcgaatggtctttttggatggaatggggaaagcaatggctcgtatggttgttactgggccatatggttgtttcccaaatggcgactctgttggccaggaagatgcagcagcaggagcacgacagcttaaaggcctctctgtgtgtcctggcactggggctgggcaggttactgtgctggtggtggctcgcagaactgatggcccatctcatgtatatgcacgcaatttactccagcatccccctcttggagactgtgagttgctggacactcggcggcttggctctggctcaggttctcttcttctacgtcaagtaccttgttctcttcggcgtccccgcgctgttgatgaggctggatggtctgacgccacccgctctcccccggtgtgtgtcaacgatgttcagtttcaccgggatgtggaggtactttgatgtcggattgcataatttcctgatccggtacgtatacatcccggtcggtggctctcagcatggcctcctgggaactctgttttccacggcgatgactttcgcattcgtaagttactggcacggtggatatgattacctgtggtgctgggcagccctgaattggctgggtgttaccgtggagaacggcgtgaggcgcttggtggaaacgccgtgtatacaggattccttggcccgctattttagcccacaggcccggaggagattccacgcagccctcgcctcttgctctacatctatgctgatcctcagtaacctggtgtttctcggaggcaacgaagttggtaagacttactggaaccggatcttcatccaaggttggccctgggtgaccctctccgtcttaggatttctctactgctatagccacgtggggatcgcctgggcccaaacctacgctacggattag

SEQ ID NO: 119650 - DNA, 1485 bp, synthetic construct
  misc_feature 1..1485: note = Description of Artificial Sequence: Synthetic coding sequence
  source 1..1485: mol_type = other DNA
atgagcctcgggctgggctcggcagagcgcggagtactgggaacaaggggggctcgggaacgttgcaggcgtagaaggccaggacagcccggagaacacgaggaggagctggatcaagaattcgaactcgaaaccgacaccttgtttggcggcctgaagaaggacgctacagattttgaatggtcgttttggatggagtggggaaagcagtggcttgtttggctgctcttaggacacatggtggtgtcccagatggccaccttactcgccagaaaacacaggccttggatcttgatgctttatggaatgtgggcctgctggtgcgttctgggcactcctggcgtagccatggttctgctacacacgacaatcagcttctgcgttgcccagtttcggagccagctgttgacatggctatgcagcctgcttttactcagtacactgagactgcaaggcgtagaagaggttaagagacgctggtataaaacagagaacgaatactacctgctgcagtttacactgacagtgcggtgcctgtactataccagcttctccctcgagctgtgctggcagcagctgcctgctgcaagcacttcttatagttttccatggatgctcgcctatgtattttactaccccgtgcttcataacggtcctatcttatcttttagcgaatttatcaagcagatgcaacagcaggaacacgactccctaaaggcatctctctgcgtcctggcgcttggcctaggaagactgctatgctggtggtggctggccgagttgatggcccacctcatgtatatgcacgccatatattcctccatccctctcctcgagacggtgagctgctggaccctggggggcttggctctggcccaggtgctctttttctacgtgaagtacctggtgctcttcggagtgcctgccctgctaatgaggctcgatggtctgacgcctcctgcgcttcccagatgcgtgtccactatgttctcctttactgggatgtggcggtattttgatgttggcttgcacaactttctgattcgctatgtgtacatcccagtgggcggttcccagcacggtctgttaggaactctctttagcactgctatgacctttgcgtttgtttcctattggcacgggggatatgactatctgtggtgttgggctgcactgaattggttgggggtcacagtggagaacggcgttcggagactggtggaaaccccatgtatccaggattctctggctcgctatttcagtccgcaggctcgaaggcggttccatgcggctcttgcctcatgttccacaagcatgcttatactttctaacctggtcttcctaggcgggaatgaagtgggtaagacctactggaatcgaatcttcattcagggttggccttgggtgactctttcagtcctgggcttcctctactgttactcacatgtgggcattgcctgggcacagacatatgctacagattag

SEQ ID NO: 119651 - DNA, 1293 bp, synthetic construct
  misc_feature 1..1293: note = Description of Artificial Sequence: Synthetic coding sequence
  source 1..1293: mol_type = other DNA
atggagtggggtaaacagtggctagtatggttgctcctgggccatatggttgtatcacagatggccactttactggcccgcaaacataggccctggatcctcatgctatacggcatgtgggcctgttggtgcgtgctgggcacccccggagttgcaatggtgctactccacactactattagcttttgtgtagcccagttccgcagccagctgctgacctggctatgtagcctgttgctgctgtctacgctgcggttacagggagtcgaagaggtcaaacggaggtggtataagacggaaaatgaatactatctacttcagtttacactcacggtaaggtgtctctattacacaagtttcagtttggaactctgttggcagcaactccctgcagcgtccaccagctattctttcccatggatgttagcgtacgttttctactatcctgtccttcacaacggacccattctctcttttagcgaatttataaagcaaatgcagcagcaagagcacgattcgctgaaagcatcactctgcgtgctggcacttggactgggccggctgttgtgttggtggtggcttgccgagctgatggctcacctgatgtacatgcacgccatttattcctccattccgctcctggagaccgtgtcttgttggacccttggggggctggccctcgcgcaggtgctgtttttttatgtcaagtacctggtcctcttcggtgtccccgctcttctcatgaggctcgacgggctgactccccctgcattacctcgctgcgtttcaacaatgttctcctttacgggaatgtggcggtatttcgatgtaggtctgcataactttctgatccgctacgtttacatccccgtaggtgggtcccagcatggcctgctcgggactttgttctctacagccatgacgtttgctttcgtgtcgtactggcacggcggttacgattacctatggtgctgggcagcgttgaactggcttggagtgactgtggagaacggagtgcgtcggttagttgaaaccccatgtatccaggacagtctggccagatactttagcccccaagcacgcagacgattccatgcagctttagcctcatgtagcacgagtatgctgattctgagtaatttagtgtttctgggtggaaatgaagtgggaaagacttattggaatcggattttcatccagggttggccttgggtgaccctttccgtactggggttcctgtactgctatagccacgtgggcatcgcttgggcccagacttacgcgacagattag

SEQ ID NO: 119652 - DNA, 2103 bp, synthetic construct
  misc_feature 1..2103: note = Description of Artificial Sequence: Synthetic coding sequence
  source 1..2103: mol_type = other DNA
atgctgaagatgctgagctttaagcttctgctgctggccgtcgcgctcgggtttttcgagggggacgctaaattcggggagaggaacgagggcagcggtgccaggcgacgtcgatgcctgaacggaaaccctcctaagagactcaagaggcgagacagaagaatgatgtcacagctggagctgctttccggcggcgaaatgctgtgcggcgggttctacccccgattaagctgctgcttgcggagcgacagtccaggactaggccggctggaaaacaagatcttttcggtcacaaacaacacggagtgcggtaaacttctcgaggagatcaagtgtgccctgtgcagcccccactcccagagcttattccactcgcctgaacgggaagtgctggaaagagatcttgtgttaccactgttatgcaaggactattgtaaggaatttttctatacctgcagagggcatattcctggcttcctccaaacgaccgccgacgagttttgcttttattacgcccggaaagacggtggtttatgctttcccgacttccctcgcaagcaggtacggggcccagcttctaactatctagatcagatggaggagtatgacaaggttgaggaaatttcacgcaagcacaagcacaactgtttctgtatccaggaagttgttagcgggcttcgacaacccgttggggctctgcattctggcgacggctctcagaggctgttcattttggaaaaggaaggatacgtcaagatcctgacacccgagggcgaaatatttaaggagccctatctggacatacacaagttggtccagagcggaattaaaggcggtgacgaacggggcttactgtcactcgcttttcacccaaattacaaaaagaacgggaaactttatgtctcttacaccaccaaccaggaacgatgggcaatcggccctcatgaccacattctgagggtggtggagtacaccgtttctaggaaaaatccgcatcaggtggatctacggaccgcgcgggttttcctggaggtcgccgaactgcaccgaaaacatctcgggggccagttgttgttcggcccagacggatttctgtacatcatcctcggggatgggatgataacactcgacgatatggaggagatggatggcctctctgacttcacaggttctgtgctacgcctggacgtagacaccgacatgtgcaatgtcccttacagcatcccgcgctcgaaccctcacttcaactctactaaccagccacctgaggtgttcgcacacggtctgcacgatcctggtcggtgcgcggtcgaccgacaccctactgatattaacattaatctcaccatcctatgtagcgatagcaacggtaagaaccggtcctccgctcgcatactgcagatcatcaaggggaaggactatgaatccgagccctcgctgttggagtttaagcctttcagcaacggcccactcgttggcggcttcgtatataggggatgccagtcggagaggctgtatggcagttatgtatttggggatagaaatggaaactttctgacactccaacaatctccagttacaaagcagtggcaggagaagccactctgtctaggaacgagtggaagctgccggggatatttctcaggccacatcctcgggttcggtgaggacgaattgggtgaagtgtatattttgtcttcctcaaagtctatgacgcagacccataatggaaagctctataagatcgtggaccctaaacgcccgctgatgcctgaagagtgcagggccaccgtccagccagcccagactctcactagcgagtgcagtcgtctgtgcagaaacggttattgcaccccgaccgggaaatgctgctgttcccccggttgggagggtgatttttgtcgtactgcaaagtgtgaacccgcatgccggcacgggggcgtttgcgtcaggcccaacaaatgcctttgtaagaagggctatctgggcccacaatgtgagcaggtagaccgaaacattcgacgtgtgacccgggcagggatcctggaccagatcattgatatgacctcttacctcctggacctcacgtcatacatcgtgtag

SEQ ID NO: 119653 - DNA, 963 bp, synthetic construct
  misc_feature 1..963: note = Description of Artificial Sequence: Synthetic coding sequence
  source 1..963: mol_type = other DNA
atgttgaaaatgctatcattcaagttactgttactggcggttgcactgggtttcttcgagggagatgcgaagtttggtgaacggaatgagggttctggcgctcggcgaaggaggtgcctaaatggcaacccacctaaacggttgaaacggagagaccgccgcatgatgtcccagttggagctgctcagcgggggagagatgctttgcgggggcttttacccccggctgtcttgttgtttgcgaagtgactcaccagggctcggccggttagagaacaagatcttctccgtgaccaacaatactgaatgcgggaaactgttagaagagataaagtgcgctctttgttcaccacacagccagtctctcttccattctccggagcgggaggtgctggaaagagacctagttctgcccctgctatgcaaggattattgcaaggagtttttctatacttgccgggggcatatccccggctttctgcagacaaccgccgatgagttttgcttctattatgcccgcaaggatggtgggctttgtttcccagacttccctcgaaaacaggtgagaggacccgcctccaactacctggatcaaatggaggaatacgataaggttgaggaaattagccggaagcacaagcataattgtttctgtatccaggaagtcgtttcagggctgaggcagccagtaggggcactgcatagtggggatggctcacagcgccttttcatcctggaaaaggagggctatgtcaagatactgacaccagagggagagatcttcaaggaaccgtacttggatatacataaattagttcagtctgggattaaagtaggcttcttaaactttatttacttttgcgccgggtacgtgaacttcatactggtgctaccatctagccttaaagtgttcttgtgtaacaaacgcaaaaacctcgccggggaaaataagggggccacctag

SEQ ID NO: 119654 - DNA, 4146 bp, synthetic construct
  misc_feature 1..4146: note = Description of Artificial Sequence: Synthetic coding sequence
  source 1..4146: mol_type = other DNA
atggcctcccctcgggccagccggtggccgcctcctttgttgctgcttttactccctctgttgttactgcctccagcagctccgggaacacgtgatccgccgccttcgcctgcacgccgggccctgagcctggcgccacttgcaggagctggactggagctgcaactcgaaaggcgcccagagcgggagcctccccccactcccccgcgcgaacgcaggggtccggcgactcccggtccatcttacagagctccagagcccggggctgctacacagcggggacccagtgggcgggctccccgtgggggatctgcagacgctgcatggaaacactggcccgaatctaacactgaggcacacgtggaaaacatcacattctaccagaaccaggaagacttctcaaccgtgtcctccaaggaaggggtaatggtccaaacctcaggaaaaagccacgcggcttcagatgcccctgagaacctgacccttctcgctgagacagctgatgcgcgaggcagaagcgggtcctcgtcccgcacaaactttaccatcctgcctgtgggctactcgctggagatcgcaacggctttaacgtcacagtcaggcaacctcgcatcggaatcccttcatctgccttcaagctcaagtgagttcgatgagaggattgccgcgtttcagacaaagtcaggcaccgcgtctgagatggggaccgaacgcgccatgggcctcagcgaagagtggactgtccactcccaggaggctaccacaagcgcctggtccccaagttttctacccgccctggagatgggagagttgacaactccttccagaaaacggaacagttctggccccgacctctcctggctgcacttctacagaaccgcggcctcaagtcccctgctcgacctgtcgtctagcagcgagagcactgagaaattgaacaacagcacaggcctgcaatcatcctcggtgagccagaccaagactatgcacgttgctacagtgtttaccgatggtgggccaagaacgctgaggtctctgacggtgtctcttggcccggtctcaaagactgaaggattcccgaaagactccaggatcgcaacaacctcctcatccgtactgctctctccttccgccgtggagtccaggaggaactctcgcgtgactggtaacccgggagatgaagagttcatagagccatctaccgaaaacgagtttgggctgacttcattacggtggcaaaacgattctcccaccttcggggagcatcagctcgcctcctccagcgaggtacaaaacggcagcccaatgtctcagactgagacggtgtccaggagcgtggcccctatgcgcgggggggaaatcaccgcccattggctcctgactaatagcaccaccagtgccgatgtcacaggctctagcgcgagctatccagaaggcgtaaatgccagcgtgctgacccagttctctgattcgaccgtccagagtggaggatcccacacagctcttggagatcggagctattccgagtcaagctcgacatcaagtagcgaatcgctcaactcatcagccccgcgcggagagcggagcattgcaggaataagttacggccaggtccggggcacagcaattgagcagcggacctcaagcgatcatacagatcatacctacctgtcttcaactttcaccaagggcgagcgggctctactcagcatcacggataactcttccagcagcgatattgttgaaagctccacctcatacataaagatcagtaattcatctcactctgagtactcatcattcttccatgctcagacagagcgttcaaatatcagcagctatgacggtgaatatgcgcagccctctacggagtcacccgtgctccatacctccaatctgccgagctacactccaaccataaacatgcccaacacctccgtggtcctcgacacagatgctgaatttgtctctgacagttccagttcctcttctagctcaagctctagttcgtccagcggaccccccctgcccctgccatccgtgagtcaatcgcatcatttgtttagttcgatcctcccctcaactcgcgcttcagtgcacctgctgaaatctactagcgatgcaagcaccccttggtcctccagcccttcgccccttccggtgagcctcactacctcaacatccgcgccactgtccgtgtctcagactaccttgccccagagctcctctacaccagtccttccacgtgcccgcgaaaccccagttacgagctttcaaacttccaccatgacaagcttcatgacaatgctacactcatcccaaaccgctgacctgaagtcccagtctactcctcaccaagaaaaggtcattacagagagtaaatcccctagccttgttagtctgcctactgaatccaccaaagccgttacaacgaactctccgctacctccaagtctgacggagtcgtccaccgagcagactctccccgccacctcaactaacttggcccaaatgagccccaccttcacaactactattctgaaaacctcgcaaccactcatgactacaccaggcaccctttctagtacagcttctctggtgaccgggcccatcgccgtgcagaccacagcgggaaagcagctgagtctgacgcatcccgaaatcctcgtcccacagatcagcacagaaggggggatctcgacagaaaggaatcgggttattgtggacgctaccactggcctgatccctctgacgagcgtgcctacatccgccaaagaaatgactaccaaactgggagtgacagcagaatactcacctgcaagccggtcactgggaacctctccgagccctcagaccacggtggtaagcacagccgaggacttagcgcctaaatccgccaccttcgcagtgcagagtagtacgcagtctcctaccacagtgtcatcatctgcttccgtgaactcatgcgccgtgaacccctgtttgcataacggagaatgtgttgcggacaacaccagtagaggataccactgccggtgcccccctagctggcagggagacgactgcagtgttgacgtgaatgaatgcctctccaacccctgtccttccaccgcaatgtgtaacaatacccagggtagcttcatttgcaagtgtccagtgggttaccagctcgaaaaaggtatctgcaatctagtgcggacatttgtgaccgaattcaaactcaaacgcaccttcctgaatacaactgtcgagaagcactctgatttgcaggaggtcgaaaatgagatcaccaagacactgaatatgtgcttttcggcgttgccttcatacattagatctactgtccatgcctcacgggagagcaacgcggttgttatcagcctgcaaacaacgttttcactcgcgagtaacgtgacactattcgatttggccgaccgcatgcagaagtgcgtcaacagctgtaagtcttctgctgaagtctgtcagttgctgggctcccagagacgcatatttagagccgggtccctgtgtaagcgtaaaagcccagaatgcgataaggacacttctatctgcacagacctggacggggtcgccttgtgccaatgcaagtctggctatttccagttcaataagatggaccatagttgtcgggcatgcgaagatggatatcgtctggagaacgagacatgcatgagttgccccttcggcctggggggcctcaactgcggcaacccctaccagttaattaccgtcgtcattgccgccgctggtggggggctgctgctgattctagggattgccctcatagtcacatgttgtagaaagaataagaacgatattagcaagctgatcttcaaaagcggcgattttcagatgtccccctatgcggaatatccaaaaaatcctcggtctcaagagtggggacgagaggccattgaaatgcacgagaacggtagcacaaagaacttacttcagatgactgacgtctactacagtcctacctccgtgcgtaatccagagttagaacggaatgggctttatcccgcctatactggactgcctggctcccgccacagttgcatctttccaggccagtacaacccctcctttatttctgatgagagtaggaggcgtgactacttctag

SEQ ID NO: 119655 - DNA, 5829 bp, synthetic construct
  misc_feature 1..5829: note = Description of Artificial Sequence: Synthetic coding sequence
  source 1..5829: mol_type = other DNA
atggaagatcggcgagctgaaaagtcctgcgagcaggcatgcgagtccctgaaacggcaggattatgagatggcattgaaacattgcaccgaggccctactgagcctgggacagtacagcatggccgacttcactggaccatgcccactcgagatcgaaagaatcaagatagagtccttattgtacagaatagcgtccttcctgcagctgaagaattatgtccaggccgacgaggattgccgccatgttttgggagaagggttggccaaaggcgaagacgcctttagggcagttctctgttgcatgcaactgaaaggcaagctacagccagtgagcacgattctcgccaaatcgctaacaggagagtccttgaatggaatggtgaccaaagaccttaccagactgaaaacgctgcttagcgagactgagaccgcgacgtccaatgccttgagcggctatcatgtggaagatcttgacgaagggtcctgcaatggctggcactttcgcccccccccaagggggatcacatccagcgaggagtacaccctgtgcaaaagatttttggagcagggaatctgcaggtatggcgctcagtgtacgagtgctcacagtcaggaggaactggccgagtggcagaaacggtacgcttctcggctcattaagctgaagcagcagaacgagaataaacagctgtctggctcctacatggaaacattgatagaaaagtggatgaacagcctatctcccgagaaggtgctgagtgagtgcattgagggtgtgaaggtggagcacaaccccgatctgtctgtgactgtgagcactaaaaagtcacaccagacctggactttcgcactcacttgcaaaccggcccggatgctgtacagagtggctctgttatacgatgcacaccgccctcatttctccattattgctatcagcgccggagactcaacaacccaggtgtcccaggaagtgcctgagaactgccaagaatggattggaggaaagatggctcaaaatgggctcgaccactacgtgtacaaagtgggaattgctttcaatacagaaatttttggaacttttcggcagaccattgtgttcgacttcgggctcgagcctgtgttaatgcagagagttatgatcgatgccgcctctacagaggacctcgagtatctcatgcacgcaaagcagcagctggtcacaacagccaaaagatgggatagttcctctaaaaccatcatcgactttgagccaaacgagacaaccgacctcgaaaaaagtctcctgatcagataccagattcctctgtcagcagaccagcttttcacccagtctgtgcttgacaaatctttgacaaagtctaattaccaaagccgcttacacgacttactgtatattgaagagatagctcagtacaaagagatatccaaatttaatctaaaggtgcaactgcaaattctggcaagcttcatgctcacaggcgtctctggcggtgcgaaatacgcccagaatggccaactcttcggcagatttaaactcactgagacgttgtctgaggataccctggcaggccggctggtcatgacaaaagtcaatgccgtttatctgctgccggtgcccaagcaaaaattggtgcagactcagggcaccaaggaaaaggtgtacgaagctaccatcgaagagaaaaccaaagagtatatatttcttcgactcagtagagaatgttgtgaggagctgaaccttagaccagactgcgatacccaggtggagctgcagttccagctgaacagactgccactgtgtgagatgcattacgcactcgataggatcaaggacaacggggttctgtttcctgacattagcatgactccaacaattccctggtctcccaatcgccagtgggacgaacagctggacccaaggttgaacgctaagcaaaaagaggcagtgctggccataaccacccctttggcaatccagctaccacctgtgctgattatcggaccatatggaacgggaaagacatttacactggcccaagccgtcaaacatatacttcagcagcaggaaacacgcattttaatttgcacccactccaattccgccgccgacctgtatatcaaggactatctgcatccatacgtagaagccggcaacccacaagctcgaccactgagggtgtattttcggaatagatgggtcaaaaccgtgcatcctgtcgttcaccagtactgcttgatctcaagcgcacatagtacctttcaaatgccccagaaggaggatattcttaagcatcgggtggtggtagttacactcaacacaagccagtacctctgtcagttagatctagaaccgggcttctttacccatatcctactggacgaggcagcccaggccatggagtgtgagacaatcatgccactggcactcgccactcagaatacaagaatcgtcctggccggtgaccatatgcagctgtctccgttcgtttatagcgaattcgcacgggagagaaatctccatgtctcccttctggaccgcctctacgagcactatccagccgagtttccttgcaggattctattatgcgagaattacaggtcccacgaggcaatcattaattatacatccgaactgttttacgaaggcaagttaatggctagcggaaaacagcccgcccacaaggatttctatcctctgacattttttacagctcggggagaggacgtgcaggagaaaaattcgaccgctttttacaataacgctgaggtatttgaagtggtggaaagagttgaggaactgcggcggaagtggcccgtggcgtggggtaagcttgacgacggcagtatcggagtcgtgacaccttatgcagaccaggtattcagaatccgtgccgaactgagaaagaaacgcttgtcagatgtgaacgtcgagagggtcctgaatgtccaggggaagcaattccgagtgctgttcctgagcactgtcagaactaggcatacctgcaaacacaaacagactccaatcaagaagaaggaacagctcttagaggactctaccgaggacctcgactatggatttctgtccaactacaaactgttgaacaccgccatcacaagagctcagagcctcgttgccgtagtcggtgaccctatcgctctgtgctcaatcggtcgctgccggaagttctgggaaaggtttattgcactgtgccatgagaattcatctctccatggcatcaccttcgagcaaataaaggcccagcttgaagctttggaattgaaaaaaacatacgtgctcaaccccctagcaccggaatttattccacgcgcattgagactacagcattctgggtcaacaaacaaacagcagcaaagccctccaaagggaaagagcctccatcatactcaaaatgatcattttcagaacgatggcattgtccagccaaaccccagcgtgttgattgggaatcccatccgcgcctacactccaccccccccgctgggcccgcacccaaatttaggaaaaagcccatctcccgttcagcgaatcgacccacatacgggaaccagtatcctttacgtcccggccgtctacggggggaatgtggttatgagcgtgcctctcccagtcccctggactggctaccaagggcgctttgctgtcgatcccaggattattactcaccaggccgctatggcctacaacatgaacctgctccagacccatggtcgaggctctcccatcccgtatggcctgggacaccaccctcccgttacaatcggtcagccacaaaaccaacaccaggaaaaggatcagcatgagcagaaccgcaatggaaaaagtgacactaacaacagcggtcccgaaattaataagatcagaacgcccgagaagaagccaactgagcccaagcaggtggatctggaaagcaacccacaaaaccgatcacctgagagtcggccctccgtcgtttacccatcaaccaaatttccgcgtaaggacaacctgaacccccgccacatcaacctacccctccccgccccccacgcccagtacgccatccctaacagacactttcaccccctgccccaactgcctcgaccgcctttcccaatccctcagcagcacacgctattgaaccaacagcagaacaacctgccggaacagcctaatcagatccccccccagccaaaccaggtggtgcagcagcagagccagctgaatcagcagccgcagcagccgcccccccagctgtctcccgcttaccaggccggacccaacaatgcgtttttcaacagcgctgtggcacataggccacagagcccacctgcagaagccgtgattcccgagcaacaaccacctccaatgctgcaggaggggcatagccctctgagagcaattgctcagccaggtcccatcctgccttcccatctgaattcattcattgatgaaaaccccagtggactgccgattggcgaagccctcgaccggatacatggatcggtggcgcttgagaccttacgacaacagcaggccaggttccagcagtggtcggagcaccatgcctttctttcgcaaggctctgccccctaccctcaccatcaccacccccaccttcagcacctcccacagcctccgctgggccttcatcagccacctgtgcgcgccgattggaagcttacatctagtgccgaagacgaggtagagacaacttacagcagatttcaggacctgatccgagagctgtcacacagggatcagtcagaaacccgtgaactggctgaaatgccaccaccccaatcccggctcctccaatacaggcaggtgcagtcacgcagcccgcccgcggtgccttcacccccatccagcactgaccactcctcacattttagcaactttaacgacaactcccgcgacatcgaggtggcctctaatccagcattcccccaacggctgccgcctcagattttcaattccccattcagcctgccttccgagcacttggcccctccaccgctcaagtacctcgcacctgatggtgcttggacttttgccaatttacagcaaaaccacctgatgggccccggttttccttacggtctgcccccactgccccacagacccccccagaacccattcgttcagatccagaatcaccagcatgcaatcgggcaggagccatttcatccgctctccagtcgcacggtgagcagctcatcccttccttccctagaggaatacgagcctagaggccccggcaggccactgtaccaaaggagaatatctagtagcagcgtgcaaccctgctctgaagaggtcagcaccccccaagactcgttagctcagtgcaaagaactgcaggaccactctaaccagtcctctttcaattttagctctccagaaagttgggtaaatactacttcatcaaccccctaccagaatataccttgtaacggatcatctcgcaccgctcagcccagagagcttatcgctcctccaaaaacagtgaagccacccgaagaccagctgaagtccgaaaatctggaagttagtagttccttcaattattccgtgttacagcatttaggtcaatttccgcctcttatgcccaacaaacaaattgcagaaagtgctaattcttctagtcctcagagctctgctggggggaagccggccatgagctatgcgagcgcgctgcgagcccccccaaaaccacgaccaccacctgagcaagcaaaaaagtcctccgatcccctgtcactgttccaggagctcagtctggggagcagctcaggaagtaatggattctacagctatttcaagtag

SEQ ID NO: 119656 - DNA, 1365 bp, synthetic construct
  misc_feature 1..1365: note = Description of Artificial Sequence: Synthetic coding sequence
  source 1..1365: mol_type = other DNA
atggaggaccggcgggcggaaaagtcatgcgagcaggcgtgcgagtctctgaagcgtcaggattatgagatggcgctgaagcactgtaccgaagctttgctttctctcgggcagtattccatggctgattttactggcccatgccctctggaaatcgagcgcataaaaattgaaagtctcctctaccgtatcgcaagcttcttgcagcttaaaaactacgtgcaggcagatgaggattgtcggcacgtcctgggcgaggggctggctaagggagaggatgcttttcgcgcagttctctgttgcatgcagctgaaggggaaactccagcccgtcagcaccatccttgccaagtctctgacaggagaaagccttaacggcatggttacgaaagacctaacacggcttaagacactactgtctgaaacagaaaccgccacctccaatgcactaagtgggtaccatgttgaggatttagacgaaggttcatgtaatgggtggcacttccggcctcccccaaggggcatcacgtcaagcgaggagtataccctgtgtaagcgctttcttgagcaaggcatctgtcgctacggggcccagtgcaccagtgcacattcacaagaagaattagctgaatggcaaaagcgatacgcatctagattgattaagctgaaacagcagaacgagaacaagcaactgtccgggtcctacatggaaactctaatcgaaaagtggatgaatagcctttctcccgagaaggtgttgagcgagtgcatcgaaggggtgaaagtagagcataacccagacctatctgttaccgtgtctacaaagaagtcccaccagacatggaccttcgccctgacctgtaagcccgcgagaatgctttatagggtcgccctgctatatgacgcccaccggccacacttctccattatcgccatcagtgccggggacagtacaactcaggtatcccaggaggtgccagagaactgccaggagtggatcgggggcaaaatggcacagaatggacttgaccactatgtctacaaagtgggcatagcattcaacacagaaatttttggtacttttcgacagactattgtctttgacttcgggcttgagcccgtgttgatgcagcgcgtgatgatcgacgcggcctctacagaagatttagagtacctgatgcatgctaaacaacaactggtcaccacagcaaaaaggtgggactcttcatctaagaccataatcgattttgagcctaacgagaccacagatctggaaaaatcacttctcattcgctaccagatacctttatccgagaaaaaaaaaaagaaaaaaaagaagaagaagaagaagaaaaaaaaaaaatag

SEQ ID NO: 119657 - DNA, 294 bp, synthetic construct
  misc_feature 1..294: note = Description of Artificial Sequence: Synthetic coding sequence
  source 1..294: mol_type = other DNA
atgcctgccgagaggcccgctgggagcggcggatccgaagcccctgccatggtggaacaactggacaccgccgttatcactcctgccatgctcgaagaggaggaacagttggaggccgcgggactcgaaagggagcgtaagatgttagagaaggccaggatgagctgggacagagaaagcacggaaattcgctataggagattgcaacacctgctggagaaatctaatatttattccaaatttcttttgaccaagatggagcagcagcagctagaaacagtcatgaagatctag

SEQ ID NO: 119658 - DNA, 2517 bp, synthetic construct
  misc_feature 1..2517: note = Description of Artificial Sequence: Synthetic coding sequence
  source 1..2517: mol_type = other DNA
atgcccgcggaaaggcctgctggttccggggggtccgaggcccccgccatggtggagcagctggatacagctgtgatcacccccgcaatgctagaggaagaggagcaactggaggcggcaggcttagaacgagagcggaagatgctggagaaagccaggatgtcctgggatagagagtctaccgaaataagatatcggagactccagcatctacttgaaaagagcaacatttattctaagtttctcttgaccaaaatggagcagcaacagctggaagagcagaagaagaaagagaagcttgaacgaaagaaagaatcattaaaagtgaagaagggcaagaattcgatcgacgccagtgaagaaaagccagtgatgagaaaaaagcgcggaagagaggacgagagttataacatttccgaggtcatgtctaaagaagagatcttgtccgtggccaagaagaataaaaaagagaacgaagatgaaaacagttcatctaccaatctctgtgtggaagatctgcagaaaaacaaggacagcaacagtatcatcaaggataggctaagcgaaaccgtgagacagaataccaaattcttttttgacccagttcggaagtgcaacggccaacctgtcccatttcagcaacccaagcactttacagggggggtgatgaggtggtaccaggtggaaggcatggagtggctcaggatgctgtgggagaatggtataaacggcatccttgctgacgagatgggtctaggcaagaccgtgcagtgtatcgcaacgatcgccttaatgatccagagaggggttccaggtccctttcttgtgtgcggtcccctcagcacactaccaaattggatggccgagtttaaacggttcacccccgacattccaactatgctgtatcatggaactcaggaagaacgacagaagctggtgcgtaatatctacaagcgcaagggtaccctgcagattcatccagtcgtcataacttccttcgaaattgcaatgcgcgaccggaatgcccttcagcactgctattggaagtacctcattgtggacgagggacacaggatcaagaatatgaaatgcagacttattagagagcttaagcgttttaatgctgataacaaactgctcctgaccggcacccccctgcagaataatctgtcggagctttggtcattactcaattttctgctacctgacgtatttgacgacctcaaaagcttcgagagctggtttgacattacctctttgtctgaaaccgctgaggacataattgcgaaagagcgagagcagaatgtgcttcatatgttgcatcagatcctcaccccctttctgctccgccggctgaagagtgatgttgccctggaagtgcccccaaagcgggaagttgtagtctatgctcccctgtccaagaagcaggaaatattttacaccgcgatcgtaaatcggacgatagcgaatatgttcggctcttctgaaaaggaaaccatcgaactgagccctaccggtagaccaaaacggaggacacgcaagagtatcaattattccaagatagacgacttccccaacgagctggaaaagttaatctcccagatacaacctgaggtagaccgggagcgggcagttgtcgaagtgaacatacccgtggaaagtgaagtgaatctgaagctccagaacatcatgatgctgctacgcaaatgttgcaaccatccttacttgatagaataccccattgatcccgtgactcaagagtttaagattgacgaagaactggttaccaactccggcaagtttctgattctcgataggatgttaccagagcttaaaaaacgcggacacaaggtccttctcttctcacagatgaccagcatgctcgatattctcatggactactgccatctcagggacttcaacttctctcgattggacgggagtatgtcctactccgagcgggaaaagaacatgcacagtttcaataccgatcccgaggtgtttatctttctggtgtccactagggctggcgggctggggatcaacctaactgctgccgacaccgtcataatctatgactctgactggaacccccagtctgacctccaggcccaagacagatgccacagaattggccagacaaagcccgtggtggtttaccgacttgtcactgcaaatacaatcgatcagaaaatagtggaaagagctgcggctaagaggaagcttgaaaagcttattatccacaaaaaccattttaagggaggtcagagcggcttgaatttgagcaagaatttcttggatcctaaggagctgatggagctcttgaagtccagggactatgaacgtgagattaaaggcagtcgcgagaaagttattagcgacaaggacctcgaacttttactggaccgttccgacctcatcgatcagatgaacgctagcggtcctatcaaggaaaaaatggggatctttaaaatattggagaattccgaagacagtagcccagaatgcctcttttag

SEQ ID NO: 119659 - DNA, 2655 bp, synthetic construct
  misc_feature 1..2655: note = Description of Artificial Sequence: Synthetic coding sequence
  source 1..2655: mol_type = other DNA
atgcccgcagagcgcccagctggatcaggagggagcgaagcccctgcaatggtcgaacagttggacacagcagtcatcacgcccgctatgctcgaggaggaggagcagctcgaagctgctggtttagaacgggaacgcaagatgttggagaaagcgcggatgagctgggatagagagtcaacggagatcaggtatcgccggcttcagcatctactggaaaaaagtaatatttactccaagtttcttctgacgaagatggaacagcagcagttggaggagcagaagaaaaaggagaaattggagaggaagaaagaaagcctcaaagtgaagaaagggaaaaattccatagacgcctccgaagagaaaccagtgatgagaaaaaagaggggccgagaggacgaatcttacaatattagcgaagttatgtcaaaagaagaaatcctaagcgtggctaaaaaaaacaagaaggagaacgaagacgaaaacagcagtagtacaaatctgtgtgtggaagacctgcagaagaacaaggattccaactccataataaaagaccggctcagcgagaccgttcgccagaacaccaaattcttctttgatcctgtgcggaagtgtaacgggcagccagtgccttttcagcagccaaagcacttcactggaggagtgatgaggtggtatcaggttgagggtatggagtggctaaggatgctatgggagaacggcatcaatggaatactcgctgacgaaatgggccttgggaaaactgtccagtgtattgccaccattgccctgatgattcaacggggcgtgcctgggccgttcttagtgtgcggccccctgtcaacacttcctaactggatggccgaattcaagcgatttactccggacatcccaaccatgctttatcacggaacgcaggaagaaaggcagaagctagtccgaaatatctacaagcgaaaaggaactctgcagatccacccagtggtgatcacttccttcgagatcgcaatgagagataggaacgccctgcagcattgttattggaagtacctgatcgtcgatgaggggcatcggatcaagaatatgaaatgccgtcttatacgcgaattgaagcgctttaatgccgacaacaaacttctattgactggtacacctctccaaaacaatctctccgaactctggtctctgctgaatttcttgcttccggatgtcttcgatgacctgaagtccttcgaatcctggttcgatataacctctcttagtgagaccgccgaagacataattgccaaggaaagggagcagaatgtgttgcacatgcttcaccaagagcggatccctaggatgtatgtgagtgagtttacagatgagggattcttcgaagggaaacttccgtcacggaaagatctttacgacattagaccatacgaaaacacgtaccttctcaagttgcataccaacttcgaaatccttacacctttcctgttaagaaggctgaagtctgacgtcgcactggaggtcccacccaagcgggaggtagttgtgtatgcccctctgagcaaaaagcaagaaatcttttacaccgctattgtgaacagaaccattgccaacatgtttgggagttccgaaaaagaaacaattgaacttagcccaaccggaagacccaagcggaggactcgaaaatctatcaattactcaaagatagatgacttcccgaacgagctcgagaaacttatcagccaaatccagcctgaggtggaccgggagagagctgtggtcgaggtgaacatcccagtcgaaagcgaggtcaatctcaagctgcagaacatcatgatgctcctaagaaagtgctgcaaccacccttacctcatcgagtaccccatagatcccgttacccaggagtttaaaattgatgaagaacttgttaccaactcggggaaatttttaatactggatcgcatgctgcctgagctgaaaaagcgcgggcataaagtgctccttttctctcaaatgacaagtatgctggacatcttgatggactactgccacttacgggatttcaatttcagcagactcgatggaagtatgagctattcagagcgagagaaaaatatgcacagtttcaatacagatcctgaggtgtttatcttcctggtgtcgacacgggccggcggactaggcatcaacctcactgcagccgacacggtgattatctacgactccgactggaaccctcagagtgacctccaggcccaggaccgctgccacagaatcggacagaccaaacctgtcgtggtgtacagactggttactgctaacaccattgaccagaagatagttgagcgggcagccgccaagcggaaactggagaagcttattattcataagaatcatttcaaaggagggcaatctggtctaaatctctctaaaaacttcctcgaccctaaggagcttatggagttgctgaagtccagagattacgagcgggagatcaaaggctctagggagaaagttatatccgataaggacttggagttactactagacaggtctgatctgatcgatcagatgaacgctagtggaccaatcaaggagaagatggggatttttaagatcctggaaaattcagaagattcctcccccgagtgtctgttttag

SEQ ID NO: 119660 - DNA, 390 bp, synthetic construct
  misc_feature 1..390: note = Description of Artificial Sequence: Synthetic coding sequence
  source 1..390: mol_type = other DNA
atgcctgccgaacggccagccggaagtggcggcagcgaagcacccgcgatggttgagcagttagatacggcagtgatcactcccgctatgctggaagaggaggagcagcttgaagccgccggactggagagagagagaaaaatgctggaaaaagcccggatgagctgggaccgtgaaagcactgaaatcagatataggaggcttcaacacctgctcgagaagagtaacatctactcaaagtttcttctcactaagatggagcagcagcagcttgaagagcagaagaagaaagaaaagctggaacggaagaaggaaagtctgaaggttaaaaaagggaagaactcgatcgatgcttctgaagagaagccaggcaactttgtgtgtggctag

SEQ ID NO: 119661 - DNA, 948 bp, synthetic construct
  misc_feature 1..948: note = Description of Artificial Sequence: Synthetic coding sequence
  source 1..948: mol_type = other DNA
atgcctgccgagagacctgccgggtctggtgggtccgaggcacccgccatggtcgaacagttggataccgcggtgattacccccgctatgctggaggaagaagagcaactggaggccgccggtttggagagggagcgcaagatgttggagaaggcacggatgtcctgggaccgagagagcactgagattagatataggagactgcagcacctcctggagaagtccaacatttactctaagttcctgcttaccaagatggagcaacaacagctggaagagcagaagaaaaaggagaaactcgaaagaaagaaagaatcccttaaagtcaaaaaggggaagaatagtatcgatgccagtgaagagaaaccggtaatgcgaaaaaaacggggacgggaggacgaatcttacaacataagcgaggttatgagcaaggaggaaatcttgtctgtcgcgaaaaagaataagaaggaaaatgaggatgaaaatagctcttcaaccaacctatgcgtggaagatttacagaaaaacaaagatagcaactcaatcattaaggaccgtttgagcgaaactgtgcggcaaaacacaaaattctttttcgatcctgtgagaaaatgtaatgggcagccagtgcctttccagcagccgaaacacttcacaggcggcgtgatgcgatggtatcaggtggaaggcatggaatggctgcgcatgctgtgggagaatggcattaacgggatcttggctgacgagatggggctcggtaagaccgtgcagtgcattgcgaccatagccctgatgattcagagaggggtgcctgggccatttcttgtgtgtggcccgctgagcacactgcccaactggatggcagagtttaaaaggttcaccccagacatccccactatgctttaccatggaacccaggaggaaagacagaagctcatatacctgtag

SEQ ID NO: 119662 - DNA, 2223 bp, synthetic construct
  misc_feature 1..2223: note = Description of Artificial Sequence: Synthetic coding sequence
  source 1..2223: mol_type = other DNA
atgcccgccgagcgtccagctgggtccggcggttcagaagctcccgcgatggtggaacagttggataccgccgtgatcactccggccatgctagaagaggaggaacaacttgaggctgctggcctggagcgcgagagaaagatgttggagaaagcgagaatgtcatgggaccgggagtctacggagatccgctacaggcggttgcagcatctgctggagaagtccaacatttacagcaagttcctcctaacgaagatggaacaacagcagctagaggagcagaaaaagaaggagaaactagagcggaagaaggaatccctaaaggtgaaaaaaggcaaaaactcgatcgacgcatctgaggagaaacctgtgatgcgcaaaaagagaggcagagaagacgaaagctacaacatcagcgaggtgatgagcaaggaggaaattctctccgtggccaaaaaaaataagaaagagaacgaggacgaaaatagctcttctacgaacctgtgtgtggaggatctgcagaaaaacaaggactctaattcaattatcaaggacaggttgagcgagaccgtacggcagaatacgaagtttttttttgatcctgttcgcaagtgcaacggccagcccgtgccttttcagcagcctaagcatttcactggtggcgtgatgaggtggtatcaagtggaaggtatggaatggctcaggatgctctgggagaacgggatcaatggcatcctggccgacgaaatgggtctcgggaagacggtgcagtgtatcgccaccattgctctgatgattcaacgtggggtgccgggcccttttctggtttgtggcccactgagcaccctccccaactggatggccgagttcaagcggttcacaccagatattcccacaatgctgtaccacggcacccaggaggaacggcagaaattagtaaggaatatctacaaaaggaagggcaccctacagatccatccagtagtgatcacttcgtttgagatagctatgcgagacaggaatgctctccagattttgacgccttttctcctgaggagactgaagtccgacgtggccttggaagttccacccaaaagggaagttgtggtgtacgcccccttgtcaaaaaagcaagagattttttacacagcaatcgtgaatcgaaccatcgctaacatgtttgggagcagtgagaaggagactatagagctctcccctacaggtaggcccaagcgcagaacccggaagagcattaattactcaaaaatcgacgactttcctaacgagctcgagaagctgattagccagattcagccggaagtcgatagagagcgagctgtcgtggaggtcaacatccccgttgagtcagaggtcaacttaaagctccagaatataatgatgttgctgcgtaagtgttgcaatcatccctacctgatcgagtacccgatcgaccctgtaacacaagagtttaaaatcgacgaagaactggtgaccaactctggcaagtttctgattctggatcgaatgctcccggaattgaaaaagcgaggccacaaagtgttgctgttcagccaaatgactagcatgttggacatattaatggattactgccatctgcgcgattttaatttcagtcgcctagacgggagcatgtcttattcagaaagggagaaaaacatgcattctttcaataccgatcccgaagttttcatctttctggtgagtaccagagctggggggctggggatcaatcttactgcagccgacacggtcatcatatacgattcagactggaatcctcagtcggacctgcaagcccaggacagatgccacaggatcggtcagaccaaaccggtggtcgtgtaccgtctcgtcacagctaacacaatagatcagaaaatagtagagagagctgccgccaagaggaaactggagaagttgatcatacataagaaccatttcaagggaggccagtccggtctgaacctgtccaagaactttctggacccgaaggaacttatggaattactcaagtctcgcgattatgagagggaaataaagggcagtcgggaaaaggtgatcagtgacaaagatttggagctcctgctggatagatctgacctcattgatcagatgaacgcctccggcccaattaaggagaagatggggatattcaagattctggaaaacagtgaagactcttcaccagagtgcctcttctag

SEQ ID NO: 119663 - DNA, 579 bp, synthetic construct
  misc_feature 1..579: note = Description of Artificial Sequence: Synthetic coding sequence
  source 1..579: mol_type = other DNA
atggtagaacagctggacactgccgtcatcacacccgccatgctggaggaggaggaacagctcgaagccgctggtctcgagcgcgagaggaagatgcttgaaaaggctagaatgtcatgggatagagagtccacagagataagatatcgcagactgcaacatttgctcgagaaatcgaacatttactcaaagttccttctgacaaagatggagcaacagcaactggaagaacagaagaagaaggagaaactggaacgcaagaaggagtcactcaaagtgaagaaaggaaagaattctatcgacgcgtctgaagaaaaaccagttatgaggaagaaacgcggtagagaggacgagtcgtacaatatttctgaggtgatgtctaaggaggagatcctgagtgttgctaaaaaaaataagaaggaaaacgaagatgagaattcctccagtactaatttgtgcgtggaagatttacagaaaaataaggactctaattctatcattaaagaccggttgtctgaaacggtacggcagaatactaagttcttttttgatccagtgcgtaagtgtaatgggcaatag

SEQ ID NO: 119664 - DNA, 1461 bp, synthetic construct
  misc_feature 1..1461: note = Description of Artificial Sequence: Synthetic coding sequence
  source 1..1461: mol_type = other DNA
atgtggaagagtgtcgtggggcatgacgtgtccgtgtctgtggagacccagggtgacgattgggataccgatccggattttgtaaatgatattagcgaaaaggagcagcgctggggagcaaaaacaatagaaggaagcggtcggaccgaacatatcaatattcatcagctgcgcaacaaagtgagtgaggaacatgacgtcctccgcaaaaaagagatggaatctggcccaaaggcatcccacggctatggtgggcggtttggcgtggaacgcgacaggatggacaagtccgccgtgggtcacgagtatgtcgcggaagtcgagaagcatagctcacagactgatgcagcgaaaggatttggcggcaaatacggggtggagcgcgacagggctgacaagtcagctgtgggattcgattacaagggcgaagtggagaagcacactagtcagaaagattacagccgcggctttggtggaagatacggagtggaaaaagacaagtgggataaagccgccctcggatacgactataagggagagactgagaaacacgaaagccagcgagattatgctaagggctttggtggccagtacggcatccaaaaagacagagtcgataaaagtgccgtggggttcaatgaaatggaggctcctaccaccgcgtacaaaaaaaccacgcccattgaagcggcttcttccggcacaagaggcctgaaggcgaagtttgaatccatggctgaggagaaacggaagagggaggaggaagagaaagctcagcaagtcgccaggaggcagcaggagcggaaagcggtgaccaagcggagtcccgaggcaccccagccagtgatagcgatggaagaacccgccgtgccagccccccttcccaaaaagatcagttcggaagcctggccgccggtcggaaccccaccttctagcgagagcgagccggtccgcacgtccagagagcacccagtgccactgctacccatcaggcagactcttccagaagacaatgaggaaccccctgccttacccccgcgcacactcgagggtctacaggtggaggaggagcctgtctacgaagctgagccggaacccgagccagagcccgagccagagccagagaatgattacgaggacgtagaggagatggaccgacacgaacaggaggacgaaccagagggcgactacgaggaggtgctggagccagaagactcctcttttagctcagctctcgccgggtctagtggctgtccggcaggcgccggcgccggggccgtggctctcggcatctccgcggttgctgtctacgactatcagggcgagggctccgatgagctgtcattcgaccctgatgatgtcatcacggacattgagatggtggacgaagggtggtggcggggaagatgtcacggacactttggattattccccgcaaactacgtcaaactcctagagtag

SEQ ID NO: 119665 - DNA, 600 bp, synthetic construct
  misc_feature 1..600: note = Description of Artificial Sequence: Synthetic coding sequence
  source 1..600: mol_type = other DNA
atgcccaattacaagttgacgtactttaacatgcgaggacgtgccgaaataatccgatacatctttgcctatcttgacatccaatacgaggaccaccgaatcgaacaggccgattggcccgaaatcaaaagcacactgcctttcgggaaaattcccattctggaagtagacggactgactttgcaccaaagccttgccatagcacgttatctcacgaaaaatacagacctcgccggtaataccgagatggaacaatgccacgtggacgctattgtcgatactctagatgatttcatgtcttgttttccgtgggccgaaaaaaagcaggacgttaaagagcaaatgtttaatgagttgctgacgtataatgctccccatctgatgcaggatctcgacacatatttagggggcagagagtggctgattgggaactctgtcacgtgggctgatttctattgggaaatttgtagcaccacactcctggtctttaaaccggacctccttgataaccatccacgactagtgacgctgcgaaagaaggtgcaggccattccagcagttgctaactggatcaagcgaagacctcaaactaaactctag

SEQ ID NO: 119666 - DNA, 813 bp, synthetic construct
  misc_feature 1..813: note = Description of Artificial Sequence: Synthetic coding sequence
  source 1..813: mol_type = other DNA
atgcagtacccgcacccaggacccgctgcaggtgctgtgggtgtgcccctctacgccccaactcctctgcttcagcctgcccatcctacgcctttctatattgaagacatcctgggaaggggaccagcagcccctaccccggcacccaccctgccttcaccgaacagttcattcaccagcctcgtttccccataccgcactccagtctatgaacctactccaatacaccccgctttctcgcatcattccgcagccgctctagctgccgcttatggccctgggggctttggcgggcccttgtacccttttccacggactgtgaatgactatacacatgctctactgagacatgatccccttgggaagccactgttgtggtccccatttcttcagagacctctgcacaaacgcaaaggaggccaggtccggttcagcaatgaccaaaccatcgaactggagaagaagttcgagacacagaaatatctttctccccccgagcgtaaaagattggccaaaatgctccagctctctgagcggcaggttaagacatggttccaaaatagaagggccaagtggaggcgattaaagcaagaaaatccccaatctaataagaaagaggagctcgagagccttgattcttcctgtgaccaaagacaagacttgcctagcgaacagaataaaggggcaagcctagactcatctcagtgtagccccagccctgccagtcaggaagacctcgaatccgaaatttccgaagactccgaccaggaagtggatattgagggcgataagagctactttaatgcgggatag

SEQ ID NO: 119667 - DNA, 570 bp, synthetic construct
  misc_feature 1..570: note = Description of Artificial Sequence: Synthetic coding sequence
  source 1..570: mol_type = other DNA
atgctaggtatgataaagaactctctttttggaagcgttgagacatggccttggcaggtcctctcaaaaggagataaagaggaagtggcctacgaagagcgagcatgcgagggcggcaagtttgctacagttgaagtgacagacaagccagtggatgaggcacttagagaagccatgcccaaagttgcgaaatacgcaggggggactaatgacaaagggataggcatggggatgaccgtgcccataagtttcgctgtgtttccaaacgaagatggctctttacagaaaaaactgaaggtctggttccgcatacctaaccagttccagtcagatcctccagcaccttcggataagagtgtcaaaatcgaggagcgtgaaggcataactgtgtattcaatgcaattcggcgggtacgctaaggaggctgactatgttgctcaggccactaggctgagagccgcactagagggtactgctacctatcggggagatatctatttttgtaccgggtacgatccgcccatgaaaccatacggtcggcgaaatgaaatttggctactgaagacctag

SEQ ID NO: 119668 - DNA, 4059 bp, synthetic construct
  misc_feature 1..4059: note = Description of Artificial Sequence: Synthetic coding sequence
  source 1..4059: mol_type = other DNA
atgtcaaaagttaccgcgccgggctctggtccccccgctgccgcctccggcaaggaaaaaagatcttttagtaagcggctctttcggtccgggagggcaggcgggggcggtgctggtgggcccggcgctagtggcccggccgccccatcctcaccttcctccccatcctcggctaggagcgtggggagctttatgagccgggtgcttaagactctgtcaaccctcagccatctcagtagtgaaggggctgcacctgacagaggagggttacgatcgtgcttcccaccaggtcccgcagctgctcctacccctcccccgtgcccaccccctcctgctagcccggcaccccccgcctgtgccgctgagcccgtgccgggtgtggcgggtctgcggaatcatggtaatacgtgcttcatgaatgctacactgcaatgcttgtctaatacggaactattcgctgagtatctggcactcgggcagtatcgcgcaggccgccccgagccttctcccgacccagagcagcccgctggcagaggagcacaagggcagggcgaggtaaccgaacagcttgctcacctggtgcgcgccttgtggacgctggaatacactcctcaacattcccgagatttcaaaacaattgttagtaagaacgcactccagtacagaggcaacagccagcatgacgcgcaagaattcctcctttggctgctcgacagggttcacgaagacctgaaccacagtgtaaagcagagcggacagccacccctcaagccgccctcggaaaccgatatgatgccagagggcccttctttccctgtgtgtagtacctttgtgcaggagctgtttcaggcccagtaccggagcagcctgacctgcccacactgtcagaaacaatccaatacatttgatccgtttctttgcatatcgctgcccattccgctgccccacacaagacctctttacgtgaccgtggtatatcagggaaagtgcagccattgtatgaggatcggcgtagccgtgccactttccggcacagtggctcggctgagggaagccgtgtcaatggagacgaagatcccaaccgatcagatagttctcaccgagatgtattatgacggttttcatcgttccttctgcgacactgatgatctagaaactgtgcacgagagcgactgtattttcgcctttgagactcccgagatctttcggccagaagggatactgagccagagaggcattcatttaaacaacaacttgaaccatctcaagttcgggttagactatcatcgcctgagcagccctactcagaccgcagccaaacaggggaaaatggactctcctacctctcgagccggctcagacaagattgtgctcctggtgtgtaacagagcctgcaccggtcagcagggcaagagatttgggctacccttcgtgctgcatctggaaaagactatcgcgtgggacttgctgcagaaagagatcctcgaaaagatgaaatattttctccgccctactgtatgcattcaagtctgcccctttagtctccgggtagtgtctgttgtcgggattacatatcttttacctcaggaggaacaacctctttgccaccctatcgtcgaacgcgctcttaaatcatgtgggcctgggggcactgcacacgtaaaacttgttgtggagtgggataaggagaccagagactttttgttcgtcaacactgaggatgagtacataccggatgccgagagcgtccgtttacaacgggagcgtcaccatcaaccacagacttgcacgctcagccagtgtttccagctgtatactaaggaggaacgcctagcgcccgatgacgcctggcgatgtccacactgtaaacaactccagcaagggtccataacactctctctctggacgttgccagacgtcctgatcattcatctcaagaggttccggcaggaaggggacaggcggatgaaactacagaatatggtaaagtttcctctgacgggcttggacatgacaccccacgtcgtcaagcgctcccagtcctcttggagtctgcctagtcattggtctccctggagaaggccttatgggttagggcgagaccccgaagattatatctacgacctgtatgcagtgtgtaaccaccacggaaccatgcaaggaggtcattatactgcttattgtaagaatagcgttgacggcctgtggtattgttttgacgactccgatgttcaacagctcagcgaagatgaagtctgtacacagaccgcatatatcctgttttaccagcggaggacggccatcccgagctggtcagccaattcttcagtagccggaagcaccagtagctctctgtgcgagcactgggtgtctagattaccgggtagcaaaccagcttcagtcacgtcagcggcctcctccaggcgcacttccctggcctctctcagcgaatcagtagaaatgactggggagcgatctgaagatgacggaggcttttcaacgagacccttcgttaggtctgtgcagagacaatctctcagcagccggagtagcgtcacatctcctttggccgtaaatgaaaactgcatgcgaccctcatggagcttgagcgcaaagcttcagatgcggtccaattcaccctcgcggttttcgggcgattctcccatccattcgtcagcttcgaccctggagaaaatcggggaggcagccgacgataaggtcagcattagctgcttcggaagtctgaggaatctgtcttcgtcctatcaggaacctagcgactctcactccaggcgggagcacaaggcggttgggcgggcccctctggccgtgatggagggtgtgtttaaggatgagtccgacacaaggaggctgaacagctcagtcgttgacactcagagtaaacactcggcccagggagatcgccttccacctttgagtggcccgtttgacaacaataatcagattgcctacgtggatcagtccgacagtgtggactcttcacccgtgaaggaagtgaaagctccttcccatcctggctctctggcaaaaaagccagaaagcacaactaaaagatcacccagcagcaagggcacctctgagcctgaaaagtcgctgcgcaaggggagacccgctctggcttctcaggagtcctctctcagttcgacctccccatcctctccacttccggtaaaagtgagtctaaagccatctcggagccgcagcaaggccgacagcagctcccgcgggtccgggcgtcatagctcacccgcccctgcgcagccaaaaaaggaaagttctccaaagtcacaagattccgtttctagcccgtcccctcaaaaacagaagagtgcctccgctctgacatataccgcaagtagcacctctgccaagaaggcctccgggccagctacacggagcccattccccccagggaaatcaaggacctccgatcattctctgtcgcgggagggatccaggcagtctctgggaagcgaccgagcttcagctacctcgaccagcaagccgaactctccacgggtgtcacaggcccgcgccggagaaggtcgcggggccggaaaacacgttaggtctagctccatggccagcctccgaagtccatcaacgagcatcaagagtggcttaaagcgagatagcaagtctgaggacaagggtctgtccttttttaaaagtgctcttcgacagaaggagacccgcaggagcactgatctgggaaaaaccgctcttctgagcaaaaaagcggggggctcgtcagtgaaatctgtttgcaaaaacactggagatgatgaagcagaacgtggtcaccagccgcctgcttcgcagcaacctaacgccaatacaaccggtaaagaacaattggtaacaaaggacccggcgtccgcaaagcactcgctgctgtcagctcggaaatcgaaatccagccagctcgattccggggtacctagctcgcccgggggcaggcagtcagctgaaaaaagcagcaaaaaactgtcctcttcgatgcagactagcgctaggcctagccagaagccccagtag

SEQ ID NO: 119669 - DNA, 951 bp, synthetic construct
  misc_feature 1..951: note = Description of Artificial Sequence: Synthetic coding sequence
  source 1..951: mol_type = other DNA
atgtcagccgaggtggagacctccgagggcgtggacgaatcggagaagaaaaactcaggggctttagagaaggagaaccagatgcggatggccgatcttagcgagctgctgaaagaagggaccaaagaggctcacgatagggcggagaacacccagtttgtgaaagactttttgaaaggtaatataaagaaggaactttttaagctggctacaactgcgttgtattttacctattctgccctggaagaggaaatggaaagaaacaaagatcaccccgctttcgcccccctctattttccaatggaacttcatcgtaaggaggccctgacaaaagatatggaatatttttttggagaaaattgggaggaacaggtgcaatgccctaaggcggcccagaagtacgtggagcgaattcactacatcggccagaatgaacccgaactgctggtcgcacacgcctatactcgctacatgggtgatctgagcggaggccaggtcctgaagaaggtggcacagcgagctttaaaactgccatccacaggtgaagggacgcagttttacctgttcgaaaacgtcgacaacgcccagcagtttaaacaactttaccgggctagaatgaatgccctcgacctgaatatgaagactaaggagagaattgttgaagaagccaacaaagcattcgagtataacatgcagattttcaatgaactggaccaggccggaagcacactggcccgggagaccttggaggatggctttcccgtgcacgatggtaagggggatatgaggaagtgcccattttatgctgccgagcaggacaaaggcgccctcgagggttcttcttgcccctttagaaccgctatggcagtgctgagaaaacctagcttgcagttcattctcgccgctggcgtcgcgcttgctgccggcctgctcgcatggtactatatgtag

SEQ ID NO: 119670 - DNA, 951 bp, synthetic construct
  misc_feature 1..951: note = Description of Artificial Sequence: Synthetic coding sequence
  source 1..951: mol_type = other DNA
atgtcagccgaagtggaaaccagtgaaggtgttgacgagtccgaaaagaaaaacagcggggcactagaaaaggagaatcagatgagaatggctgatctctctgagctactgaaggagggtacaaaggaggcacacgaccgcgccgagaatacacagtttgtaaaggactttctaaagggcaacattaaaaaggagctgtttaaactggccaccaccgctctatattttacttattcggcgttagaggaggagatggaaaggaataaagatcaccccgcgttcgcacccctctattttcccatggagctgcatagaaaagaggcactgaccaaggatatggagtacttcttcggggaaaattgggaagaacaggtacagtgcccaaaagcagctcagaaatacgtcgaacgtattcactacattgggcaaaacgaacctgagcttttggttgcccatgcctacacccggtacatgggagacttaagtggcggccaggtattgaagaaggtcgcacagagagccctgaagctgccaagcacaggtgaggggacccagttctacctctttgagaacgttgataacgcccagcagttcaagcagctgtacagagcgcgcatgaacgccctcgaccttaacatgaagactaaggaaaggatcgttgaggaggccaacaaagccttcgagtataacatgcagatattcaacgaactcgaccaggcaggctctaccctggcgagggagacgttggaggatgggtttcccgtacatgacggaaagggtgatatgcgcaaatgccccttttatgcagctgagcaggataaaggagccctggaggggagctcctgcccttttcggactgccatggcagtcctcagaaagccctccttgcagtttatccttgcggcaggtgtggccctcgccgccgggctgcttgcttggtactatatgtag

SEQ ID NO: 119671 - DNA, 951 bp, synthetic construct
  misc_feature 1..951: note = Description of Artificial Sequence: Synthetic coding sequence
  source 1..951: mol_type = other DNA
atgtctgcagaggtagaaacctctgagggagtggacgagtccgaaaaaaagaactcaggcgctcttgaaaaagaaaaccagatgcgtatggctgacctgagcgagttgctgaaggaggggaccaaagaagcccacgacagggcagagaatactcagtttgttaaagactttctgaaaggcaatattaagaaagagctattcaaactggcgactactgctctgtactttacctacagtgcactggaggaagagatggaacggaataaggatcacccagctttcgctcccctgtactttccgatggaactgcaccgcaaggaggccctgactaaagacatggaatacttctttggcgagaattgggaagagcaagtgcagtgccctaaagcggctcagaagtatgtggagcggattcactatatcgggcagaacgaaccagaacttctggtagctcacgcatatacacgctacatgggtgacctttccggaggccaagtcttgaaaaaagtggcccaaagggccctgaaactccccagtaccggagaaggcacccaattctacttgtttgaaaatgtggacaacgctcaacagttcaaacagttatacagggctaggatgaatgctctggatctgaatatgaagaccaaggagcggatcgttgaggaagctaacaaagctttcgagtataacatgcagatcttcaatgagctggatcaagcgggttccacgctggcacgtgaaactctggaggacggctttccagtgcacgatggcaagggtgacatgcggaagtgcccattctacgcggccgagcaggataagggcgctctggagggttctagttgccccttcaggaccgctatggcggtactacgcaaacccagcttacagtttattctcgccgccggtgtggctttggccgcaggactgctggcctggtattatatgtag

SEQ ID NO: 119672 - DNA, 951 bp, synthetic construct
  misc_feature 1..951: note = Description of Artificial Sequence: Synthetic coding sequence
  source 1..951: mol_type = other DNA
atgtccgccgaggtggagacctctgagggggtggatgaatcagagaaaaagaattcaggagcactggagaaggagaaccaaatgcggatggccgacctgtcggagttgctgaaggaagggactaaagaagcgcatgaccgcgctgagaatacacagttcgtcaaggattttctgaaaggcaatataaaaaaagaactctttaagctggccaccactgccctctacttcacttatagcgcactagaagaggaaatggaaaggaataaagatcaccctgcatttgccccgctttattttcctatggagctacatagaaaagaggccctgacaaaagatatggagtattttttcggtgaaaactgggaggagcaggtgcagtgccctaaggctgcccagaaatacgttgagaggattcattatatcgggcagaacgaacctgaattactggttgctcatgcctatacccgttatatgggggacttgagcgggggtcaggtgcttaagaaggtggctcaacgagcactaaagcttccaagtaccggcgaaggaacgcagttctatctctttgagaatgtggacaacgcccagcagtttaaacaactctatcgggcacggatgaatgccctcgacctgaacatgaagacgaaggagcgcattgttgaggaagcaaataaggcctttgagtacaacatgcagattttcaacgagctagaccaggctgggtccacactggcacgggaaacactcgaggatggattcccagtgcatgacgggaaaggtgatatgcgtaagtgcccattctatgctgctgagcaggataagggcgctctcgagggtagcagctgtccattcagaaccgcaatggctgttctgcggaaaccttccctgcagttcatcctggcggctggcgtggctctagcggcaggattgttggcctggtattacatgtag

SEQ ID NO: 119673 - DNA, 951 bp, synthetic construct
  misc_feature 1..951: note = Description of Artificial Sequence: Synthetic coding sequence
  source 1..951: mol_type = other DNA
atgtctgcagaagtggagacgagtgagggggtcgacgaaagtgagaagaagaactctggggccttggagaaggagaatcagatgcggatggcagacctttctgaactcctgaaggagggcactaaagaagcccatgatcgcgccgaaaatacacaatttgtgaaagatttcttgaaggggaacattaaaaaggagctcttcaagctggcgactactgcactgtatttcacctactccgctttggaagaagagatggagcgtaacaaagatcaccctgccttcgcccccctgtacttcccgatggagttacaccggaaagaagcactaaccaaagacatggaatacttttttggagaaaactgggaggagcaggtccagtgccccaaagctgcccagaagtacgtcgaaaggattcattacataggccagaacgaacccgagcttctcgtggcccacgcctacacccggtacatgggcgacctttcgggagggcaggtgctgaagaaggtggcacagcgcgcgctaaaactccctagtactggtgaaggcacccagttttacctgttcgagaacgtcgacaacgcccagcagtttaagcagctgtatagggctaggatgaatgccctggacttgaacatgaagaccaaggagagaatcgtggaggaggcgaacaaagcctttgagtacaacatgcaaatcttcaacgaattagaccaggccggtagcaccctcgctcgggagactttggaagatggctttcctgtgcatgatgggaagggggatatgcgtaagtgtccattctacgccgcggagcaggacaagggcgccctggaggggagctcttgcccctttcggactgctatggccgtgctccggaaaccatcccttcagttcattctggccgctggtgtcgctctcgcggctgggctcttggcatggtattatatgtag

SEQ ID NO: 119674 - DNA, 16908 bp, synthetic construct
  misc_feature 1..16908: note = Description of Artificial Sequence: Synthetic coding sequence
  source 1..16908: mol_type = other DNA
atgatctcttgggaggtggtgcataccgtgtttctgttcgctctcctgtattccagtctagcccaggatgcctctccacagagtgaaatacgcgccgaagagattcctgaaggcgcttccacactggccttcgtcttcgacgtgactggttccatgtacgacgacctagtgcaagtgatcgaaggagctagcaaaattctcgaaacttccttgaagagaccaaagagaccattattcaatttcgctctggtgccatttcatgatcctgaaattggccctgtgacaattaccaccgatcctaagaagttccagtatgagcttagagagctctatgtacaagggggcggagactgcccagagatgtctattggagctatcaagatcgcactggaaatatctctgccagggtcattcatttatgtctttacagatgcgcggagcaaggactacagacttacccacgaggtgctgcagcttattcaacaaaagcaaagtcaagttgtctttgtgctgactggcgactgtgatgatcggacccacataggatataaggtctatgaagaaatcgctagcaccagttcaggacaggtgtttcacttagataagaaacaggtcaatgaagtccttaaatgggtggaagaggccgtccaggcttcgaaggtacacctgttgtctactgatcacctggagcaggctgtaaacacatggcgcatccccttcgacccatccctgaaggaggtcacagtttctctcagcggccctagtcctatgatcgaaatccggaaccctcttggcaaactgattaaaaagggcttcggcttacacgagctcctgaacattcacaacagcgctaaggtcgtgaatgtcaaagagcccgaggccggcatgtggacagtgaaaacctcgtcatcaggacggcacagcgtgcggattacaggcctgtccactatcgacttccgtgccggtttcagtagaaagcccactctggacttcaagaagacggtgtcaagaccggttcaagggatcccaacctacgtattattaaatacttcggggatctcgacccctgcacggattgatctgctcgagctgctatcaatttccggctccagtctgaagaccattcccgtcaaatattaccctcacagaaaaccttatggcatttggaacatcagcgatttcgtcccgcccaatgaagctttttttcttaaagtcaccggatatgacaaggacgattacctctttcagagagtgtcttccgtgtctttctcatctattgtcccagacgccccgaaggtaactatgcctgaaaagaccccgggatactacctccagcctgggcaaattccttgtagtgtggatagtctccttcctttcactctgtcctttgtccgcaatggcgtaacactgggcgttgaccagtatctgaaagaatccgcctctgtcaatttagatattgccaaggtgactttgagtgatgagggcttctatgagtgcattgcagtctccagcgccggcaccggtagagcacaaactttcttcgacgtatccgaaccaccccctgtcatacaggtgcctaacaatgttacagtgaccccgggcgaaagggctgtgcttacctgcctcattattagcgctgtggattacaacctaacatggcagagaaacgatagggacgtgcggcttgctgagccagcccgcattcggaccctggctaatttatccctggagttgaagtcggtaaagtttaatgatgccggggagtaccactgcatggttagttctgaaggtggatctagcgctgcctctgtcttccttactgttcaggaaccacctaaggtgaccgtgatgccgaaaaaccagtccttcacgggtggtagcgaggtgtcaattatgtgttccgctacaggatatccaaagcccaaaattgcgtggaccgtgaatgatatgttcatcgtcggttcacatagataccgaatgacttccgacggcactctattcatcaagaatgctgcccctaaagatgcggggatctacgggtgcctcgcttccaattctgcaggaacagacaaacagaacagcacacttcgctatattgaggcacctaagctcatggtggttcagtccgagctgctcgtcgctctaggagacataaccgtaatggaatgtaaaacctctggtataccccctcctcaggtgaagtggtttaagggcgacttagaacttaggccaagcaccttcctgattatcgacccgctccttggacttctaaagatccaggagacccaggatctggatgctggtgactatacatgcgtggccataaatgaagccggacgggctacgggtaaaatcactttagacgtgggatccccccccgtgtttatccaagagcctgctgacgtcagcatggagatcgggagtaatgtgaccctcccatgttacgtccagggatatcctgagcctactattaagtggcggcgactggataacatgcctatcttcagcagacctttttctgttagctctatttcacagctccgcacaggcgctctgtttattctaaacctctgggcatccgataagggtacttatatctgcgaggccgaaaaccagtttggtaagatccaaagcgaaactacagtgacggtaacagggctggtggcccccctgatcggaatatcaccttcagttgcgaacgtcatagaaggccagcagttgaccctgccttgtaccctactggctgggaaccccatccctgagcgccggtggattaagaacagcgctatgctgctccagaatccatatataaccgttcgcagcgacggaagtctacatattgaaagagtgcagctgcaggatggcggcgaatatacttgtgtcgcctctaacgtcgccgggaccaacaataagaccacgtccgtggtcgtgcatgtgttgcccaccatccaacatggacagcagatcctgtctaccatcgagggaatcccagtgactctgccctgtaaggctagcggaaaccctaagccatctgtaatatggtcaaagaaaggtgagctcatatcaacctcctcagccaagttctccgccggagcagatgggtccttatatgtggtgtcaccgggaggagaagaaagcggggaatatgtgtgtaccgctactaacactgccggttatgccaagagaaaagtgcagctgactgtctatgtgagaccccgcgtctttggcgatcaaagggggctgtcgcaggataagccagtagagatttcagtacttgctggggaggaggttacactgccttgtgaggtgaagtccctgcctcctcccatcattacttgggccaaagagacccagttgatttctcctttttcaccacgacatacctttctgccaagcggttccatgaagatcactgaaacaagaactagcgactccggtatgtatctgtgtgtcgcaactaacattgccgggaacgtgacacaggccgtcaagttaaatgtgcatgttccccctaagatccagagggggccgaagcacctgaaggtccaggtcggccagcgtgttgatattccctgtaacgcccagggaactccccttccagtaattacctggtccaaaggaggttctactatgctggtcgatggagaacatcatgtgtccaaccctgacggtactctcagcatagaccaggcaacccctagcgatgctggcatctatacatgtgttgccaccaacattgccggcacggacgaaacagagataaccttgcacgtgcaagaaccgcctacagtcgaagaccttgaaccaccctacaatacaacctttcaagaaagggtggccaaccagaggatcgaattcccttgccctgcgaaagggacaccaaagcccaccattaaatggctgcacaatggtagagaactgaccggtagggaaccgggcattagtatccttgaggatgggacactcctcgtgattgccagcgtgactccatacgacaatggcgaatatatttgcgtggccgtcaacgaggctgggaccaccgaacggaagtataatttgaaggttcatgtgcccccagttatcaaggataaagaacaagtgacgaatgttagcgtgctcctgaatcaactgacaaaccttttctgtgaagttgaggggactccaagtcccatcatcatgtggtataaggacaacgtgcaggtgaccgaatccagcaccatccagaccgtaaataacggaaagatactgaagctgtttagggccacccccgaggatgcaggaagatactcttgcaaggcaattaatatcgcaggaacctctcaaaagtatttcaacattgacgtcctcgtgcctcccactatcatcgggactaacttcccaaatgaagtgtcagtagtcctcaatagggatgtcgctctggaatgccaggtcaagggtactccgttcccagatatccattggtttaaggatggtaaacctctattccttggcgaccctaacgtagagctgctagacaggggacaggttttgcacctcaagaacgcaagacgaaacgataagggccggtatcagtgtacagtcagtaatgcagctggtaagcaggccaaggatatcaagctcaccatctacattccgccttctatcaaaggtggtaacgtaaccactgacatcagcgtccttattaactctctgatcaaactggagtgtgagacacgcggactccccatgccagctatcacctggtacaaggacgggcagcccatcatgagttcctctcaggccttgtacattgataaagggcagtatctgcatatcccccgcgcacaggtgtctgattcggccacatacacttgtcatgtggcaaatgtagccggcacggctgagaagtcattccatgtggacgtgtatgttcctcccatgatcgagggaaatcttgccacgcccttgaataaacaagtagttatagctcattccttgacgcttgagtgcaaggcggctgggaacccttctcctattctcacatggttgaaggatggagttcccgttaaggcgaacgacaatataagaattgaagctggaggaaagaagctggagatcatgtctgcccaagagatagatcgggggcaatacatctgtgttgccacctctgtagccggcgaaaaggaaattaaatatgaagtcgatgttctcgtcccccccgctatcgaggggggggacgaaactagctactttatcgtaatggtcaacaacctgctcgaactggattgtcatgtaactggctccccacccccgaccatcatgtggctgaaagacggtcagctgatcgacgaacgggacgggttcaagatcttgttgaatggacggaagctcgttattgcgcaagctcaagtgagcaatacaggcctgtaccgatgtatggctgctaacactgccggagatcataaaaaggaattcgaggttacagtgcacgtgcctcctactattaagtcttccggtttgtccgagagggtggttgtaaagtacaaacctgtggcactgcagtgcatcgctaatggaatccctaacccttctatcacttggctgaaagacgatcaacccgtgaacaccgcacagggaaacctgaagatccagtctagcgggcgtgtcctgcaaatcgcgaaaacattgttagaggacgccgggcggtacacttgcgtagccacaaatgctgctggggagacacaacagcacattcaactgcacgtccatgagccaccctctttggaagacgccggcaagatgctgaacgaaacagtcctcgtctccaaccctgtgcagctagaatgcaaggctgctggcaaccctgtgccggtcatcacttggtacaaggacaataggctcttgagcggatccacttctatgacctttctgaatagagggcagattatcgatattgaatccgcacaaatttctgatgccggcatttataagtgtgtcgctataaacagcgctggcgctactgaactgttctactctcttcaggtacacgtcgcacctagcatttccggctctaataacatggtagctgtggttgtcaacaacccggtgaggcttgagtgcgaagccagaggcatccctgccccgtctcttacttggttgaaggacggttcccccgtgtctagtttctctaacggtctccaagtgctttccggcggcagaatcttggcactgacatccgcacagatcagcgacaccgggagatacacatgtgtggcagtgaatgccgccggtgagaaacagcgggatatcgacttgagagtgtacgtcccaccaaatattatgggcgaagaacagaatgtatccgtgctgatcagtcaggcggttgagctcctgtgtcagagtgacgctatcccaccccccaccctgacttggctgaaggacggtcacccactactcaagaagccgggactcagcatatccgagaacagatctgtgctgaaaatagaggatgctcaggtgcaagatactggcaggtatacctgtgaggctacgaatgttgcgggaaagaccgagaagaattacaacgtcaatatctgggttccgcccaacattggaggctccgacgagctgacgcaactgacagtaattgagggcaacttaatttccctgctgtgtgaatcctccgggatcccgccccccaacctgatctggaagaagaaagggtctcctgtgctcaccgactctatgggtagggttagaatcctatccgggggcagacaactgcaaatctccatcgcggagaagagcgacgccgccctgtactcctgcgttgccagcaacgtagcaggcaccgccaagaaagagtataacttacaagtctatattcgaccgaccatcacaaatagcggaagccacccaacagaaattattgtgacgagaggcaaatccatttcactggagtgtgaagtgcagggtatcccaccaccaactgtgacgtggatgaaggatggccatccattgatcaaagctaagggggtcgagattttggacgagggccacattctgcagctgaaaaacattcacgtctccgacactggccgatatgtttgcgtggcagtgaacgtggcggggatgactgacaagaagtatgatctcagcgtccatgccccacctagcataatcggcaatcacaggtctccagaaaacatctccgtcgtagagaaaaattctgtttctttaacttgtgaggccagcggcattccgttacctagtattacgtggtttaaggatgggtggcctgtctcactttcgaattccgtacgtatcctcagtgggggaagaatgttgcgtctgatgcagaccactatggaggatgccggacaatatacatgcgtggtcagaaatgccgccggggaggagcgcaagatttttggactgtccgtcctagtccctcctcatatcgtgggcgaaaacactcttgaagatgtgaaagtgaaagaaaagcagagcgtgacgcttacgtgtgaggttactggcaatccagtccctgaaatcacatggcataaagacgggcaacctctccaggaggatgaagcccatcacattattagcggtggacggtttctgcaaataaccaacgtacaagtcccccatactggacggtatacctgcctggcctcatcccccgcggggcacaagtcaagaagcttctcgctgaacgtcttcgtgtctcccactattgcaggggtgggctcagacggcaatccagaagacgtgaccgtgatcctgaactctccaacatcgctggtctgcgaggcctattcttacccacctgccactattacctggttcaaagacggtacccccctcgaatctaaccgcaacatccgtatactcccagggggaagaacactgcagatcttgaacgcgcaggaggataatgcgggtcgatactcttgcgttgccactaatgaagccggcgaaatgattaagcactatgaggtgaaggtttatatacctcccattattaacaagggagacctatggggtcctgggttaagtccaaaagaagtcaaaataaaggtcaacaataccctcactctggaatgcgaagcttatgccattccatccgccagcctgagctggtacaaggacggccagccacttaagagcgacgaccacgtgaatattgctgccaatggtcataccctccagatcaaggaggcacagatatctgacactggcagatacacttgcgtcgcaagtaatatcgctggggaggacgagcttgatttcgatgtcaatatacaggtcccaccatcctttcagaaactgtgggagattggaaacatgttggatacgggcagaaatggggaggcaaaagacgttattatcaacaatccaatatctttatattgcgaaactaacgccgcaccgccacctaccctgacctggtataaggacgggcacccactaacatccagtgacaaagttctgatattacctggaggcagggtcctccagattcctcgtgccaaggtggaggacgccgggagatatacctgcgtggctgtgaacgaagccggagaagattctctccagtatgacgtacgtgtcttagtccccccaattataaaaggcgctaattctgatctgccagaagaggtgactgtactggtgaacaagtctgctctcatagagtgcttgagcagcggctccccggctcccaggaacagctggcaaaaggacgggcagcccctcctggaggatgaccaccacaaatttctgagtaatggacgaatcctgcaaatcctgaatacccaaattacagacatcggccgctatgtctgcgtagccgagaacactgctgggtctgctaaaaaatactttaatctaaacgtgcatgtgcctccctctgtaattgggccaaagtccgagaacctcaccgtggtggtgaacaattttatttcactgacttgcgaggtctctggtttcccacctcccgatctgtcgtggcttaagaatgagcaacctataaaacttaatacaaacacactgatagtcccagggggccggactctccagattatcagagcaaaggtgtcagacgggggcgaatacacctgcattgctatcaatcaggccggcgagtctaaaaagaaattctcattaacagtttatgtgcccccttcgatcaaagatcacgacagcgaatccctgagcgtggtaaacgtgcgagaaggcaccagtgtgtccctggagtgtgaatccaacgctgtgcctcctccagttatcacatggtacaaaaacggaaggatgatcaccgaaagcactcatgttgaaatcttggcggatggtcaaatgttgcacatcaagaaggccgaggtatcagacactggccagtacgtttgccgagccattaacgttgcaggccgagacgataaaaattttcatcttaacgtgtacgtgcccccatctatcgaaggccccgagcgcgaggtgattgtggaaaccatctctaatccagttactctgacctgcgatgctaccggaatcccacccccaacaatcgcttggctaaaaaaccataagaggattgaaaatagtgattcactggaggtcagaattctttctggaggttcaaagctccagatcgcaaggtctcagcactcggattccgggaactacacctgcatcgcatctaacatggagggaaaagcccaaaagtactactttctctcaatccaggtgcctcccagcgtggcaggggcagaaatcccctctgatgtaagcgtgctgctaggcgaaaacgtggagttagtgtgcaacgcaaacggcatccctaccccgttaatccagtggctgaaggatggaaaaccgatcgcctcaggcgagaccgaacggattagggtgagcgctaacgggtcaacccttaacatttacggtgcccttacatctgacacagggaagtacacttgtgtcgctacaaatcctgccggagaagaggatcggatctttaaccttaatgtgtacgtcacccctaccatcaggggcaacaaggacgaagcagagaaattgatgaccctggttgatacgtccattaatattgagtgcagggccactggaactccacccccgcagatcaattggctgaagaatgggcttccactgcccttgtcttcccatatcagactcctggctgctggccaggttatccgaattgtacgggcccaggtttccgatgtcgctgtgtatacctgcgtggctagtaatcgcgccggcgtggacaacaagcattacaatttacaggtgttcgccccacccaatatggacaactctatgggtactgaggagatcaccgttttgaaaggctccagcacaagtatggcttgtatcaccgatggaactccagcaccatccatggcatggttgagagatggccagccgctaggcttagacgcccatctcacggtgagcacccacggtatggtcttacaactgctgaaggccgaaacagaggactcgggtaaatacacatgcatcgcaagcaacgaggccggtgaagtgagtaagcatttcatcctaaaagtgcttgaaccaccccacattaatggcagcgaagaacatgaggaaatatctgtgatagtgaataacccactggagctcacctgcattgcctctggtataccagctccaaagatgacctggatgaaagacgggaggcctctgccccaaaccgatcaggttcagactctgggaggaggcgaagtactgagaatatctaccgctcaggttgaagacaccgggagatacacttgccttgccagcagcccggctggagacgatgataaagagtacctcgtgagggtgcatgtgccgcccaatatcgccggcaccgatgaacccagggacatcaccgtattacggaacaggcaggtgacgctcgagtgcaaatctgacgccgtaccaccccccgtaattacttggctccgtaacggcgagcggcttcaggccactcctagagttcgcattctaagcggagggagatatctccagataaacaacgcggacctcggtgacactgctaattacacttgtgtcgcttcaaacattgcgggtaagaccacacgcgaattcatcctgaccgtgaatgtccccccaaacatcaagggtgggcctcaaagcctggtgattctcctaaataagtctacagtcctggaatgtatagcagagggcgtcccaacaccccggattacatggcggaaagatggcgctgtgctggcaggcaatcacgcacggtattctattcttgagaacggatttctccatattcagagcgcccacgttacagacactggtcgctatctctgtatggccaccaacgcagctggcactgatcggcggcggatcgatctacaggtgcatgtgccaccgagtatagccccagggccaaccaatatgactgtaattgtgaacgtccagactaccctggcctgcgaggccaccgggattcccaagcctagcattaactggcgaaagaatgggcacctgctcaacgtcgaccagaaccaaaactcgtaccgactgctttcctctggttctttagtcattatttctccatctgtcgacgatactgcaacttatgaatgtactgtcacaaacggcgccggggacgataaacggactgtggatctgacagtgcaggtccctccgtccattgccgacgaaccaaccgactttctagtaacaaagcacgcaccagccgtgatcacatgtacagcttcaggggtaccctttccgtccatccattggaccaaaaacggaatcagactcctgccacgtggagacggttaccgtatcctctcctcaggtgccatcgaaatcctggccacccagctgaaccacgcaggtagatatacctgtgtcgctcggaatgctgctggtagtgcacaccggcacgtgactttacatgtgcatgagccacccgtgatccagcctcagccctcggaactgcacgttatcctgaacaacccaattctgctgccctgtgaggctacagggaccccatcaccatttattacatggcagaaggagggaatcaatgtaaacacttctggacgaaaccacgcggtgctgccgtcaggcgggctccagatatcccgagccgttcgcgaagacgccggcacgtatatgtgcgtggctcagaatccagccggtacagccctgggtaaaattaaattgaatgttcaggtcccccccgtcatttccccacacttgaaagagtatgtgatagcggtggataagccgatcactctctcttgtgaggcagatggactgcctcccccagacataacttggcacaaagacggcagagccattgtcgaatcaattcgccagcgcgtgctctccagcgggtcattgcaaatcgccttcgttcaacccggtgatgcgggtcactatacctgtatggctgccaacgtggcaggctcctcatctacctccaccaagctcactgtgcacgtgccgccccggataaggtctaccgaggggcattataccgtgaacgaaaacagccaggccattctgccatgcgtggccgacgggatccctactccagccattaactggaagaaagataacgtgctactggctaatttgctaggtaaatacacagccgagccatatggggagctgatcctcgagaatgtggttctggaagactcaggcttttatacctgtgtagccaacaatgccgcaggagaggacacgcatacagtttcactgactgtgcatgtgctgcccacattcacagagctgcctggcgatgtgtccttgaataagggagagcagctaaggttaagctgtaaggccacaggtatcccattgcccaagctgacttggacattcaacaataatattatccctgcccactttgatagcgttaacgggcacagtgaactggttattgaacgtgtgtcaaaggaggactccggtacctacgtgtgcaccgccgagaacagtgtcgggtttgtcaaagccatagggtttgtgtatgtcaaggagccgcccgtgtttaagggagactatccttccaactggatcgaacctctggggggcaatgctatactgaactgcgaagttaaaggcgaccccacccccacaatccagtggaaccggaaaggagtcgatatcgaaatcagccatcgcattaggcagttgggtaatggatctcttgctatatatggtacagtgaatgaagatgctggtgattatacctgcgtggcgactaacgaggcaggcgtggtcgaaaggagcatgtccctaactctacaaagtccccccattatcactcttgagccagtggaaacggtcatcaatgccggcggaaagatcatattgaactgccaggcaaccggcgagccccaacctaccattacctggtctcgtcagggacacagcatcagttgggatgatagagtaaacgtgctgtcaaacaactcactgtatattgccgacgctcagaaggaagataccagtgaattcgagtgcgtcgctagaaatttaatggggagtgttctcgtccgtgtcccagtaatagtgcaggtgcatggcggcttttcccagtggtcagcttggcgcgcttgtagtgtaacatgcgggaagggtattcagaagaggagcaggctgtgcaatcagccactgccggcaaacggggggaagccctgccaaggatccgacctggagatgcgcaactgccagaacaagccgtgccctgtggatggatcatggtccgagtggagtctgtgggaggagtgcactagaagctgtggtaggggaaatcagacgagaacaagaacctgcaacaacccctctgtccagcacggcggccgcccttgtgaagggaatgcagtggagattatcatgtgtaacattaggccatgccctgtccatggcgcttggtctgcatggcagccttggggaacttgcagtgagtcttgtggcaagggcacacagaccagggctaggctatgtaacaacccgcctcctgccttcggaggttcttattgtgatggcgccgagacacagatgcaggtgtgtaatgagcggaactgtccaattcatgggaagtgggccacatgggctagctggagtgcctgcagtgtgtcatgcggcggcggcgcccgtcagagaacccgaggctgcagcgacccggttccgcaatatggaggccgcaaatgtgagggtagtgatgtccagtccgacttctgcaatagtgatccctgtcctacgcacgggaattggtctccctggtccggatgggggacctgttcacggacctgcaacggaggtcagatgcggaggtacagaacgtgcgacaacccccctccctccaacggcggcagggcctgcgggggcccagactcccagatccagcgatgcaatacagatatgtgtcccgtcgatgggtcatgggggtcttggcattcttggtctcagtgctcggctagctgcggaggaggagagaagactcggaagagattgtgtgaccatcctgtgcctgtaaaaggtggccgaccctgccccggcgacacaacccaggtgacccgatgcaacgtacaggcatgtccaggaggacctcagcgcgcccggggaagcgtcattggcaacattaacgatgttgagttcgggatcgcctttcttaacgcgacgattaccgattcccctaattctgacacccgcatcattcgggcaaagattacaaatgttccgcgttctctggggtcagcgatgaggaagatcgtgagcatcctgaacccaatctactggacaacagccaaggagattggcgaagccgttaatggctttacactaacgaatgccgtattcaagagagaaacgcaagtggagttcgctacaggcgaaattttgcaaatgtctcacatcgccagggggctggattctgacggatctctgctgctggacattgtcgtatcagggtatgtccttcaactacagtcgcccgcggaagtgacagtgaaggactatacggaagattacattcagaccgggccaggtcagctatacgcatactcaactaggttgtttactatcgatggaatctcgatcccctacacttggaatcacactgtcttttacgaccaggcacagggtcggatgccctttctggtggagaccctgcatgcaagttccgttgagtccgactataatcagattgaagaaactttaggttttaagattcacgcatcgattagtaaaggagaccggagcaaccagtgcccatcaggatttacgcttgactccgtgggccccttctgcgccgatgaagatgagtgcgccgcaggcaacccttgctctcactcctgtcacaatgcaatgggaacttattactgctcctgtcccaaaggactgactattgccgccgatggtcggacatgtcaggacatcgatgagtgcgctctgggccgccacacgtgtcatgctggacaggattgcgacaacaccattggcagctaccgatgtgtggtgcgctgtgggtctggctttcggaggacctccgatgggctgagctgtcaggacatcaatgaatgccaggaatcaagtccctgtcaccagaggtgcttcaacgccattggctccttccactgcgggtgcgaaccaggttatcaattgaaaggtcgcaaatgtatggacgtcaacgaatgcagacagaacgtgtgtcgccccgatcaacactgcaaaaacacccgtggaggctacaaatgtatcgatctgtgtccaaatgggatgaccaaagcggagaacggtacatgcatcgacatagatgaatgcaaagacggtactcaccagtgtcggtacaaccagatatgcgagaatacaagagggtcataccgatgtgtctgccctcgtggctacaggtcccagggggttggtcgcccttgcatggacataaatgagtgtgagcaagttcctaaaccctgcgcccaccagtgctcgaatactccgggatcgtttaagtgcatctgtcccccaggacagcacctcctgggcgatggtaagtcctgcgcaggcctggagaggttgccaaattatggaacacagtacagcagttataacctcgcccgcttctccccagtccggaataactatcaaccccagcaacactaccgacagtactctcacctgtattcctcctacagtgagtatcgaaacagtagaaccagcctatcccgcactcgcaggaccatacgcaagacttgccccgagggctccgaagcttcacatgacacctgtgttgacatagacgaatgcgagaacaccgacgcctgccagcacgagtgtaaaaatactttcggtagctatcagtgtatttgcccccccggctaccaactaacccacaatggcaaaacttgccaggacatagatgagtgtctggaacagaatgtccactgcggcccgaatagaatgtgctttaacatgcgcggcagctaccagtgtatagataccccatgcccacctaactatcagcgggacccagtgagtgggttttgcctcaaaaactgtcctcccaacgacctggaatgcgctctaagtccatatgcactagagtacaagctggtgtctctgcctttcgggattgccacgaatcaggacctgatccgactagtggcatacacccaagatggcgtcatgcatccacgtactacctttctgatggtggacgaagaacagaccgtgccttttgcattacgggacgaaaatctcaagggtgtggtgtacactacacgcccgctgcgcgaggcagagacctacaggatgcgggtacgcgcttcgtcctactcagccaacggtactattgaataccagaccactttcatcgtgtatatcgccgtgtctgcttacccctattag

SEQ ID NO: 119675 - DNA, 16557 bp, synthetic construct
  misc_feature 1..16557: note = Description of Artificial Sequence: Synthetic coding sequence
  source 1..16557: mol_type = other DNA
atgatctcctgggaggtcgtgcacacagttttcttgttcgcattactgtattcaagtctcgcacaggatgcgtcaccacaaagtgaaatacgggccgaggaaataccagagggcgcttccaccctggccttcgtcttcgatgtgacaggttccatgtatgatgatctcgtgcaggtaatcgagggcgcatctaagattctggaaacgagcttgaagaggccaaagaggcccttgtttaacttcgctctggtgccattccatgatcccgaaattggccctgtgacaattaccacggatcctaagaaatttcaatacgaactgagggagctgtatgtgcaagggggaggggactgccccgaaatgtccattggggccatcaagatagcactcgagatttccctgcctggttccttcatttacgtgtttaccgacgcccgaagtaaggactataggctaactcacgaggtgctgcaactcatccagcagaagcagtcacaggtcgtgtttgttcttactggagactgtgatgatcggacacacatcggttacaaagtgtatgaagaaatcgccagcaccagctccgggcaggttttccacctggataagaaacaggtgaacgaggtcttaaaatgggtggaggaagcagtgcaagcttctaaagtgcatctcctctccacagatcatctggagcaggccgttaacacatggagaatccctttcgatccttccctgaaggaggtcacagtctccctgtccggcccgagtcctatgattgaaatccgtaatcccctaggaaaattaatcaaaaaggggtttgggcttcatgaattgctgaatattcacaattcagctaaggtggtcaacgttaaagagccagaagcaggtatgtggacagtgaagacctcgagctcaggccgtcatagcgttcgcatcacaggtctgagcactatcgatttcagggcagggttcagccggaaacccaccttagactttaagaaaacagtcagccgtcctgtgcaaggaatcccaacatacgtcctgctgaacacatctggcatttccactcctgctcgcatcgacttgttggaacttctgagcatctcggggtccagtctaaagaccattcccgtcaagtactaccctcatcgcaagccctacggcatctggaatatcagcgatttcgtgccaccaaatgaggccttcttcctgaaggtcaccgggtacgacaaggatgattaccttttccagagagtgtcctcagttagcttttccagcatagtgcccgacgcccccaaggtcacaatgcctgaaaaaacacctgggtattatttgcagccaggccagatcccttgttcggtggactccctgctgccttttactttatcctttgtgaggaacggggtgaccctgggggtggatcagtatctaaaagaaagcgcctcggtgaaccttgacatagctaaggtgacactcagtgacgagggcttctacgaatgcattgccgtgtcatccgcaggaaccggccgagcccaaacgtttttcgacgtttctgaaccgcctcccgtgatccaggtgcccaataatgtgaccgtgacacctggagagcgagcagtcctgacttgcttgatcatatcggccgtcgactacaatctcacctggcagaggaacgaccgcgatgtcaggctggcggaaccagcccgcatacggacactcgcaaatctgagcctggagctgaagagtgtgaagttcaacgacgccggcgagtaccactgcatggtgagttccgaaggagggtcctcagccgctagtgtgttccttacagttcaggaaccacccaaagtcactgtgatgcctaagaaccagtccttcactggtggctctgaggtgagtataatgtgctctgctacagggtatcctaagcccaagatcgcgtggacagtgaatgacatgttcatcgtgggatctcaccgatatcgtatgacatctgacggcactctatttatcaagaatgctgcgccaaaggacgccggaatctatggctgtctcgcctccaactccgccggcacagacaaacagaacagcaccctgcggtatattgaagcccccaagctgatggtggtgcagagcgagctgctcgtagccttgggagacatcacggttatggagtgcaaaactagcgggatcccacctcctcaagttaagtggttcaaaggcgatctggagctgcgcccctctacattcctgatcatcgatcccctactgggactgcttaaaattcaggagacacaggacctcgatgcaggagactacacttgcgtggctattaatgaagcgggcagagcgacaggaaagattactttggacgtcggcagtccgcccgtgtttatccaagaacctgccgacgtgtctatggagatcggaagtaacgtgactctgccctgctacgtgcagggttatcctgagccaactatcaaatggcggcgactagataacatgccgattttttcacggcctttttccgtgtcaagtatatcccagttaaggactggcgctctttttattctcaatctctgggccagtgacaaagggacttatatctgtgaggccgagaaccaatttggcaagattcagagcgaaacaacagtgaccgtcaccgggttagtggcacccttgatcggtatatcaccatccgtggcgaatgttattgaaggtcagcagctgacacttccctgtaccctgctcgccggtaatccaattccagagcgcaggtggatcaagaattcagctatgctcctgcaaaacccctatattacagttaggtccgacggctctctccacatagaacgggtgcagttgcaggacggaggcgaatacacatgcgtggcgtccaacgtggccggcacaaataataaaaccacttctgtagttgtccatgtgctcccaactatccagcatgggcagcaaatattgagtacgatcgaaggcatccctgtgacccttccgtgtaaagcctctggcaaccccaagccttctgtgatctggtccaagaagggcgaactaatcagcacctcgtccgccaagttcagtgccggggcagatggttcgctctacgtcgtgtcaccaggcggggaggaatctggtgagtacgtctgcactgcaaccaacacagccgggtatgctaaacgcaaagtgcagctgacggtctacgtccggcctcgagtgtttggggaccagagaggcctcagccaagataagcccgtggaaatttccgtcctagcaggggaagaagtgactttgccgtgcgaagtgaagtctctcccgccacccattattacttgggctaaagagacgcagctcatcagcccctttagtccacggcatacctttctgcctagcggtagcatgaaaatcaccgaaactcggactagtgactcaggaatgtacttatgcgtcgctaccaacatcgctggcaacgtgacacaggccgtgaagctgaatgtgcacgtgcccccaaagattcagcggggccctaagcatttgaaagtgcaagtgggccaaagggttgacataccttgcaatgctcagggcactcctcttccagtgattacatggtcaaaagggggatccacgatgctggtcgacggtgagcatcatgtgtcaaatcccgacgggacacttagcattgaccaagcaaccccaagcgacgcgggtatctacacctgtgtggctaccaatattgcaggaactgatgagaccgaaattactttgcacgttcaagagccccccactgtagaggacctggaacctccatacaatactacatttcaagagcgcgttgccaaccagaggattgaatttccttgtcctgcaaaaggcactccaaaaccgaccatcaagtggctgcacaacggcagagaactgaccggccgcgagcctggcatctccattctcgaagacggcaccctcctggtaatagcaagcgttaccccctacgataacggtgaatacatttgtgtggccgtgaacgaggctggtaccactgagagaaaatacaacttgaaggtccatgtgccccctgtcatcaaggacaaggaacaggtcactaatgtgtcagtgctgctcaaccagcttactaatctcttttgtgaggtagagggaacaccatcacccattataatgtggtacaaggacaacgtgcaggtgacggagagctcaaccatccaaaccgtgaacaacgggaaaatcctgaaactatttcgggccaccccagaagatgccggcaggtactcatgtaaagccatcaacatagcggggactagccagaaatactttaatattgacgtactcgtcccaccgaccatcataggcaccaatttcccaaatgaagtgtcagtcgtcttgaacagggatgtggccctggaatgccaagtgaagggcacaccattccccgacatccactggtttaaggatggaaagcctttattcctgggcgacccgaatgtcgaattgctggatcgcgggcaggtacttcaccttaagaacgcccgccgcaacgacaaaggtcgctatcaatgtaccgtgtcgaacgccgctggtaagcaggccaaggatatcaagctcacaatttatattcccccctccatcaaaggcggtaacgtgaccactgacataagtgtgttaattaactcgctcataaaactggagtgcgagaccagaggtcttccaatgcctgcaatcacctggtataaagacggacagcctattatgagttcttcccaggcactctacatagacaagggccagtacctccacatccccagagcccaggtttccgacagtgccacctatacctgtcatgttgccaatgtggctggcacggccgagaagagctttcatgtggatgtttatgtccctccgatgattgagggcaacctggccacccccttaaacaagcaggtggtgattgcacactctttgaccttggagtgtaaagctgctggcaacccctctccaattctcacatggcttaaggacggcgtccctgtcaaagccaacgacaatattaggattgaggccggcggcaaaaaattggagatcatgagtgcacaggagatagatcgcggacaatatatatgcgttgccacttcggtcgcaggtgagaaagagatcaaatatgaggtcgatgtccttgttccacctgctattgaaggcggcgatgagaccagttacttcattgtcatggtgaacaatctgctggagctcgattgtcacgtgaccggctccccccctcccaccattatgtggctgaaggatggacagcttattgatgaacgcgatgggttcaagatcctgcttaacggcagaaaactcgtcatcgcccaggcccaggtgagtaatacaggcctgtacaggtgtatggccgccaatactgcaggagatcacaagaaagagttcgaagtgaccgtccacgttcccccaactattaagagctccgggctgtccgaaagagtggtggtcaaatacaaaccagtcgccctccagtgtattgccaacggtatccctaaccccagcattacatggctgaaagacgaccagcccgtgaacactgcacaaggaaatctgaaaatccaaagctcagggcgcgttctgcagatcgctaaaaccttgttagaggatgccggacgatatacatgtgtagcaacaaacgcagcaggcgagacacaacagcacatacagctccacgtacacgagccccccagccttgaggatgccggcaaaatgctgaatgagaccgtgctagtgtcgaaccctgtgcagctggaatgcaaagctgccggtaatccggtgcctgtgatcacctggtataaggataatcgactgttatccggctccacttccatgacttttctaaatcggggccaaattatcgacattgagtccgcacagatcagtgatgcaggcatttataagtgtgtcgccataaactctgcaggcgctacagagctcttttactccctgcaagttcatgtggccccaagtatctctggctcaaataatatggtcgctgttgtggtgaacaacccagttcggctagaatgtgaagctcggggcattcctgctccaagtttaacctggttgaaggacggcagccccgtttcttccttttctaacggcctccaggtgcttagcggcggtagaatactcgccctcacatctgctcagatcagcgacacgggccggtatacctgcgtggcagtgaacgcagccggcgagaaacagagggatatcgatctacgagtctacgttccccctaatatcatgggagaagagcaaaatgtgtctgtcttgatttctcaggcggttgaactgctctgccagagtgacgcaataccccctccgaccctgacctggcttaaagacggccatcccctgctcaagaagccaggcctgtcaattagtgagaatcgcagtgtgctcaagattgaggacgcccaagttcaagacacaggccgatatacatgcgaagcaaccaatgtggcaggcaagaccgaaaaaaattataacgttaacatctgggtacctcccaacatcggcgggtctgacgagttgacacagttaacagtgattgaaggcaatctgatttcactgctatgtgagtcatctgggataccccctccaaatctcatatggaagaagaaaggctccccggtgctgaccgatagtatggggcgagtgcggattctctccgggggccggcagttgcagatctcgatcgccgaaaagtcagacgcggctctttacagctgtgttgcttccaacgtggcgggaacagctaaaaaggagtataacctccaggtgtacatccgacctaccataacaaacagcggcagccaccctactgaaatcatcgtgactagggggaagtccattagcctggagtgtgaggtgcagggcatccctccccccacagtgacttggatgaaagacggacatccccttattaaggcaaagggtgtcgagattctggatgagggacacatcttgcagctgaaaaatattcacgtgagcgacacaggtcgctatgtgtgcgtcgccgtgaatgtggcaggaatgacagataagaagtatgatctgagcgtacacgcgccaccttcgatcattggcaaccacaggtcccccgagaacattagtgttgtggagaagaattctgtctcattgacctgcgaggccagcggcatcccactcccttccattacctggtttaaggatggctggccagtcagcctttcaaacagcgtcaggattctgtctggcggccgcatgttgagactgatgcaaaccacgatggaggatgccggacagtatacctgtgtagtccgcaatgctgctggtgaggagcggaagatctttggcctctcagttttagtgcctccgcacattgtgggcgaaaatacgctggaagacgtgaaggtcaaggagaaacagagcgtgacactgacttgcgaggtgaccgggaatcctgtgcctgagatcacctggcataaggatggacagccactccaagaggatgaggcccaccacatcatctcagggggccgattccttcaaataacgaatgttcaggttcctcatactgggagatatacatgcctggcttccagcccggccggtcataagtcaagatctttttctttgaacgtgttcgtgagccctacaattgcaggagtgggcagtgatggcaatcccgaagacgtcactgtaattcttaactcccctacctcattagtatgcgaagcttactcataccccccagctaccattacgtggtttaaggacggcacacccctggaaagcaacagaaacataaggatactgcccggcggccgcaccctccagatcctgaatgcccaagaagataacgcaggcaggtactcctgcgttgccaccaatgaggccggcgagatgatcaagcactacgaagtcaaagtctatatcccgccaattatcaacaaaggcgacctctgggggcctgggctctcccccaaagaagtcaaaatcaaggtaaacaatacactcactctggagtgcgaggcatacgccataccaagcgcatctctgagctggtacaaggatggccaaccgctgaagagtgacgatcatgtgaacattgcagcaaatgggcacacactgcagatcaaagaagcccagataagtgacaccgggcgttatacctgtgtggcaagtaacatcgccggcgaagatgaactggactttgacgtgaacatccaggtccctcccagcttccagaagctctgggagatcggaaacatgctggatactggcaggaatggggaagccaaagacgtgattattaacaaccccatctccctttattgcgagaccaacgccgcacctcctcccaccctcacttggtacaaggacggacacccgctgacaagctctgataaagtcctaattttaccgggcggtcgggtccttcaaatcccccgggcaaaggtagaagatgctggacgatatacatgcgtcgcagtaaacgaggccggggaggatagcctccagtacgatgttagggtgttagttccgcccatcattaagggggctaactctgatttgccagaagaagtcactgtactcgtgaataaatcagctctcattgaatgcctgtcgagcggttctccagcaccgcggaatagctggcagaaagatggccagcctctgttagaggatgaccaccataagtttctctctaacgggcgtatactgcagatcctcaatacccaaatcaccgacattggccgatacgtatgcgtagctgaaaatacagccggcagcgccaagaaatacttcaatctgaacgtgcacgttcccccctctgtaattggcccaaaaagcgagaacttaaccgtggtcgttaacaattttatttcactgacctgcgaagtttccggctttccaccccccgacctgagctggctgaagaacgagcaacctatcaagctgaacacaaatactcttattgtgcccggcggccgaactttgcagattatccgtgcaaaggtgtccgatggcggagagtacacatgtatagcgattaaccaagcaggtgaaagtaaaaaaaagttctccctgactgtttacgttccgccaagtatcaaggatcatgacagcgaatcactgtctgttgtcaatgtgcgagagggcactagcgtctctttagagtgcgaatcgaatgccgtgccacctcccgtgataacatggtataaaaatggccgcatgatcaccgaaagcacacacgtggagatcctagccgatggccagatgctccacattaagaaggctgaggtgagcgacaccggtcagtacgtgtgccgcgcaatcaacgtggcaggacgggatgataaaaatttccatttgaatgtatacgtgcccccttcaatagaaggacctgaaagggaggtgatcgtcgaaacaatcagtaacccagttacactgacttgcgatgctactggcattcccccccccactattgcttggctaaaaaatcataaaagaatagagaatagcgactcactggaggtgagaatactcagtggggggtctaagctgcagattgcccgaagtcagcacagtgacagcgggaattacacctgcattgcgtctaacatggaagggaaggcccaaaagtattacttcctctctattcaggtaccaccgagcgtcgcaggagccgaaatcccatctgacgtatctgtgctgctcggagagaacgtggagcttgtatgcaacgctaacgggataccaactccactcattcagtggctgaaagatggcaagcctattgcaagtggagagacggaaaggattagagtcagcgccaacggctctaccttaaacatctatggagccctaacatccgacaccggaaaatatacatgtgtcgctaccaatccggctggagaggaagaccggatttttaatcttaacgtctacgtgactcccacaatccgcgggaacaaagatgaggctgaaaaacttatgactctggtagatacctcaataaacatagagtgcagggccaccggaaccccccccccccagataaattggctcaagaacggtctgcctctgcccctctcgtcacacattcgcctactcgcggccggccaagtgatccgcatcgtgcgggcccaggtatccgacgtggcagtgtacacctgtgtcgctagcaaccgggccggcgtggataataaacattacaacctgcaggtcttcgctccccccaacatggataattcgatggggactgaggagattaccgtactgaagggttcatcaactagtatggcttgcatcacagacgggacgcccgccccatctatggcttggctgagagacgggcagccgctcggcttggatgctcacctcaccgtctctacacatgggatggtccttcagctcctgaaagctgagaccgaggacagtggaaagtatacgtgtattgccagcaacgaagccggcgaagtgtctaagcattttattctcaaggtcctggaacccccacatattaacggttccgaggaacacgaggaaatctccgtgatagttaataaccctctggagctcacctgtatcgctagcgggattcctgcccccaagatgacctggatgaaggatggcaggcctcttcctcagactgatcaggtgcaaacattaggaggcggggaagtgctcaggatatcaaccgcacaggtggaagacaccggccggtacacttgcctggcgtcttctccggctggcgacgatgacaaggagtatctcgttcgcgtgcatgtaccacccaatatcgccgggaccgacgaacccagagatattacagttctgagaaataggcaagtgactctggaatgcaagagtgacgccgtgccaccccccgtaatcacatggcttagaaacggcgagcgcctgcaagccaccccacgagtgcggattctctctggagggcgttatttgcagatcaataacgcggatttgggtgatacagccaattacacctgcgtcgcatccaatatcgctggcaaaaccacacgggaattcatcctgaccgtgaatgtgcctcctaacatcaaagggggccctcagtctttggtgattctactgaacaaaagcacggttctggagtgtattgccgagggagtgccaacaccgcggatcacatggcgtaaggatggcgccgtgctggccggtaaccatgcacgctactcaatactagagaatggcttcttgcatatccagagcgcgcatgtcactgatacagggcgatacctgtgcatggctacgaacgccgctgggacagaccgacggcgcattgatcttcaggtccacgtgcccccctccatcgcaccggggcccacgaacatgaccgtgatcgtgaacgtgcagactacactggcttgcgaagctacgggcatcccaaaaccatccataaactggagaaaaaacgggcatcttctcaacgtggaccagaatcaaaattcttataggctgctcagctcaggaagccttgtgatcatttctccatctgtagacgacactgcaacgtacgagtgcactgtcacaaacggagccggtgatgacaaacgcactgtagatctgaccgtacaggtgcccccaagtattgcggatgaacctacagattttctggtgactaagcacgcgcccgccgtgataacatgcaccgccagcggtgtaccattccctagtattcattggacaaaaaacggtatccgcttgctgccgaggggagatggctacagaatcctgtcaagtggcgctatcgagatcttggctactcagctgaaccacgcaggacggtatacgtgtgtggcacgcaatgcagctggatctgcacaccgccacgttaccctgcatgtgcacgaacctcccgtcattcagcctcaaccctccgagctgcatgttatcctcaataatcccatcctgcttccatgcgaagcaactggtaccccgagtccatttattacatggcaaaaagagggaatcaacgtcaacacatccggtcgcaatcatgcggtgttaccctctggcggacttcagatctcccgcgctgtgcgcgaggacgctggaacatacatgtgtgtcgcccagaatcctgcgggtaccgccttgggtaaaattaaattgaatgtccaggtgccgcctgttatcagcccacatttaaaagaatacgttatagcggtggataaacctattacgttgtcctgtgaagcggatgggcttcccccccccgacatcacatggcacaaggatggccgcgcgatcgtagaatccatccggcaaagagtgctgtcatccggctctctgcagatcgccttcgtgcaaccaggtgatgctgggcattatacttgcatggcagcaaatgtcgcgggtagcagctccaccagcactaagttgacagttcatgtgccccctcgtataagatcaacggaaggccattataccgtaaacgaaaacagccaggccattctaccttgcgttgctgacgggatacctactcccgcaatcaactggaagaaggataatgtcctgttggctaatttgttaggtaaatatactgcagagccttatggagagttgatattagagaatgttgttctggaagactcaggtttctatacctgcgtagccaataacgctgcaggtgaggacacacacacagttagcctcaccgttcatgtgctgcccacttttactgagctccctggagatgtttctcttaacaagggggaacaattacgactaagttgcaaggcaaccggcattccacttccgaaactgacatggactttcaataacaacattatccccgcccattttgatagtgtgaatgggcattctgaactcgttattgaaagagtctctaaagaagacagtggcacatacgtgtgcactgcggagaacagcgtcggttttgtgaaagctatcggctttgtgtacgttaaagagcctcccgtcttcaagggggattatcccagtaactggatcgaacctttagggggcaatgcgatcctcaactgcgaagtgaaaggcgacccaaccccgaccatccagtggaaccgtaaaggagtcgatatcgagatttctcaccgcatcagacagctcggcaacggctccctcgccatctatggcaccgtgaacgaggacgcaggagactacacctgcgtggccactaacgaagcgggggtcgtggagagatcaatgtccctgaccctccagtccccgccaattatcacgttagagccagtcgagaccgtgataaacgccgggggcaaaattattctgaactgtcaggccaccggggagccccagcctactatcacttggtctcgccagggacactcgatcagctgggacgacagggtcaatgtgctaagcaacaacagcctgtatatcgctgacgcacagaaagaagacacttctgaatttgagtgcgtcgctcggaaccttatggggtcggtactcgttcgcgttcccgttatcgtgcaggtccacggcgggttctcccaatggagcgcgtggagggcctgttctgtgacctgcgggaagggtattcaaaagagatctaggctctgcaaccagccactgcccgcaaacggaggaaaaccctgtcagggctcagatttagagatgcggaattgtcagaataagccctgcccggtggatgggtcatggtcagaatggagcctgtgggaagagtgcactagaagttgtggaagaggaaatcaaacacgtactcggacttgcaacaacccgtctgtgcaacatggtggaaggccctgtgagggcaacgccgttgaaattatcatgtgcaatattaggccttgccccgtccatggtgcttggtccgcttggcagccatggggtacctgctcagaaagttgcgggaaaggaactcagactcgggcacgcctgtgtaataatcccccgcctgccttcggtggctcctattgcgacggtgctgagactcagatgcaagtgtgcaatgaaaggaattgccctatccacgggaagtgggccacttgggccagttggtcggcctgctcagtctcgtgtggaggtggtgcacgccagaggaccagaggatgctcggatcccgtgccacagtatggggggcgtaaatgtgagggaagcgacgtgcagagcgatttctgcaattcggacccttgcccaacgcatgggaactggtccccctggtcagggtggggcacctgctcacggacctgcaacggagggcagatgcgtagataccgcacttgtgataaccctcctccatctaacgggggaagagcgtgtggcggccccgacagccagatccagcggtgcaacaccgacatgtgccccgtggatggctcatggggctcctggcactcctggtctcagtgttcggcatcatgtgggggcggcgaaaaaacgcggaaaagactgtgcgaccatcctgtccctgtaaaggggggcaggccttgtcctggggatactacacaggtgacccgatgtaatgtgcaggcttgccctggaggtccccagagagcccgcggctccgtcatcgggaatattaatgatgttgaattcggtatcgccttcctaaacgctaccattacagattctcccaattcagacacacggataatccgcgccaaaattactaacgtccctcgcagtctgggatctgccatgaggaagatagtctccatcctgaatccaatctactggaccactgcaaaagaaatcggagaggctgtgaacggctttaccctgactaatgctgtattcaaacgagaaacccaggtggaattcgccactggggagattctccaaatgtcacacattgcaagggggctggattccgacggaagcctgctcctggacattgtggtgtccggatatgtcctgcagctgcagtcccccgctgaagttactgtgaaagattatacggaagattatatacaaactggacccggtcagttgtacgcctatagcactcgactgttcactatcgacgggatctccattccatacacctggaaccatacagtgttttacgatcaggctcaaggcaggatgccattcttggtcgaaaccctccatgcctcaagcgtggagagcgactataatcaaatcgaggagaccctggggtttaagattcacgcctctatttctaagggcgataggtctaaccaatgtccgtcgggtttcaccctggatagcgtgggaccattttgcgccgatgaagatgaatgcgcggccggaaatccctgtagtcattcttgccataatgctatggggacttattactgcagctgtcctaagggcctgaccatcgctgcagatggccgaacttgtcaggatattgacgagtgcgcattgggccgccatacctgtcacgccgggcaggactgcgataatactataggctcataccgctgtgtggtgcgctgcggttcaggttttcgccgaacgagcgacggcctgagctgccaggacattaacgaatgtcaggagagtagcccgtgccatcaaaggtgctttaacgcaatcggtagcttccactgtggctgtgaacctgggtatcagctgaaaggcaggaagtgtatggatgttaacgagtgtcgccaaaatgtgtgccgacctgatcaacattgcaagaatacccggggcggatacaagtgtatcgatctgtgcccaaacgggatgactaaagctgaaaatggaacttgcatcgacattgatgagtgcaaggacgggacccaccaatgcaggtataaccaaatttgtgaaaataccaggggctcatacaggtgcgtgtgtccccgcgggtaccggtcacagggcgtgggacgcccctgtatggatatcgacgaatgtgaaaacacagatgcctgccaacacgagtgtaaaaacacatttggtagctaccagtgcatctgccctccgggttaccaactgacacacaatggtaagacctgccaggatattgacgaatgcctggagcaaaacgtgcattgtggcccaaacagaatgtgcttcaacatgaggggctcatatcaatgtatcgacacaccatgtcctcctaactatcagcgggatcctgtgtccggattttgcctgaaaaattgccctcccaatgatctggagtgtgcactgtccccgtacgccctggagtacaagctcgtgagtcttccctttggaatcgccaccaaccaggacctcatcagactggttgcgtatacgcaggatggcgtgatgcatccacgcacaaccttcctgatggtcgatgaagagcagaccgtgccttttgccctgcgggatgagaacctgaagggcgtggtgtacaccacccgtccacttcgagaagcagaaacttataggatgagggttagggctagttcctattctgccaatggaaccatagagtatcagaccacattcatagtgtatattgcggtcagcgcctatccttactag

SEQ ID NO: 119676 - DNA, 723 bp, synthetic construct
  misc_feature 1..723: note = Description of Artificial Sequence: Synthetic coding sequence
  source 1..723: mol_type = other DNA
gccattgggagtttccactgcggctgtgaacctggttatcagctgaagggaaggaagtgcatggatgtgaacgagtgtagacagaacgtctgcaggccagaccaacattgcaagaatacgagagggggctataagtgtatcgacctctgcccaaacggcatgactaaggccgaaaacggcacgtgtatcgacatcgacgagtgtaaggatggcacccaccaatgccggtacaatcagatctgtgagaatacgcgcggttcctaccgctgcgtctgcccgagaggctaccggtcccagggagttggcagaccctgcatggatatcgatgaatgcgagaatacagatgcatgccagcacgagtgtaagaacacctttgggtcataccagtgtatttgtcctccgggatatcagcttacacataatggcaagacatgtcaggacatcgacgaatgtctggaacagaacgtccattgtgggccaaaccgtatgtgcttcaacatgagaggaagctaccagtgcattgacaccccctgtccccccaactaccagagagaccccgtgagcggattctgtctcaagaactgcccacccaacgacctggagtgcgctctttccccttatgcactcgaatacaagttagtgagtcttccttttggaattgctaccaaccaggacctaatccggctggtggcgtacacccaagatggtgtgatgcacccatag

SEQ ID NO: 119677 - DNA, 1455 bp, synthetic construct
  misc_feature 1..1455: note = Description of Artificial Sequence: Synthetic coding sequence
  source 1..1455: mol_type = other DNA
atggacttgggcaaggaccagtcccacctgaagcatcatcaaacacccgacccgcaccaagaggagaatcacagtccagaggtcatcggcacctggtctctgcgcaatcgcgagctgctgaggaaaagaaaggccgaagtccacgagaaggagactagccaatggctctttggcgagcagaaaaagcggaagcagcagcgcacggggaagggtaacagacggggcaggaaaaggcagcagaacaccgagctgaaagttgagccccagcctcagattgagaaggagatagttgagaaagcactagcccctatcgagaaaaaaaccgaaccccctgggtctattactaaggtgttcccaagcgtggcgagccctcagaaggttgtgccggaagaacacttcagtgaaatatgccaagagtcaaacatttaccaggagaatttttctgagtaccaagagatcgctgtccagaaccactcctcagaaacctgtcaacacgtctccgaaccagaagatctgtctccaaagatgtatcaggagattagtgtcctccaggataattcatctaagatttgccaggacatgaaagaacctgaggataactcccctaatacttgccaagtgatttctgttattcaggatcatcccttcaagatgtaccaggatatggccaagcgggaggacctcgccccaaaaatgtgtcaggaagccgcagtgccaaaaattctgccatgtccgaccagcgaggatacagccgatctggctggttgctctttacaagcatacccaaagcctgatgtacctaaggggtacatattggacactgaccagaaccccgccgaacccgaagaatacaatgaaacagatcagggcatcgcggagacggaaggcttattcccgaaaatccaagaaatagccgagccaaaggacttgtcaacaaagacccatcaggaaagtgccgagcccaagtatcttccgcataagacctgcaacgaaattatcgtacccaaggccccctctcataaaaccattcaagagacaccacactcagaagactacagtatcgaaatcaaccaggagacacctgggagtgagaagtactcacctgaaacttaccaggaaatacccggactggaagagtattctccagagatttatcaagaaaccagtcagctggaggaatactctcccgagatttaccaggaaactccaggccccgaagacttatccacagaaacttacaagaacaaagatgttccaaaggagtgctttcctgaacctcatcaggagacagggggtccccaaggacaggaccctaaagcacaccaagaggatgctaaagatgcgtatacgttcccccaggagatgaaagaaaagcctaaggaagagccgggtattcccgctatcttgaacgaaagccacccggagaacgatgtgtactcttacgtgctgttttag

SEQ ID NO: 119678 - DNA, 1455 bp, synthetic construct
  misc_feature 1..1455: note = Description of Artificial Sequence: Synthetic coding sequence
  source 1..1455: mol_type = other DNA
atggatctcggcaaggatcagtcccacctgaagcatcatcagactcccgatccccatcaggaagaaaaccattcgccggaagtgatcggcacgtggtctctccggaatagagagctgttgcgtaaaaggaaggcagaagtgcatgaaaaagaaaccagccagtggctgttcggggagcagaaaaaaaggaagcagcaacgcacagggaaaggaaatcggcggggccggaagagacagcagaacacggagcttaaggttgaacctcaacctcagatagagaaggagattgtggagaaagctctcgctcctattgaaaaaaagactgaacccccaggtagtatcacaaaggttttcccgtctgtcgctagtcctcaaaaggttgtccccgaagagcattttagcgagatctgccaggagagcaacatatatcaagaaaacttctcggagtaccaggagatagcagttcagaaccactcttcagaaacttgccaacatgtgagtgagcccgaggacctgagcccaaaaatgtatcaggagatcagtgtcctgcaagacaattcgagcaagatttgtcaggacatgaaagaaccagaagacaactctccgaatacttgccaagtgataagtgtcatccaggaccacccgttcaagatgtaccaggacatggcaaaacgcgaagatcttgccccaaagatgtgccaagaggccgctgtgcccaagattttgccctgtcccacgagcgaggatactgccgatctcgcaggctgctcactccaggcctacccgaagcctgatgttcctaaagggtacatccttgacaccgaccagaatcctgcggaaccagaggaatacaatgaaactgatcagggcatcgccgagactgaaggcctgttccccaaaatccaggagatagccgaacccaaagaccttagtaccaagacacatcaggaaagcgctgagcccaagtacctcccacacaagacgtgtaatgagatcatcgtccccaaggcgccctctcataaaaccattcaggaaactcctcacagcgaggattactccattgagattaaccaggagactccggggtccgagaagtatagcccagagacctatcaggagatccctggtttggaagaatactcacctgaaatataccaagaaacaagccagctggaggaatatagtcccgaaatctatcaggaaacccccggtcccgaggatctctcaaccgagacatacaagaacaaggatgttcccaaagagtgcttccctgagcctcatcaggagactggaggcccacaaggccaagacccaaaagctcatcaggaggatgctaaagacgcatacactttcccacaagaaatgaaagaaaagccgaaggaggagcctgggatcccagcaattcttaacgagagtcacccggaaaatgatgtttattcgtacgtgttattctag

SEQ ID NO: 119679 - DNA, 429 bp, synthetic construct
  misc_feature 1..429: note = Description of Artificial Sequence: Synthetic coding sequence
  source 1..429: mol_type = other DNA
atggtcctgtccccggccgacaagaccaatgtgaaggccgcgtggggaaaagtaggggcgcatgccggagaatacggagctgaagcgcttgagcgcatgttcttaagcttccctacaacgaaaacatacttccctcactttgatctttctcatggctccgcacaggtgaaaggacacggaaagaaagtagccgatgcgttgacaaatgcagtcgcacatgtggacgatatgccaaacgctctaagtgccctgtccgatctgcacgcacacaagcttcgggttgacccagtgaactttaagctactgagtcattgcctgctggtgaccctcgctgcccatctcccagcagagttcactccagctgtccacgcctctctagacaagttcctggccagcgtctctaccgttctgacatctaagtacagatag

SEQ ID NO: 119680 - DNA, 429 bp, synthetic construct
  misc_feature 1..429: note = Description of Artificial Sequence: Synthetic coding sequence
  source 1..429: mol_type = other DNA
atggttctcagccctgcagataagaccaacgtgaaagccgcttggggcaaggtaggagctcatgccggcgaatatggcgccgaggctcttgagaggatgtttctttcatttcctactactaagacctacttcccacactttgacctgtctcatggctctgctcaggtgaaaggtcacggaaaaaaggttgccgacgcactgacaaacgctgtggctcacgtcgatgatatgcctaatgccctctccgcgctctcagaccttcacgcgcataagctcagggtggatcccgtgaacttcaagctgctgtcccactgcctgttggtcactttggccgcccatttgccggcagagtttacccctgccgtgcacgccagtctggataaattccttgccagtgtgagtaccgtgctgacttccaagtatcgctag

SEQ ID NO: 119681 - DNA, 333 bp, synthetic construct
  misc_feature 1..333: note = Description of Artificial Sequence: Synthetic coding sequence
  source 1..333: mol_type = other DNA
atgtttctgtcattcccaactacaaaaacatactttcctcacttcgacctgtcccacgggtcggctcaagtgaaggggcatgggaaaaaggtcgccgacgctctcactaacgctgttgcccatgtagatgacatgcctaatgctctcagcgctctgagcgatttgcacgcacacaagctgagagtggatccagtgaatttcaagctgcttagtcactgcctgctggtgacgctggcagcgcatctgcccgccgagttcacgccagcggtccacgccagccttgacaagttcttggctagcgtgtctaccgtcctcaccagtaaatatagatag

SEQ ID NO: 119682 - DNA, 444 bp, synthetic construct
  misc_feature 1..444: note = Description of Artificial Sequence: Synthetic coding sequence
  source 1..444: mol_type = other DNA
atggtgcatctcacccccgaagagaaaagcgcagtcaccgccctctggggaaaggtgaatgtggacgaagtgggaggagaagccctgggtaggttgttggtcgtttacccctggacccagcgcttctttgagtctttcggagatctctctaccccagatgccgtcatgggtaatcccaaggtcaaggctcacgggaagaaggttctgggagcctttagtgacgggttggctcacctggataacctcaagggaacgttcgcgactctgtccgaactgcattgcgacaagctgcacgtggatcctgaaaattttcgattattaggaaatgtgctcgtctgtgttttagcacatcatttcggcaaagaattcaccccgccagtgcaggctgcgtatcaaaaggtggtggcaggagtcgccaatgccttggcccacaagtatcactag

SEQ ID NO: 119683 - DNA, 273 bp, synthetic construct
  misc_feature 1..273: note = Description of Artificial Sequence: Synthetic coding sequence
  source 1..273: mol_type = other DNA
atggtgcaccttaccccagaagagaaaagtgcggtgacagctttgtggggaaaggtgaacgttgatgaagtgggcggagaggccctggggcggctgctcgtagtttatccctggactcagagattttttgagtctttcggtgacctctcaaccccagacgctgtcatgggcaatcctaaggtcaaagcacacggcaagaaggtcctaggagccttttctgacgggcttgcccacctggataacctgaaaggcacttttgccacactatcatag

SEQ ID NO: 119684 - DNA, 426 bp, synthetic construct
  misc_feature 1..426: note = Description of Artificial Sequence: Synthetic coding sequence
  source 1..426: mol_type = other DNA
atggtgcacctcactccagaggaaaagaccgctgtgaacgctctgtggggtaaggtcaatgtcgatgccgtcggtggggaagccttggggagattattggtcgtttatccctggacccagcggttttttgaatcttttggcgatctgagcagtccagatgctgtgatgggcaaccctaaggtgaaggcacatggcaaaaaggtgctgggcgcctttagcgatggtctcgcccacctcgataaccttaagggcacattcagccagctgagcgaactgcattgtgacaaactgcacgtcgatcccgagaattttcgcgtgtgtaagaaggtgcccgaggccctccagatcgggtccacctgcctgttctataaagagtatatgggcaaagagaagtcgaagggcacggtccagggaattaacggctag

SEQ ID NO: 119685 - DNA, 444 bp, synthetic construct
  misc_feature 1..444: note = Description of Artificial Sequence: Synthetic coding sequence
  source 1..444: mol_type = other DNA
atggtacacctgacgcccgaagagaaaaccgctgtgaacgcattgtgggggaaggtgaatgtggacgctgtgggcggcgaggctttaggccgccttctggttgtgtatccatggacacaacgtttcttcgaaagctttggagacctttcttcccccgatgcagtaatgggaaaccctaaagtcaaggcccatggcaagaaggttctcggggctttcagtgacggattggcgcacttagacaatctcaaaggcacatttagtcaattaagcgagctccactgcgacaaactccacgtggaccctgagaatttccgactgttagggaatgtgctggtttgtgtcctggcgcggaactttgggaaggaatttactcctcagatgcaagccgcctatcagaaagtcgttgccggcgtggcaaatgccctggctcacaaataccattag

SEQ ID NO: 119686 - DNA, 315 bp, synthetic construct
  misc_feature 1..315: note = Description of Artificial Sequence: Synthetic coding sequence
  source 1..315: mol_type = other DNA
atggtgcacctgacccctgaagaaaagactgctgtcaacgctctgtgggggaaggtgaacgtggatgcagtggggggggaggcgctcgggagattgctagtggtgtacccttggactcaaaggttctttgaatccttcggagacctctcatcacccgacgccgttatggggaatcctaaggtgaaggctcatgggaaaaaggttcttggcgcattctctgacggacttgcccatctagataatctaaagggtacattctcccagctgagtgaactacattgcgataagctccatgtcgatccggaaaacttctag

SEQ ID NO: 119687 - DNA, 444 bp, synthetic construct
  misc_feature 1..444: note = Description of Artificial Sequence: Synthetic coding sequence
  source 1..444: mol_type = other DNA
atggtacactttaccgccgaggagaaagccgccgtgacctccttgtggagtaagatgaacgtagaagaggctggcggggaggccttagggagactgctggttgtttacccttggacccagcggttcttcgactcgttcggtaacctttcaagtccatccgccatcttaggtaacccaaaggtgaaagctcacggaaaaaaggtgctgacaagttttggggatgccattaagaacatggataatctgaaacctgcattcgcaaagctaagcgagttgcattgcgacaaactgcatgtcgacccagagaattttaagctgctgggaaatgtaatggtcattatcctcgcaacccactttggtaaggagtttacccccgaggtgcaggctgcttggcagaaactcgtgagcgcggtggccatcgccctcgcccacaagtaccactag

SEQ ID NO: 119688 - DNA, 444 bp, synthetic construct
  misc_feature 1..444: note = Description of Artificial Sequence: Synthetic coding sequence
  source 1..444: mol_type = other DNA
atggttcacttcaccgccgaggaaaaggcggctgtgacttccctgtggagcaaaatgaatgtagaggaggcaggaggagaagcgctaggcagacttcttgtagtttatccgtggacccagcgatttttcgatagtttcggaaacctttcctctccttccgcgatacttgggaacccaaaagtgaaggcgcatggcaagaaagtgttaacatctttcggagacgctattaagaatatggacaatctaaagccagcgtttgctaagctgagcgagctgcattgtgataaacttcacgtcgatcctgaaaatttcaaactcctgggcaacgtgatggtgataatcctggctacacatttcggaaaagagtttaccccagaggtccaggcagcatggcagaaactagtttctgcggtggcgattgcactggcccacaaatatcactag

SEQ ID NO: 119689 - DNA, 264 bp, synthetic construct
  misc_feature 1..264: note = Description of Artificial Sequence: Synthetic coding sequence
  source 1..264: mol_type = other DNA
atggtccattttaccgcggaggaaaaagctgcggtcacctccctgtggtcaaaaatgaatgtagaagaagccggtggtgaggcacttggccgcctgttggttgtgtatccatggacacagcgattcttcgactccttcggcaacctgtcaagtcccagtgccattctgggaaatcctaaagtgaaggcgcacgggaaaaaggtcctgaccagctttggagatgccatcaaaaatatggacaatctcaaacctgcattcgcatag

SEQ ID NO: 119690 - DNA, 444 bp, synthetic construct
  misc_feature 1..444: note = Description of Artificial Sequence: Synthetic coding sequence
  source 1..444: mol_type = other DNA
atgggccattttacagaggaagacaaggccaccatcacgtcactttggggtaaagttaacgttgaagatgctgggggtgaaacgctgggaaggcttctggtagtctacccatggacccagcgtttttttgattcttttggaaacttgagttctgcttcagctataatggggaatccaaaagtcaaggcccatggcaaaaaagtgcttacctcattaggcgatgcaactaaacatctggacgatctcaagggcaccttcgcccagctgtctgagctgcactgcgacaagttgcatgttgatccggagaatttcaaactgctaggaaatgtactcgttacagtgctggctattcactttggcaaggaattcacacccgaagtgcaggcctcttggcagaagatggtgacagcggtggcttccgctttgtcatcacgctaccactag

SEQ ID NO: 119691 - DNA, 444 bp, synthetic construct
  misc_feature 1..444: note = Description of Artificial Sequence: Synthetic coding sequence
  source 1..444: mol_type = other DNA
atgggacacttcactgaggaagataaagccacaatcacctctctgtggggcaaggtgaatgtcgaagatgctgggggagaaacattaggcagactcctggtcgtctatccgtggactcaaaggttcttcgactcctttggcaacctgtcgagcgcaagcgcgatcatgggcaaccctaaggttaaggctcacggcaaaaaggtgctcaccagcctgggggacgccattaagcacctggacgacctgaagggaacatttgcacagctgagcgagctgcattgcgacaagttgcacgtggatccagaaaatttcaaactgcttggaaatgtccttgttaccgttctggccattcattttggcaaagaatttacccccgaggtccaagcctcctggcagaagatggtgaccggagtcgcctcggccctatctagccggtatcactag

SEQ ID NO: 119692 - DNA, 477 bp, synthetic construct
  misc_feature 1..477: note = Description of Artificial Sequence: Synthetic coding sequence
  source 1..477: mol_type = other DNA
atgggccattttaccgaggaggataaggcgaccattaccagtctgtggggcaaggtaaatgtggaggacgcagggggcgagactctcggacgactgctcgtagtttacccatggactcaacgcttcttcgattccttcggaaacttgagctctgcgagcgctataatggggaaccccaaagtaaaagcccacggaaagaaggtgctcacctcactgggggacgccatcaagcacctcgatgatctaaaagggacattcgcacagctgtctgagttgcactgtgataagctgcatgtcgatcccgaaaatttcaaactgctgggcaacgtacttgtgactgtgctcgcaatccatttcggaaaggagtttactccagaggttcaagcgtcatggcagaagatggattggtcaggccagtgccccgtcttgcaaattcccttgtcatccttaccgatgatgcagtcttttcagggctag

SEQ ID NO: 119693 - DNA, 414 bp, synthetic construct
  misc_feature 1..414: note = Description of Artificial Sequence: Synthetic coding sequence
  source 1..414: mol_type = other DNA
atggtcgtgttaggagagatgaagcgaaaggttttgcctctccacttcctcccctttatgcgcttactggtggtgtacccctggactcagagattttttgatagtttcggaaacttatcctctgctagtgccatcatgggaaaccccaaagtgaaagcccatggtaagaaagtcttgacatcactcggcgatgcaatcaaacacctggacgacttgaaaggtacatttgcacagttgtcagaactccactgtgacaagctccatgtggatcctgaaaacttcaaactcctgggaaatgtgcttgtgactgtgctggccatccatttcggtaaagagtttacacctgaagttcaagcctcctggcagaaaatggtaaccggcgtggcgtcggcactctccagcagataccactag

SEQ ID NO: 119694 - DNA, 444 bp, synthetic construct
  misc_feature 1..444: note = Description of Artificial Sequence: Synthetic coding sequence
  source 1..444: mol_type = other DNA
atgggccatttcaccgaggaggacaaggccacaataacatccctctgggggaaagtgaacgtcgaggatgctggcggagagacactcggcaggctcctagtcgtctacccctggacccaaagattcttcgatagcttcggtaatctgagtagcgcctcagccatcatgggaaacccaaaagtcaaagcccacggtaagaaggtgctaacaagcctgggcgacgctattaagcacctggatgacctgaagggaacttttgcacagctaagcgagctgcattgtgataagctgcacgtggaccctgaaaactttaaactgctggggaatgttctcgtgaccgtcctggccattcactttgggaaagaatttactccagaagtccaggcatcatggcaaaaaatggtaacaggcgtagccagcgccttaagttctcggtatcactag

SEQ ID NO: 119695 - DNA, 426 bp, synthetic construct
  misc_feature 1..426: note = Description of Artificial Sequence: Synthetic coding sequence
  source 1..426: mol_type = other DNA
atgctatccgctcaagaaagagctcagattgcgcaggtatgggatttaattgctggccatgaagcccagtttggcgccgagctgctcttacgactgtttactgtgtatcccagcaccaaggtttatttcccccacctttcagcatgtcaggacgccacccaactgttgagtcacggacagagaatgctggccgcggtgggcgcagctgtccagcatgttgataatctcagggctgcactctcccctcttgcagatctgcatgcactggtgctgagagtcgatcctgcaaactttccccttctgatacagtgtttccacgtggtgttggcctcccatctacaggatgaattcaccgtgcagatgcaagctgcatgggataaattcctgacaggcgttgccgtcgtgctcacagagaaataccggtag

SEQ ID NO: 119696 - DNA, 429 bp, synthetic construct
  misc_feature 1..429: note = Description of Artificial Sequence: Synthetic coding sequence
  source 1..429: mol_type = other DNA
atggcactgagcgccgaggacagggcattagtccgcgctctgtggaagaaactgggatccaacgttggtgtatacactacagaagcgctcgagcggaccttccttgcgtttcctgcaactaaaacttacttctcacacctggacctgtcccccggttcgagccaggtgagggcccacggtcagaaggtagctgatgccctgagtctggccgtcgagcgactggacgatctcccccacgctctaagtgccctttcacatctgcacgcttgccagctgcgcgtggacccagctagcttccagctccttggacattgtcttctggtcaccctggcgcgccattacccgggtgacttcagcccggccttgcaagcttctctcgacaaattcctgtctcacgtgatatccgccctcgtgtccgaataccgttag

SEQ ID NO: 119697 - DNA, 429 bp, synthetic construct
  misc_feature 1..429: note = Description of Artificial Sequence: Synthetic coding sequence
  source 1..429: mol_type = other DNA
atgagcctcaccaagacggaacgaaccatcatcgtgagcatgtgggcaaaaatttcaacacaggccgacacgatagggacagagacacttgagcggttgtttttatcccacccccagaccaaaacctattttccccactttgacttgcaccccggcagcgcccagttacgagcccacggcagtaaggtagtcgcagcggtcggcgatgccgtcaagagcatcgatgatatcgggggagccctgtccaagctgtcagaactgcacgcctacatccttcgcgtggacccagtcaactttaagctgctctcccactgcctcttggtgactctggccgcaaggttccctgccgacttcacggcagaagcgcatgccgcctgggataagtttctcagcgtcgtgtcctctgtcctgacggagaaatatagatag

SEQ ID NO: 119698 - DNA, 1389 bp, synthetic construct
  misc_feature 1..1389: note = Description of Artificial Sequence: Synthetic coding sequence
  source 1..1389: mol_type = other DNA
atggccagggttctgggggcccccgtcgcactggggttgtggtccctgtgctggtcgttagcaatagctacccctttgccgcctacgtctgctcacggcaatgtagctgagggagagaccaaacccgatcctgatgtcactgagaggtgttcggacggctggagctttgatgctacgaccctcgatgataatggtaccatgctcttcttcaagggagaatttgtatggaagtcccacaagtgggatcgggagctcatctctgaaaggtggaaaaatttcccctcccccgtagatgccgccttccgtcagggacataactcggtctttctcattaagggcgataaagtatgggtgtatccacctgagaagaaagaaaaaggatacccaaagctgttgcaggacgagttcccagggatcccgtcccccctggacgccgctgtcgagtgccatcgtggggagtgccaggctgaaggggtgctgttcttccagggggaccgggagtggttctgggacttggccacaggcacgatgaaggagcggtcctggccagctgtcgggaattgctcatctgcattgagatggctcgggcgttattactgttttcagggaaaccagtttttgcgctttgaccctgttcgaggggaggtgcctcctagatatccccgtgacgtccgtgactattttatgccctgcccagggaggggtcatggacacagaaatggcactggtcatggcaacagcacccaccacgggccggagtacatgaggtgttcccctcatctggttctgtcagctctcacttcagacaaccatggcgctacatatgcttttagcggcacgcactattggagactcgacacttctagggatggctggcattcatggcctatagctcatcagtggcctcaaggcccatccgctgttgatgcagcgttcagctgggaagagaagctctatctggtccagggcacacaggtttacgtctttctcaccaagggcgggtacaccctcgtgagcggatacccgaagcgtctcgaaaaggaggtgggaactcctcacgggatcattctcgacagtgtcgatgccgcgttcatctgccccggaagttcgagactgcacatcatggcggggagacgattgtggtggctggacctgaaaagtggagcgcaagcaacctggacagagctgccttggcctcatgaaaaggtcgacggcgccctctgtatggaaaaatccctcggcccaaacagctgtagtgcaaatggtccgggactctatcttattcatgggcctaatctatactgctacagtgacgttgaaaagctgaacgcggccaaagcactgccacagccgcagaatgtgacctcactgcttggctgcactcactag

SEQ ID NO: 119699 - DNA, 765 bp, synthetic construct
  misc_feature 1..765: note = Description of Artificial Sequence: Synthetic coding sequence
  source 1..765: mol_type = other DNA
atggcacgcgtgctgggcgctcccgtggcactgggtctgtggagtctctgctggtctctggcaatagcaacccctctgccccccacttccgcacatggcaatgttgccgagggcgaaacaaagcctgaccctgatgtgactgagagatgctcggatggctggtcttttgacgctacgacactggatgacaatgggacaatgctctttttcaaaggtgagttcgtctggaaatcccacaagtgggaccgagagttgatatctgaaagatggaaaaacttcccttccccagtggatgctgcttttcgacagggccataatagcgtttttctgatcaagggcgacaaggtatgggtgtaccctcctgaaaaaaaagagaaaggctatcctaagttgttacaggatgaatttccaggcatcccatcacctctcgacgccgcagtagaatgtcatcgcggggaatgccaggcagaaggagtgctttttttccaaggcgaccgggagtggttttgggacttggccaccggcacgatgaaggaacgctcatggcctgctgtgggcaattgctctagcgcactgcgctggctgggtcgatactactgctttcagggaaaccagtttttacgctttgaccccgtgagaggtgaggtgccgccaagatatccacgcgatgttcgagattacttcatgccttgccccggccgcgggcatggtcaccgcaacgggacaggccatgggaacagcatttgcgccgtcgcacacatatag

SEQ ID NO: 119700 - DNA, 1353 bp, synthetic construct
  misc_feature 1..1353: note = Description of Artificial Sequence: Synthetic coding sequence
  source 1..1353: mol_type = other DNA
atgtggttaaaagtgttcaccacttttctcagttttgccaccggtgcatgtagcggactcaaagtaactgtaccatcacatactgtgcatggagtgcggggacaagctctctacctgccagtacactacgggttccatactcccgcctccgatatccagattatttggctgttcgagcggccgcatactatgcctaaatatctgctaggctccgtaaataagtctgttgtgcccgatctcgaatatcagcataaatttacgatgatgccccccaacgcaagccttttgatcaatcccctgcagtttcccgatgaaggcaattatatcgtcaaggtgaatattcagggcaatggcaccctgagcgctagccagaaaatccaagttacagtggatgatccagtgactaagccagttgtgcagatccacccgccgtccggagcggtggagtacgtcggaaatatgacactgacatgccacgtggaaggcggcactcggttagcataccagtggttaaagaacggaagacccgtgcatacgagtagtacctactcattctcacctcagaataacaccttgcatattgccccggtcaccaaagaggacatcggcaattactcatgcctcgtgaggaacccagtgagcgagatggagtccgatattatcatgccaattatatactatggtccctacgggctccaggttaactcagacaaggggcttaaggtcggtgaagtgtttactgtggatctaggagaagctatattgttcgattgctccgcagactcccatcctcccaatacatactcctggatcaggagaaccgacaataccacgtatattattaaacatggcccgaggctggaggtggcatccgagaaggtggctcagaagacaatggactacgtgtgttgcgcatacaataatataaccggtcgacaagacgaaacccacttcactgtgataattacgtccgtaggcctggagaaactagcgcaaaagggtaagtcgctttctccgctggcatcaattactggaatctcactatttcttatcatttccatgtgtctcctgtttttgtggaaaaagtaccagccctacaaagttatcaaacagaagcttgaaggacggcccgagacagaataccgaaaagctcagaccttcagcggacacgaggatgcattagacgatttcgggatttacgagttcgtggcctttccagatgtgtcaggagtcagccgtatacctagcaggtcagtgcccgcctctgactgcgtgagtgggcaagatcttcactccactgtgtatgaagtgattcaacatatcccagcccagcaacaggaccatcctgagtag

SEQ ID NO: 119701 - DNA, 1389 bp, synthetic construct
  misc_feature 1..1389: note = Description of Artificial Sequence: Synthetic coding sequence
  source 1..1389: mol_type = other DNA
atgggtcaggatgccttcatggagcctttcggagacaccctcggagtatttcagtgtaagatataccttttgctgttcggcgcttgttcaggactcaaggtgaccgttccgagccacaccgtgcatggcgtgcggggccaagctttgtacctgccagtgcactacggatttcatacacctgctagtgacatccaaattatctggcttttcgaaagaccccacaccatgccgaaataccttctggggagcgttaataagagcgtggtgccagaccttgagtatcagcacaaattcacaatgatgccccctaatgcctcactccttattaatcccctccagttccccgacgaaggtaactatatagtgaaagtgaacatccaaggtaacgggactctcagcgctagccagaaaatccaggttactgttgacgaccccgtaacgaaacccgtggtccaaattcaccccccttccggggccgttgaatacgtgggtaatatgactcttacctgccacgtggagggcgggaccaggttagcctatcaatggttgaagaatggcaggccggtccacacctcctccacttacagtttctcccctcagaataacaccctgcacatcgcacccgtgaccaaagaggacatcggcaactattcttgcctggttcgtaatccggtcagcgagatggagtctgatataattatgcctatcatctattacggcccatatggactacaggtgaactcggacaagggactcaaggtaggagaggttttcactgtcgatcttggcgaggctattctgttcgattgtagcgccgacagtcatccccctaacacttacagctggattcggagaaccgacaacaccacttacatcatcaaacatgggccaagactagaggtcgctagtgagaaagtggcccaaaaaacgatggactacgtttgctgcgcgtataataatatcaccgggaggcaagacgaaactcactttaccgtgattataacaagtgtgggactcgagaaattagcacagaaagggaagagcttgtccccgctcgctagtattacaggtattagtctgttcttgataatcagtatgtgtcttctctttttgtggaaaaagtatcagccatataaggtcatcaaacaaaagctcgagggccgcccggagactgaatatcggaaagcccagacctttagcgggcacgaagacgctctggacgacttcggcatttacgagtttgtggcgtttccagacgtgagcggggtctctagaatcccgtcccgcagcgtccccgcctcagactgcgtctctggccaggacctgcatagcactgtgtatgaagtgatccagcacatcccagcccagcagcaggaccacccggagtag

SEQ ID NO: 119702 - DNA, 1104 bp, synthetic construct
  misc_feature 1..1104: note = Description of Artificial Sequence: Synthetic coding sequence
  source 1..1104: mol_type = other DNA
atggcatatagagttttaggtcgggccgggccgccacagccacgccgcgcaagaaggctgctcttcgccttcaccctgtctttgagctgtacctacctatgctattcttttctgtgctgttgcgatgacctcggccgaagtcggctgcttggggccccccggtgccttaggggacccagcgccgggggacagaagcttttgcagaagagccggccctgtgacccttcaggcccgactcccagcgagcccagtgcgccaagcgcacctgctgctgccgttccagctccccggctgagcggctctaaccacagcgggagcccaaagctgggcacaaaacgtctgccccaggctttgatcgtcggcgtcaaaaaagggggaactcgcgctgtgctggagtttattagggtgcaccctgacgttagagcgcttggaaccgaaccccatttttttgaccggaattacggccgagggctagactggtaccgaagtctcatgcctaggactctggaaagccagattacccttgaaaaaacaccaagctactttgtgacgcaggaggcacccagacgcatctttaacatgtctagagataccaaattgatcgtcgtggtgaggaaccctgttaccagagctatatccgactacactcaaaccctgagcaaaaaacccgatatcccaaccttcgaaggactgtcattccggaaccgcactctcggacttgtagatgtgagctggaacgccatccggatcgggatgtacgtcttacacctcgaatcgtggctacagtactttccacttgcccaaatacatttcgtgagcggagagaggctgattactgaccctgccggtgaaatggggcgcgtgcaggatttcttagggatcaagagatttatcaccgacaaacacttttattttaataagaccaaggggttcccctgtttgaagaagacagagtcctcactgctacccaggtgtttgggaaagagtaaaggcagaactcacgtgcaaattgatcctgaggtgatagaccagttaagggaattttatcgcccctacaatataaagttttacgaaactgtcgggcaagatttccgttgggagtag

SEQ ID NO: 119703 - DNA, 1035 bp, synthetic construct
  misc_feature 1..1035: note = Description of Artificial Sequence: Synthetic coding sequence
  source 1..1035: mol_type = other DNA
cctccggccagagcccacggcgctatggcctatcgcgtcctcggacgggcaggtcctccgcagcctcggagggcccgccgcctgctctttgccttcactttgagtctgagctgcacttacttgtgctattctttcctctgctgctgtgacgatctcggaagaagcagactgttgggagccccacggtgcttgcggggcccttccgctggaggccaaaaactacttcagaaatcccgtccctgcgatccctctggtccaaccccgagtgagcccagtgcgccctcagctcccgccgccgctgtgccagcaccacggttgagtggctctaaccactctgggtccccaaagctcggtaccaagcgactgccccaggcgctgattgttggagtaaagaaaggaggaactagggccgtcctagaattcattagggtgcaccctgatgtcagagcactgggcacggaaccccacttcttcgaccgcaattacggacggggactggattggtatcggtctctgatgccgcggaccctcgagtcccagatcaccttagagaagaccccaagttactttgtgacccaggaagcccctaggcgaatttttaatatgagcagggatacaaaactgatcgttgtggtccggaaccctgtgacccgtgcgatctcagactacacccagaccttgtctaagaagcccgatatcccaacgttcgaagggctgtctttccgcaatcgtacactcggtctggtcgatgtgtcatggaatgccatcaggatcggtatgtacgtgctgcatcttgaaagctggctgcagtattttcctctcgcccagatccatttcgtgtccggtgagcgcctcattaccgaccctgccggcgagatgggtcgagtgcaagacttcctgggcataaaaagattcatcacggacaagcacttctactttaacaaaacaaaaggcttcccttgtttaaaaaaccggatcgagcctcctgcctccatgctggggcagatcaagcgggaaaatagctgcacagattag

SEQ ID NO: 119704 - DNA, 1221 bp, synthetic construct
  misc_feature 1..1221: note = Description of Artificial Sequence: Synthetic coding sequence
  source 1..1221: mol_type = other DNA
atggcgcctcccggaccagcatccgccctgtccaccagcgcggagcccctctcgcgaagcatctttaggaaatttttgctcatgctgtgctctttgcttacgagtctatacgtattttactgtctggccgagcgatgtcagaccttgagcgggcccgtggtcgggttgtccgggggcggcgaggaagcgggtgcccctggtggcggggtcctcgctggggggccgcgggagttagcagtgtggccagctgctgcccagcgaaagaggttgttgcagcttccgcagtggcgaagaagaagaccgcctgcccccagagacgatggggaggaggccgcatgggaagaggaatccccaggactaagtggtggcccaggcggcagcggagccggcagcaccgtggctgaggcaccccctgggaccttggcactgctactcgatgaaggctcaaagcaactaccgcaggctatcattataggcgtcaagaaaggcgggaccagggcactgctggaatttctgcgggtccatccagatgtacgagctgttggtgcagagccacacttttttgatcgctcctacgataagggactcgcatggtatcgcgacttgatgccacgcactctggatggacagattacaatggagaagacccccagctactttgtgacccgtgaagctcctgcaaggatctcagcaatgtccaaggacacgaaactaatcgtggtcgttagagaccccgtgaccagggccatctccgattatacacagacactgtcaaagagaccagacattccaactttcgaaagcttgacctttaagaatagaacggctggactcatcgacacatcttggagcgccatccagatcggcatctacgcgaaacatctggaacactggctcaggcactttcccatacgccaaatgctctttgtatcaggagagagactgatctcagatcccgctggggaactggggagggtgcaagactttctgggtctgaagcgcatcattacagacaagcatttttacttcaacaagaccaaaggctttccctgtctgaaaaaagccgaagggagtagccgcccgcattgcctgggtaagacaaaaggccggacgcaccctgagatcgaccgcgaagtggtccgcaggcttcgagagttctatagaccattcaatcttaagttctaccagatgactggccatgactttggatgggacgggtag

SEQ ID NO: 119705 - DNA, 1173 bp, synthetic construct
  misc_feature 1..1173: note = Description of Artificial Sequence: Synthetic coding sequence
  source 1..1173: mol_type = other DNA
atgggacaaaggttatccggagggcggtcatgcctcgatgtccctggcagactgttgccccaaccccctccgccacctccacctgtgcggcgcaagctagccctgctttttgctatgctctgcgtgtggctctatatgtttctgtactcatgcgcgggctcctgcgccgccgcgcccggcctgctgcttctgggcagtgggagccgggctgcacacgatccacccgcactggccacagctccagacggcaccccaccgcggctgcctttccgagcacctccagctacccctctggcaagcggcaaggagatggccgagggggctgccagccccgaagagcaaagcccagaagtgccagattctccctctccaatctccagctttttctccggatccgggagtaaacaactccctcaggctattattatcggggtcaagaagggtgggaccagggcccttctcgagtttctgagggtgcatccggacgtgcgcgcagtcggggccgagccgcattttttcgatcgatcctatgacaagggcttagcttggtacagagatctcatgccacggaccctcgacggccagatcacaatggaaaagacaccgtcttactttgttaccagggaagctcccgcgaggatttcagctatgtctaaagatacaaaattgatagtggttgtgcgggatcccgtgacccgcgcaattagcgactatacgcaaactttgagtaagcgaccagatatccccacctttgaaagcttgacctttaaaaacagaaccgctgggctgatagatacatcctggtccgccatccagattgggatatatgcgaagcatttagagcattggctgcggcactttccaattcgacagatgctattcgttagcggcgaacgtctcatatcagatcctgcaggtgaattaggaagagtccaggactttcttggactaaagcggatcataaccgacaagcatttctattttaataagaccaagggcttcccgtgcctgaagaaagctgagggttctagtaggccccactgcctgggtaagacgaagggccgtacccaccccgaaattgatcgggaagttgtaagacgcttgcgcgaattctataggcccttcaacctcaagttctaccagatgaccggtcatgatttcggatgggattag

SEQ ID NO: 119706 - DNA, 1173 bp, synthetic construct
  misc_feature 1..1173: note = Description of Artificial Sequence: Synthetic coding sequence
  source 1..1173: mol_type = other DNA
atgggccaaagactctccggtggaagatcttgcctggatgtaccagggcggctcttgccccagcctccgcctcctccaccccccgttcgcaggaagctggcactcctttttgccatgctgtgtgtctggctgtatatgttcctgtatagttgcgccggatcttgtgcggctgcccctggcctgctcctgctcggctctggatctagagccgctcatgacccacctgccctggccactgcccctgacggaactccccctcgcctgccatttagggctccaccagcgactccccttgcttctggtaaagagatggcggagggggctgctagcccagaggagcagagtcctgaggtcccggactcaccatcgcccatatccagctttttctccggcagcggatctaagcaactcccacaggccattattattggagttaagaagggcggcacaagggctctgttggagtttttaagggtgcatcccgacgtgagagctgttggcgctgagccgcacttctttgatcgctcttacgataaagggctcgcatggtatcgcgatctgatgccaagaacccttgacggtcaaattaccatggagaagacacccagctatttcgtgactcgggaggcacccgctcggatttcagccatgtccaaggataccaagttgattgtcgtggtccgggaccctgttactcgggcgatctctgattatacccaaaccctgtccaagcgacccgatattcctacttttgaaagcctgacttttaaaaataggacagccggtctaattgatacttcctggtccgctatccagatagggatatatgctaagcatctggagcactggttaagacacttccccatccgtcaaatgctcttcgtgtctggtgaaaggctcataagtgatcccgcgggggaattgggaagagtacaggactttctcggactgaagaggataatcactgataaacacttctacttcaacaaaacaaagggctttccctgcttgaagaaagccgaagggagcagccggccacactgcctcggaaaaacaaagggccgaacacacccagaaatagacagagaagtcgtacggcggcttagggagttctatcgcccgttcaacctcaagttttaccaaatgacgggacacgacttcgggtgggactag

SEQ ID NO: 119707 - DNA, 1371 bp, synthetic construct
  misc_feature 1..1371: note = Description of Artificial Sequence: Synthetic coding sequence
  source 1..1371: mol_type = other DNA
atggccagatggccagcgccgcctccccccccacctccaccccctccccttgccgctcctcctccacccggagcctccgcaaaaggcccacctgcccgaaaactgctcttcatgtgtacactgagtctgtccgtaacatatctgtgctattccctcctgggtgggagtggttccctccagttccccctagcccttcaggagagccccggggctgctgccgaacctcccccctctccgccgcccccatcacttttgcctaccccagtgaggctgggggccccaagtcagccacccgcgccgccccccctcgataatgccagtcacggggaacccccagaacccccagagcagcctgctgctccagggacagacggatggggtttaccttcagggggggggggagctcaggacgcttggctgcggaccccactcgctcctagcgagatgatcactgcccagagtgccctgccggaacgtgaagcccaggaatccagtactaccgacgaggatcttgccgggaggcgggcggcgaacggatcaagtgaacgcggaggtgccgtgtccacacctgactacggggagaagaaacttccccaggcacttattattggagtgaagaagggaggaacgagagcattgctcgaagcaattcgggtacaccccgacgtcagagccgtcggcgtggagcctcactttttcgaccgcaactacgaaaaagggttggagtggtaccgcaatgtgatgcccaagaccctagacgggcagattacgatggaaaaaaccccatcttactttgtcaccaatgaagcgcccaaacggatccactccatggcaaaagatattaaacttattgtcgtcgtgcgtaatcctgtgacacgggctataagcgactacactcaaacgttaagtaagaagcccgagatacccacgttcgaagtgctggcgttcaaaaaccgaaccctgggtctgatcgatgctagctggtccgcaatacgaattgggatttacgcactgcacctagaaaattggctccagtacttccccctgagtcagattctttttgtctctggagaacgtcttatagtcgatcccgccggcgagatggccaaggtacaggatttcctcgggctaaagcgcgtagtaaccgaaaagcatttctactttaataaaaccaaagggttcccctgtctgaagaaacccgaggacagtagtgctccaagatgtctcgggaagtctaagggccgcacacatccacggatcgaccccgatgtgatccatcgacttcggaagttttacaagccctttaaccttatgttttaccagatgacaggccaggatttccagtgggagcaggaggagggcgacaagtag

SEQ ID NO: 119708 - DNA, 1041 bp, synthetic construct
  misc_feature 1..1041: note = Description of Artificial Sequence: Synthetic coding sequence
  source 1..1041: mol_type = other DNA
atgctgttcaaacagcaggcctggttgcggcagaaactgctcgtgttggggtctctggcagtgggatctctcctgtatttggtggccagggtcgggagtttggatagactgcaacccatttgtcccatcgaagggaggttaggaggcgcccgaacgcaggctgaattccccctaagagctttgcagtttaagaggggactgctgcacgagttccgtaagggcaatgcttcaaaggagcaggttaggctgcacgatctggttcagcaactgcctaaagctattattatcggggttaggaagggcgggacaagggccttgctcgagatgctaaatttgcaccctgctgtcgtcaaggcctcacaagagatccacttctttgataacgacgagaattatggcaaggggatcgagtggtacaggaaaaagatgcccttctcctatccccaacagatcacaattgaaaagtctcccgcttacttcatcacagaggaagtacctgagagaatatacaagatgaacagcagtattaaattactcatcattgtgcgggagcctacaacacgcgccatcagtgactatacacaggtgctggagggaaaggaaaggaaaaataagacttattacaagtttgagaagctagcgatcgacccaaacacttgcgaagtgaacaccaaatataaggcagtgagaacttcaatctacactaaacatcttgagcgttggctcaaatattttccaattgagcagttccatgtggtggatggagaccgcctgatcacagaacccctgcccgagctacagctcgtagaaaaatttctgaacctgcccccaaggatatcccagtacaatctttactttaacgctacaagggggttttattgcctgcgatttaacataattttcaataaatgcctcgctggctccaaaggacgtatccacccggaggtggaccccagcgtgatcactaaactgagaaaattttttcatccattcaaccaaaagttttaccagattacagggagaactttaaactggccctag

SEQ ID NO: 119709 - DNA, 1041 bp, synthetic construct
  misc_feature 1..1041: note = Description of Artificial Sequence: Synthetic coding sequence
  source 1..1041: mol_type = other DNA
atgctgtttaaacagcaggcctggttgcgccagaaactcctggtgctaggttcactggcggtcggtagcttgctttaccttgtcgcacgggttgggagcctagaccgactgcagcctatatgccccattgagggccgattagggggggccaggacccaggcagagtttccactgcgtgcgctgcagttcaaacgtggactgctgcatgagtttaggaaaggaaatgcttcaaaagaacaagtccggctgcatgacttagtgcagcagctgccaaaagccataatcatcggagtcagaaagggcgggacgcgagctctgctcgagatgctgaacctgcaccctgctgttgtaaaggcctcccaggagatccactttttcgataatgatgagaactacggcaagggaatcgagtggtaccgcaagaaaatgccttttagctacccacagcaaatcacaatagagaagtcgcccgcatacttcattacggaagaggtccctgaacgcatttacaagatgaattcttccattaagttattaattatcgtacgcgagccgactacgcgtgcaatttcagattacacacaggtactcgagggcaaggagagaaaaaacaagacctattataagtttgagaaactggctatcgaccctaatacctgcgaggtgaacacaaagtacaaagccgtgcggacctcaatctacacaaagcatttggagcgctggctgaagtattttcctatcgagcagttccatgtcgtcgatggggatcgcttaattaccgagcctctgcctgagctgcagttggtcgagaaatttctgaatcttccccctcgaattagtcagtacaatctttattttaatgccacacgcggcttctattgtttgcggttcaatataatattcaataaatgcctggccggttcaaaagggcgcattcacccagaagtggatccctccgtcatcactaagttgcggaagttcttccatccttttaatcaaaaattctaccagatcacgggtcgcactctgaattggccctag

SEQ ID NO: 119710 - DNA, 969 bp, synthetic construct
  misc_feature 1..969: note = Description of Artificial Sequence: Synthetic coding sequence
  source 1..969: mol_type = other DNA
atgctctttataaagtttattcacctggaggtgtttagcatgcccgagcgggccatcgcccgtcacgaggtgagagagatagagcaacggcacaccatggacgggcctagacaggatgccacgctggacgaagaggaagacatggttattatctacaacagagtgcctaagacggcctctacatctttcacaaatattgcctatgacttatgcgctaagaataagtatcacgtcctgcatatcaatactaccaaaaataatcccgttatgagcctgcaggaccaggtcaggtttgtgaaaaacattacctcctggaaggagatgaaacccggcttctatcacggacacgtgtcatatctggattttgctaagttcggagtgaagaagaagccgatctatattaacgttattcgggatcccattgaacgactagtgtcttactactactttctgcgatttggagacgactaccgccccggtttgcgccgaaggaagcagggagataaaaaaaccttcgatgagtgcgtagctgaggggggctcagactgcgctcctgagaaactctggctacaaattccattcttctgtggacacagttcagagtgttggaatgtgggctcacgctgggctatggaccaggccaagtataatctgattaacgagtactttcttgttggggtgactgaggagcttgaagacttcatcatgctgctggaggctgcccttcccaggttcttccgaggcgccacagagctctatcggaccgccccggacaccgccaccccttcccatagacatggcccaatatgcggctccaagtcgattagctctttactggtcaaggtgtctcctgtctgtaaggactcccactgccactgcagacgtggaactggaactcccaagggcgagacccttgcaaccctggcgccatgcagccagtcttggagctcggtgacacaccgctggtag

SEQ ID NO: 119711 - DNA, 912 bp, synthetic construct
  misc_feature 1..912: note = Description of Artificial Sequence: Synthetic coding sequence
  source 1..912: mol_type = other DNA
atgcttttcatcaaattcatccacctggaagtgttctcaatgcctgagagggccatcgctaggcacgaggtgagggagatagagcagcgccataccatggacgggccacgccaggatgctactctggatgaggaagaggatatggtgatcatctataatcgcgttccgaagaccgcgagtaccagcttcaccaatatcgcgtacgacctctgcgctaagaataagtatcatgttctgcatatcaataccacgaaaaataatccagttatgagtctgcaggaccaggtcaggttcgtcaaaaacataacgagttggaaggaaatgaaacctgggttctatcacggtcacgtcagttatctggacttcgccaaattcggcgtgaagaagaaacccatttacataaacgtgattagggaccctatcgagagactggtctcatattactacttcctgcggttcggcgacgactacagaccgggtcttcggcgtcggaagcaaggcgacaaaaaaactttcgatgaatgcgtggccgagggtggctccgattgcgcccctgaaaagctatggctgcagatcccatttttttgcgggcattcctcagaatgttggaatgtcggttctcggtgggcaatggaccaggcaaaatacaatttaatcaacgagtatttcctggtgggcgtgaccgaagaacttgaggacttcatcatgctgctagaagccgccctgcccagattcttccgtggcgccaccgagttgtaccgcacagcacctgacaccgccactcctagtcatcggcatggtccaatctgtggaagcaagagcatctcttccctgctggtgaaggtgtccccagtatgtaaagattcacactgtctgggtaaatgctcaaggaatggcttgtccgctgtctag

SEQ ID NO: 119712 - DNA, 1071 bp, synthetic construct
  misc_feature 1..1071: note = Description of Artificial Sequence: Synthetic coding sequence
  source 1..1071: mol_type = other DNA
atgggtctgctgaggatcatgatgcctcctaaactgcagcttctcgctgtggttgctttcgcggtcgccatgttatttcttgaaaatcagattcagaagctcgaagagagtcgctctaaactcgagcgggcaattgcgcgccacgaggtgcgcgaaatcgaacagcgccacaccatggacgggccaaggcaggatgccaccctggatgaggaagaagatatggtcattatctataaccgggttcccaaaacagcgtcgaccagtttcaccaatatcgcctatgacctctgcgctaagaataaataccatgtgctgcatattaacacaaccaaaaataatcctgtgatgagtctccaagatcaggtcagattcgtgaaaaatataacctcctggaaagaaatgaagcctggattttaccacggccacgtgagctacttggatttcgccaagtttggtgtgaaaaaaaagcccatctacattaatgttatacgggatccaatagagcgcctggtgtcctactattacttcctcagatttggggatgattacagaccagggcttcggcgtagaaagcagggggataagaagactttcgacgagtgtgtcgccgaaggcggctcagattgtgcccccgagaaactctggttacaaattccattcttctgcggccattcatctgaatgctggaacgtgggtagtcgttgggccatggaccaggccaaatataatctgattaatgagtacttcttagtgggggtgacggaagaactcgaagactttatcatgcttctagaagcagccctcccgcgctttttcagaggggctactgaactgtacagaactggcaagaaaagccaccttcgcaaaacaacagagaaaaaactgcctactaagcaaactattgccaagctgcagcaatccgatatttggaagatggaaaatgagttttacgaatttgccctggagcagtttcagtttatcagagctcatgccgtccgcgagaaagatggcgacctttatatcctcgcccaaaatttcttctatgaaaagatctaccccaagtcgaattag

SEQ ID NO: 119713 - DNA, 690 bp, synthetic construct
  misc_feature 1..690: note = Description of Artificial Sequence: Synthetic coding sequence
  source 1..690: mol_type = other DNA
atgggactgcttaggattatgatgccaccgaaactccagctgctggctgtggtggccttcgccgtagccatgttatttctggaaaaccaaatccagaagctggaggagtcgcgcagcaagctggagagggccattgcgcgacacgaagtaagagagattgagcagaggcatactatggacggccctagacaggatgcgaccctggatgaggaggaagacatggttatcatttacaatcgagtcccgaaaacagcgtctacctcatttactaacatcgcctatgacctgtgcgcgaaaaataaatatcatgtgcttcacataaacacgacaaagaacaacccagtcatgtctctccaggaccaggtccgttttgttaagaacatcactagttggaaggagatgaaacccggcttttatcatggccatgtgtcatatctggacttcgccaagttcggcgtcaagaagaaacctatatacatcaatgtgatccgcgatcctatcgagcgtctggtatcgtactattacttcctaagattcggcgacgattacaggcctggcctaagacgcagaaagcagggcgataaaaagactttcgatgagtgtgtggctgaaggtgggtcagactgcgcccctgagaaactgtggttacagattccattcttttgtggccattccagcgagtgctggtag

SEQ ID NO: 119714 - DNA, 1236 bp, synthetic construct
  misc_feature 1..1236: note = Description of Artificial Sequence: Synthetic coding sequence
  source 1..1236: mol_type = other DNA
atgcggcgtcgaagagctggcgggagaacgatggtcgaacgagcctcaaaatttgttctcgttgtggctgggtctgtgtgcttcatgctgatcctgtaccaatatgcaggccctggactgagcctaggcgcgcctgggggacgagccccaccggacgatctggacctatttcctactcctgacccacactacgagaagaagtactactttcctgtccgtgagctggagagatcacttcgcttcgacatgaaaggggacgacgtaatcgtattcctgcacatccagaaaacaggcgggaccacattcggaagacacctagtgcagaatgtcaggttagaggtgccatgcgattgtaggccaggccaaaaaaaatgcacctgctacaggccaaatcgacgggagacgtggctgttctcaaggttcagcacgggatggagttgcggattacatgcagattggacagaattgactaactgcgtgcctggggtgctggaccgccgggacagcgccgctctacgcaccccccgtaagttttactatataaccctgttgcgcgaccccgtgtcaagatacctgagcgaatggcggcatgttcagcgcggggctacttggaaaacaagcctgcatatgtgtgacgggaggacgcccacaccggaagagcttcctccatgttacgaagggaccgactggagcggctgcactttgcaggaatttatggattgcccttacaatttggccaacaatcggcaggtgagaatgctcgcagatctgtcactggttggttgctacaatctgagctttatccccgaggggaaaagagcccagttgctgctcgagtccgcaaaaaagaacctgagaggaatggccttcttcggcctgactgaatttcagcggaagacccagtatctgtttgaacggacattcaacctcaaatttattaggccatttatgcagtacaactccacaagagctggcggggtggaggtggacgaggatacaatccgaaggatcgaagagttgaacgatctggacatgcagctgtacgactacgccaaagacctcttccagcagaggtaccagtataagcgccaactggagcgaagagagcagcggctgagaagccgggaagaacgtttattacaccgcgcgaaggaagctctgcctcgcgaggacgccgacgagccaggcagagtccccaccgaggattatatgagtcacatcatcgaaaaatggtag

SEQ ID NO: 119715 - DNA, 831 bp, synthetic construct
  misc_feature 1..831: note = Description of Artificial Sequence: Synthetic coding sequence
  source 1..831: mol_type = other DNA
atgctcttcctgtttgccgtgatcgtactacagtacgtgtgtcctggaactgagtgccaactactccggttgcaagccttctcgtccccagttcccgatccataccgaagcgaagacgagtcatcagcgcggtttgtgccaaggtacaatttcaccaggggcgacctgctccgaaaagtcgattttgacattaaaggcgatgatcttatagtgttcctgcatattcaaaagaccggagggacaaccttcggtagacacctggtgcgcaacattcagctcgagcagccatgcgaatgccgcgttggtcagaagaagtgcacctgtcaccgacctgggaagcgggagacctggctcttctctaggttctcgaccgggtggtcctgtggccttcacgcagactggactgagctgactagttgtgtgccatctgttgttgacggtaaaagggacgccaggcttcgcccgtcccgctggcgaatattccagattctggacgccgcgtctaaggataagaggggttcaccgaacactaacgctggagcgaattccccatcaagtaccaagactcgcaataccagtaaatcagggaaaaattttcattatataactattctgagagatcctgtatccagatatctgtctgaatggcggcatgtccagaggggcgctacctggaaggccagtctgcatgtgtgcgacggcagaccccctacatccgaagaactcccgtcctgctatacaggggatgactggagtggatgccctcttaaggagttcatggattgcccctataacctggctaacaaccggtgtgcctgcagccccacttag

SEQ ID NO: 119716 - DNA, 1389 bp, synthetic construct
  misc_feature 1..1389: note = Description of Artificial Sequence: Synthetic coding sequence
  source 1..1389: mol_type = other DNA
atggacgagaagtcaaataagctactgctggctctggtcatgttgttcttgtttgcggtgattgtactacaatatgtgtgtccggggactgagtgccagcttctgcggctgcaagcatttagctctccggtgcctgatccgtacaggtcagaagacgagagctccgcaagattcgtgcccaggtataattttaccaggggggacctgttaaggaaagtagactttgacataaagggagatgacctgatcgtgttcctgcacatccagaagaccggcgggaccaccttcggtcgacacctcgtgcgtaatattcagttagaacagccttgcgagtgccgcgtgggacagaagaagtgcacttgtcacagaccaggcaagcgggaaacgtggctctttagccgattttcaacaggatggtcctgcggcttacatgcagattggaccgagctcaccagctgcgtcccttctgtggtggacggaaagagggacgcacgtcttcgcccttctcgctggaggattttccagatactagatgcggcatctaaggacaagcgtgggtctcctaataccaacgccggcgcgaactcgccctcctccaccaaaacaagaaacacaagcaagtcgggcaaaaacttccactacatcacaattctgagagaccccgtctctcgctacctcagcgagtggcgtcacgtgcagaggggggccacatggaaagcctcgctgcacgtctgtgacgggcggcctccgacatctgaagagcttccgtcgtgttatactggcgacgattggagcggatgcccgctgaaggagtttatggactgtccctataacctggcaaataacagacaagtgcgaatgttgtccgatttgactctcgtcggctgctataatctgtctgtgatgcccgaaaaacagcgaaataaggtgctacttgaatccgcaaaaagcaacctaaagcatatggctttcttcggtctcacggaattccagcggaagacccaatacctgtttgagaagacatttaatatgaattttatatccccgtttacccaatacaacacaacccgggcgtcgagtgtagagattaatgaagagattcagaaacgtattgaggggctcaacttccttgatatggaactttacagctacgctaaggatcttttccttcagcgctatcagtttatgcggcaaaaggaacatcaggaagcgagacgcaaaagacaagaacagcgtaaattcttaaagggacggctgctccaaacgcattttcagagtcagggacaagggcagtcccagaatcctaaccagaaccaaagcaaggagcagaatgacaacacgagcaacggtaccaatgactacatagggagtgtggaaaagtggcgctag

SEQ ID NO: 119717 - DNA, 1818 bp, synthetic construct
  misc_feature 1..1818: note = Description of Artificial Sequence: Synthetic coding sequence
  source 1..1818: mol_type = other DNA
atggctctgccagcctgtgccgtaagggagtttgagccaccccgccagcctgaacgcggggctcctgtgagaactacctgtcctagacggcattcacgggttgaggccgagttagctgctagccgtcccggatccgtggctgctagtgtccgcgctggaccgccacggggagtcagccacgggttccataccagacccttactcgataaacccaggaaagccagcagctctcttgccggcgcggcatgtgcgccgctgtttgcactgttatccagaggcaggcgccgccgaatgcatgtgctgcgacggcgttgggatctgggttccctctgccgtgcactgctgacgcgcggcctggccgcactgggtcacagtctgaagcacgtccttggcgccatattctccaagattttcggcccaatggcctctgttggcaacatggacgaaaagtctaacaaactgctattagccctggtcatgttgtttttgttcgctgtcatcgtcttgcagtatgtctgccccggaactgagtgccagctcttgcgactacaggctttcagtagtcctgtgccagacccataccggagcgaggatgagagttcagctagatttgtgcccagatacaactttacacgcggtgatctgctgaggaaagtagacttcgacattaagggtgacgacctcattgtctttctgcacatacaaaagacgggaggtacaacatttggcaggcaccttgttaggaatattcagctggagcagccatgtgaatgtagagtgggacagaaaaaatgcacgtgccatcggcctggaaagagagagacctggctgttttctcgattctcaactgggtggagttgcgggttgcacgccgactggacagagcttacatcctgcgttccatccgtagtagatggcaagcgcgacgcacgactgaggcccagccggaactttcattatattactatcttaagggacccggtgtcaaggtatctctccgagtggcgacatgtgcagagaggcgcgacctggaaagccagcttacatgtctgtgacggacgacctccaacttcggaggagcttcccagctgttatacaggtgatgactggagcggatgcccgttaaaggagttcatggactgtccttataatctggccaataataggcaggtgcgtatgctttcagacctgacactcgtgggatgctataatctctctgtgatgcccgagaagcaacgaaacaaagtactgctggagtcggccaagagcaatcttaaacacatggccttcttcggactgaccgagtttcaaagaaagactcagtacctctttgaaaagaccttcaacatgaatttcatctctcccttcactcaatacaacactacacgcgctagttccgtagagatcaacgaggaaatccaaaaacggattgaggggttgaatttcctcgacatggaactgtactcttacgcaaaagatctgtttcttcagcgctaccagtttatgcggcagaaagaacaccaggaagcaagaagaaagaggcaggagcagaggaaatttttgaaggggcggctgcttcaaactcactttcagagccaaggccagggccaatcgcagaaccccaaccaaaaccagagccaaaatccaaatcctaacgcaaaccaaaatctcacacagaaccttatgcagaaccttacccaaagtctctcccagaaggagaacagggagagcccaaaacaaaacagcggcaaggagcagaacgacaacacctcaaacggcaccaacgactatatcggttccgtagagaaatggaggtag

SEQ ID NO: 119718 - DNA, 1380 bp, synthetic construct
  misc_feature 1..1380: note = Description of Artificial Sequence: Synthetic coding sequence
  source 1..1380: mol_type = other DNA
atggacgagaagagtaacaagcttttgctggccttggtcatgctctttctctttgctgtgattgtgctgcagtacgtgtgcccgggcactgagtgccagttgctccggttgcaagcctttagctcaccagttcctgacccctatcgtagcgaagacgaaagttcagcaaggtttgtccctaggtacaactttaccaggggcgacttgctccgcaaagtagactttgacataaaaggcgatgatcttattgtattccttcacattcaaaagacgggaggaacaacgttcggcaggcatctggtcagaaatattcagctggagcagccatgcgaatgtagggttgggcaaaaaaaatgcacctgtcaccgacccggtaagcgggaaacttggctttttagccgatttagtacgggttggtcctgcggattacatgctgactggacggaacttacatcatgcgtcccatctgttgtcgatggaaaacgggacgctagactccggccctcccgaaactttcattatattaccattttgagagaccccgttagccgttatttgagcgaatggcggcacgtgcaacgaggtgcaacgtggaaagcaagtctgcacgtttgcgatggtagacctcctacgtctgaagagctgcccagttgttacacaggcgatgattggtccggatgtcctctgaaggagtttatggattgcccctataacctggcgaataatcgtcaggtccggatgctgtctgatcttacactggtaggctgctacaacctttctgtaatgcctgaaaaacagcgcaacaaggttcttctggagtccgccaagtccaatctcaagcacatggctttttttggcctgactgagtttcagcgcaagactcagtatctttttgaaaaaaccttcaacatgaattttatttcccccttcacccagtacaacacaaccagggcaagtagcgttgaaattaacgaggaaatccaaaaaaggattgagggcctaaatttccttgacatggagctgtactcctacgctaaggacctcttcttgcagagataccagtttatgaggcagaaagagcatcaagaggctcgtcgcaagaggcaggagcagaggaagttccttaaagggaggctgctccagacccactttcaatctcaaggccagggccagagtcaaaaccccaaccagaaccagtcacagaacccaaaccctaacgcaaatcagaatctgacccaaaaccttatgcaaaatttgacacaatccttaagccagaaggaaaacagagaaagtcccaagcaaaatagcggcaaggagcagaatgataacacatcaaatggcacgaacgattatataggcagcgtggaaaaatggcgttag

SEQ ID NO: 119719 - DNA, 996 bp, synthetic construct
  misc_feature 1..996: note = Description of Artificial Sequence: Synthetic coding sequence
  source 1..996: mol_type = other DNA
atgctgttgaagcacaacggaaaactgctgctcttctatctcctgtcttaccaagcactcgcctctgattggttttattgcagttttaatcgatggcggattttccagatattagacgctgcccgcaactttcactacatcacgatactgcgcgaccctgtttcaaggtatttgagcgagtggcgtcacgtccaaaggggtgctacctggaaggcgtctctacacgtatgtgatggccgacctcccaccagtgaagaacttccgtcttgctacacgggcgatgattggtccggttgtccattgaaggagtttatggattgcccttataatttggccaataacaggcaggttcgaatgctgagcgatctcactttagtcggctgctataatttgtcagtgatgcccgagaaacaacgcaataaggttcttttggagtctgctaagtctaacctgaaacatatggcctttttcgggttgaccgagtttcaaaggaagactcagtatctcttcgaaaaaacatttaacatgaacttcatttcacccttcacccagtacaacaccacccgggcttcaagcgttgagatcaacgaggagattcagaagcggatcgaaggtttgaattttctggacatggaactgtactcttatgccaaggatctattcctccagagataccaatttatgcggcagaaggagcatcaggaagccaggaggaagaggcaggaacagcgcaaatttctgaaagggaggctcttgcagacccactttcagagccagggccaggggcagtctcagaatcctaatcagaaccagtcccaaaaccccaacccaaacgcgaatcaaaatctgactcaaaatctgatgcagaatctcacgcagtctctgtcacagaaagagaatagggaatcaccaaaacagaacagcggcaaggagcagaatgacaacacaagcaatggaaccaacgactacatcggtagtgttgaaaagtggagatag

SEQ ID NO: 119720 - DNA, 1938 bp, synthetic construct
  misc_feature 1..1938: note = Description of Artificial Sequence: Synthetic coding sequence
  source 1..1938: mol_type = other DNA
atggctctgcctgcatgtgctgttcgggaattcgagccccctcgacagcccgagaggggggcgccagtcaggacgacgtgcccacgacgtcactctagggtagaggcagagctggcagcctcccgacccggctctgtcgccgcctcagttcgcgccggcccccctcggggggtatcccatgggttccacacccggcccttgttggacaaacctcgtaaggcttcgtcatcgctggctggcgccgcgtgtgcacctttgttcgctctgctatctcgcggcaggcggcgtcgtatgcacgtgcttcggagacgatgggatctgggaagcctatgccgcgctctcctgaccagaggactggcagccctcggacacagccttaagcacgtcctcggggccatttttagtaagatcttcggcccaatggccagcgtggggaatatggatgaaaagagcaataagcttctgttagctctggttatgctgtttttattcgccgtgattgtattgcagtatgtgtgcccagggactgagtgtcagctgctgaggctccaggcattctctagcccagtgcctgacccttatcgctccgaggacgagtccagcgcaaggttcgtgccgaggtacaactttactcgaggcgatttactcaggaaggtggacttcgatattaagggagatgatctgatcgtttttctgcacattcagaagactggcggcactacctttggcagacatctggtgcggaacatacagctggaacagccatgtgagtgccgagtgggccagaagaagtgcacttgccataggcctggaaagcgggagacatggctctttagtagattcagtacaggctggagttgtggcctgcatgcagactggaccgagctaaccagctgcgttccctccgtggtcgatggtaagagagacgccaggctgcgcccgtccagatggaggatcttccaaatccttgatgcagcctctaaagataaacggggtagcccgaacacgaatgccggcgcaaattcaccttccagcacaaagacaagaaacacctccaagagtggcaagaattttcactatattaccattttgagagaccctgtgagtcgctatctgagtgagtggagacacgttcagcggggtgctacgtggaaagccagcctccacgtttgtgacggcaggccaccgacttctgaagaacttccctcatgctacacaggcgatgattggagtggctgtcctctgaaagagttcatggactgcccctataatcttgccaacaaccggcaggtgagaatgctcagtgacctgactttagtcggatgctataatttatccgtcatgccagaaaagcaaaggaacaaagtcctgctggaatcagcgaagagcaacctgaagcacatggcctttttcgggctgaccgagtttcaaaggaaaactcagtatctattcgagaaaacgtttaatatgaactttatcagcccttttacccagtacaatactactcgtgccagttccgtcgagatcaacgaggaaatccagaagaggattgaggggctcaatttcctggatatggagttgtattcctatgccaaagacctctttctgcagcgctatcagttcatgagacagaaagaacaccaggaagcgcgtaggaagcgacaggagcaaaggaaattcttgaaaggaagactcctccagacgcacttccagagtcagggtcaaggtcagtctcaaaatcctaaccagaatcaatcccagaaccctaatccgaacgccaaccagaatcttacgcaaaatctaatgcagaatcttactcagagcctcagccagaaagaaaacagagagtctcccaaacaaaattctggcaaagaacagaatgataacacctccaatggtaccaatgactatatcggctcagtagaaaaatggcgctag

SEQ ID NO: 119721 - DNA, 1416 bp, synthetic construct
  misc_feature 1..1416: note = Description of Artificial Sequence: Synthetic coding sequence
  source 1..1416: mol_type = other DNA
atggacgagaggtttaataaatggctcctcacgccggtactgaccttgctgtttgtggtgatcatgtatcagtacgtgtccccttcctgtacctcaagctgcactaacttcggagaacagcctagagctggcgaagctgggccacccgcggtgccaggccccgctcgacgggcacaagccccacccgaagaatgggaaaggaggccgcagctgccgccgccaccccgaggacctccagagggccccagaggggctgcggctccagaggaagaggacgaggagcccggcgaccctcgggagggagaagaagaggaggaagaggacgagccagatccggaagcccccgagaatggttccctcccaagatttgtccctcgtttcaatttctcacttaaagatcttacaaggttcgttgacttcaatatcaaaggccgggacgttatcgtgttcttgcacatccagaaaactggaggaacaaccttcgggcgccacctcgtgaagaatatacggctggaacagccgtgttcctgcaaggcgggtcagaagaagtgtacctgccaccggccaggcaaaaaggaaacatggctgttcagccgattttcaactggttggtcatgcggattgcacgccgattggacggagctcacaaattgcgtgcctgctataatggaaaagaaggactgccctcgcaaccatagtcatactcgaaatttctactatattaccatgcttagagatcctgtctctagatatttaagtgaatggaagcacgttcaacgtggcgccacgtggaaaactagcctgcacatgtgtgatggacggtcccccactccggatgaactaccaacatgttaccctggggatgactggagtggggttagcctccgggagttcatggattgcacttacaatttagccaacaacagacaagtgcgcatgctcgccgacttgagcctggtcggctgctataatctcacgttcatgaacgaaagcgaacgcaataccatcttactgcagtctgccaagaacaatctcaaaaacatggccttctttgggcttaccgagtttcagcgaaaaacccaatttctgtttgaaagaacattcaacttgaagttcataagcccttttactcagttcaacattactcgggcgtcgaatgtggaaattaatgagggcgcccgtcaaagaattgaggacctcaacttcttggacatgcagctgtatgagtatgctaaggacctgttccagcaaagataccatcataccaagcagcttgagcaccagagggatcggcagaaaagacgggaggaacgtcgacttcagcgagaacaccgagaccaccagtggcctaaggaggacggcgctgctgaggggaccgtgaccgaagattataactcacaggtggtgcgctggtag

SEQ ID NO: 119722 - DNA, 543 bp, synthetic construct
  misc_feature 1..543: note = Description of Artificial Sequence: Synthetic coding sequence
  source 1..543: mol_type = other DNA
taagcacagactccaccgccccccccggcagccgtggcagtggccgtcacccccgtaccccaatttccccgagcatgcacagaagctgagtttgcctgtcatagttacaatgaatgcgttgcactagagtatcgctgtgaccgccgacctgactgtcgagacatgagtgacgagttgaattgcgaagagccggtgctaggaatcagtcccacattcagtctgctggtggagaccacatcactcccgccccgaccagagactaccatcatgagacagccccctgtaacccacgctccccagccactcctccccggtagcgtgagacccctaccatgtgggccccaggaagcggcttgcagaaacgggcactgcatccctagggactacctctgcgacggtcaggaggactgcgaagatggctctgatgagctagactgcggccctccgcctccttgtgagccaaacgagttcccatgcggaaatgggcactgtgctttgaagctttggagatgtgatggtgatttcgattgtgaggatcgatag

SEQ ID NO: 119723 - DNA, 285 bp, synthetic construct
  misc_feature 1..285: note = Description of Artificial Sequence: Synthetic coding sequence
  source 1..285: mol_type = other DNA
tgaggacacccacatagcccctcatccggtgcggcgtgggcagccgccttcctcggagggcggcctcccggaacatcatgctgtaccctgtccgtgcaacccctccgcacccaggccgccacagctgcaggatcacccacaaggtgggcacagcctcggcctctgccttcgtgttccagcaagaatcctgaactaggaccggaactacctcgtgatgtgtatatgccaggaccctggactctgggtgaaggccccggccagtgtcccgcggggtacccccgctag

SEQ ID NO: 119724 - DNA, 13176 bp, synthetic construct
  misc_feature 1..13176: note = Description of Artificial Sequence: Synthetic coding sequence
  source 1..13176: mol_type = other DNA
atggggtggcgagctgctggggcattactcctagccctgctcctgcacgggaggcttctagccgttacacacgggcttcgggcctatgacggcctcagtctgcccgaagatattgagacagtcactgcctctcaaatgcgctggacccactcctatctcagtgacgacgaggacatgctggcggattccatcagtggagatgacctggggagcggggatctcgggtccggagattttcagatggtgtattttcgagcattagtgaactttacgagaagcatagaatattccccccagctcgaagacgctggctcaagagagtttagagaggttagcgaggcagtggtggacactttggaatccgagtacttgaaaattcccggtgaccaggtagtgtctgtggtgtttataaaggagcttgatggatgggtgttcgtggaattggatgttggaagcgaggggaatgccgatggcgcccaaatccaggaaatgctgctgcgcgttatcagttccggaagcgtggcgtcgtacgtcaccagcccgcagggttttcagtttaggagactcggcaccgttccgcagtttccacgcgcctgtaccgaggccgaattcgcgtgtcacagttataacgagtgtgtggcactggagtacagatgtgatcggcgtcccgactgtagggatatgtccgatgagcttaattgtgaggagcccgtgttggggatttcccccactttttccttactggtggagacgacctctttgccgccccggccggaaacaaccattatgagacaaccccccgttactcacgctccacagcccctgttgcctggcagcgttaggcccctcccatgtggcccccaggaggccgcctgcaggaatggtcattgcatccccagggactatctgtgcgacggccaggaggactgcgaggatggatcagacgagttagactgcgggccccctccaccgtgcgagccaaacgaattcccttgcggcaatgggcattgtgcgctgaaactgtggcgttgtgacggtgacttcgattgtgaagatagaactgatgaggcaaactgccccaccaagaggccagaagaagtctgcggtcctacacagttccgctgtgtttctactaacatgtgtatcccagcatcgttccattgtgatgaagagagcgattgtcccgatcggtctgacgagttcggctgcatgcctccccaagtagttaccccaccacgcgaaagcatacaggccagccgcggccagaccgtgacttttacgtgcgtggcgatcggagtacccacacctataattaactggcgactgaattggggtcatattcctagccatcctagggtgacagtcacttcagaggggggacggggtaccctgataatacgggacgttaaagagtctgatcaaggcgcgtatacttgcgaggcgatgaatgcacgagggatggtgttcggaattcctgacggagtgctggaacttgtcccgcagcgtggtccctgtcctgatggtcatttttatttggaacactcagctgcgtgtctgccatgtttttgcttcggcatcacatctgtctgtcagtccacacggaggttcagagatcagatcaggcttcgttttgaccaaccggacgacttcaaaggcgtcaacgtaacaatgcccgcccagccaggcacaccaccacttagttctacccagctccagatagatccgagtctgcatgagtttcaactggttgacctcagccggcgttttctggtgcacgattcgttttgggctctacctgagcagtttttgggaaacaaggttgattcatatggtgggtccctgcgctataacgtgaggtatgagttggccaggggcatgttggagcctgtgcagaggcccgacgtggtgctgatgggggcaggttaccgtctgctatctaggggtcacacgccgacacagccgggcgctctcaaccagcgccaggtacaattttccgaagagcactgggtgcacgagagtgggagacctgtccagcgtgccgagctgttacaggtccttcagtccttggaggccgttctcatccagactgtatacaataccaaaatggcctcagtaggactctccgatatcgcaatggatactacagtcacacacgcaacttctcacggccgggcccattctgttgaagaatgtagatgcccaatcgggtactccggcctttcttgcgaatcatgcgacgcgcactttacacgcgtgccagggggcccatacctcggcacatgtagcgggtgcaactgcaacggacacgccagctcatgtgatcctgtgtatggccactgtctgaattgtcagcataacaccgaggggccacagtgtaacaaatgtaaggccggctttttcggcgatgcaatgaaggctacagccacaagctgcaggccctgtccatgcccttatatcgacgcctcacgaagattctctgacacttgttttcttgacacagacggccaggcgacctgcgatgcctgcgccccgggctacacaggccgtcgctgcgaaagctgcgcaccaggatacgaaggtaatcccatacagccaggcggcaaatgccgtccagtgaatcaggagatcgtgagatgtgacgaaagaggatccatgggcaccagtggagaagcttgccgttgcaaaaataacgtggtgggccgcctgtgtaacgagtgtgcggacggatcctttcatctctcaactcgtaaccccgatggatgtcttaagtgtttttgcatgggagtgtctagacattgcacttcctcctcttggtcccgcgctcagctgcacggggcttctgaggagcctggccatttctccctgaccaacgctgccagcacccacaccacgaacgagggcatcttctctcccaccccgggagagctgggattttcttcctttcaccgcctactgtccggtccctacttttggtcgctgccatcacggttcctcggggataaagtgactagctacggtggtgaacttcggttcaccgttacccagagatctcaacccggcagcacccccctgcatggccagcctctcgtcgttctccagggcaataacattatcttggaacatcatgtagcacaagagccatcacccggccagccttccacattcatcgtcccattccgggagcaggcctggcaacgacccgacgggcaacccgcaacaagagagcacttgctcatggcattggccggtattgacacacttctgataagagcatcttacgctcaacagccagcagagtcacgagtgagcggtattagcatggacgtggcagttccagaggaaactgggcaggatcccgcactggaggtcgaacagtgctcgtgtccccccggctaccgcggaccttcctgccaggactgcgacacaggttacacccgtactccaagtggattgtacttgggcacgtgcgagagatgcagctgccatgggcactccgaggcatgcgaacccgagaccggtgcttgtcagggttgccagcatcatactgaaggccctagatgcgagcaatgtcagccgggctactacggagatgcccagaggggtactccacaggattgtcagctctgcccatgttacggcgatcccgctgctggacaggctgctcacacctgttttctggatacggacggtcatcccacctgcgacgcctgctcccccgggcactcaggacgtcattgcgagaggtgcgctccagggtactacgggaacccttctcagggacaaccctgccaaagagacagccaggtgccagggccaattggctgtaactgtgatccgcagggtagcgtctcttctcagtgtgatgcagctggccagtgccagtgcaaagcacaggttgagggcctcacctgcagccattgtaggccccatcattttcacctgtctgcaagcaatcccgacggctgccttccttgtttttgcatgggtatcacgcagcagtgcgcgagtagcgcctatacccgccacctgattagtacgcactttgccccaggtgattttcaaggattcgccctagttaacccccagcgcaactcccgtctgaccggcgagttcacggtggaaccagtgcctgagggggcgcagctgtcgtttgggaactttgcgcaacttggccatgaatctttctactggcagcttcccgagacctatcagggggataaggtcgcggcatacggcggcaaacttcgttacactctgagctatacagcagggccacaaggttcgcctctcagcgatcccgacgtccagatcaccggaaacaacattatgctggtagcgagtcagccagcgctgcaggggccagagaggcgaagttatgagattatgtttcgggaagagttctggaggcgtcccgatggacagcccgcaacaagggagcacctcctcatggccctggctgacctggacgaacttttgataagggccacattcagtagtgtgcctctcgccgcatccatttcggccgtgtctcttgaggttgcccagcctggcccatccaatcgccccagagccctggaggtggaagaatgcaggtgccctccaggctacattgggttatcctgccaggactgcgctcccggttacactcggaccggtagcggactatatcttggacactgtgagctatgtgagtgcaacggacacagcgacctgtgccaccctgagaccggcgcctgtagccagtgccaacataacgccgcgggagagttctgtgagctctgcgctccagggtactacggtgacgccactgccgggacccccgaggattgtcaaccttgtgcttgcccactgaccaatcctgagaatatgttcagtcgtacatgtgaatccttgggcgccgggggctaccgatgtacggcctgcgaaccaggatacacagggcagtactgtgaacagtgtggaccaggctatgtgggtaatccctctgttcagggcggtcagtgcctgcccgagactaaccaggcaccgttagtggttgaagtccacccagccagaagcattgtgccccagggcgggtcccatagcctccgctgccaggtttctggctcacccccacactatttctactggtcccgggaggacggccggcctgtacctagcgggacacagcaacgacaccaaggctccgaactgcatttcccgtcagtacagccaagtgatgctggagtgtacatatgcacttgcagaaatctccaccagtctaacacgagtcgggccgaacttctggtgactgaggccccaagtaaaccaataacagtgacagtggaagagcagcgttcccagtcagttcgccccggcgcagatgttacctttatttgtacagcaaaatctaaaagtcctgcttacacactggtctggacaaggttgcacaacgggaaactccccactcgggccatggatttcaacggcattctgacaatccggaatgtacaactcagcgacgcggggacctacgtgtgcaccggcagtaacatgtttgccatggaccagggtacagccacactgcacgtgcaagccagcggcacacttagcgcccccgtggtgtctattcaccctccacagctgaccgtccaaccaggacagctcgcagaatttcgatgctctgccactggttccccaacccctactctcgagtggacagggggtccagggggacagctaccggccaaggcccagatccatggcggcatcctccgcctaccggccgtggaaccgacagaccaggctcagtacctgtgccgtgcgcattcttcagccggccagcaggttgccagggcagtgctccatgttcacggcggcggcggacccagagttcaggtctcgcccgaacgcactcaagtgcacgccggtcgaacggtgcgtctctactgccgggctgccggggtccccagtgccactattacgtggagaaaggaaggtggcagcctgccacctcaggcgcggagcgaacggaccgatatagctactctgctgattccggccatcaccacagctgacgccgggttctatctctgtgtggcaaccagcccagccggtactgcgcaagctcgcatccaggtcgttgtgctgtcggcttccgacgcctcccctccacccgttaagatagaatcttcctccccttccgtcaccgaggggcagacactggatctgaattgcgtcgttgccggctccgcccacgctcaggtgacttggtatcgtcggggaggtagtctgcccccgcacacccaggtgcatggatccaggctcagactcccacaagtgtccccggctgatagtggggaatatgtatgtcgagttgaaaacggcagcgggcctaaagaggcatcaatcactgtgagcgtgctgcacggtacacacagtggacccagttacacccccgtacccggctctactaggcccatacgcattgagccatctagcagccacgtagcagaaggccaaacgctagacctcaactgtgtggtacccggccaagcgcatgcgcaggtgacttggcacaagaggggaggatcactaccggcgagacatcagacccacgggagcttgttacgtcttcatcaggtcactcccgccgacagcggcgagtacgtctgtcacgttgttggaacatcaggtccactcgaagcttccgtgcttgtcaccatcgaggcatccgtgatccccgggcctatcccacccgtacgtatcgaatcttcttcctctacggttgctgaaggacaaacattagacctgtcatgtgtcgttgccgggcaggctcatgcacaggtgacatggtataagaggggtggaagccttcctgcacggcaccaggtcagaggttcccggctttatatattccaagcttccccagcagatgctggacagtacgtctgccgcgcctcgaatgggatggaagcgtcaattaccgtgactgtgactggcacccagggcgcgaatctagcctaccccgctggctctacgcagcctataaggatagaaccatctagctctcaagtcgctgagggacaaactttagatcttaactgcgtggttccagggcagtcccacgcacaggttacctggcacaaaagaggcgggtctctgccagtgagacaccaaactcatggatccctcctgagattgtaccaagcatccccagccgacagcggcgagtacgtctgtcgagtgctcggcagtagtgtgcccctggaggcctcggtgctggtaactatcgaaccagcggggtcagtccccgcgctgggagtgacacccaccgtacggatagagagctcatctagccaggtggcggagggtcagacattggatctaaactgtttagttgcggggcaggcccatgcacaggtgacatggcacaagaggggtggctctctcccggcacgacatcaagttcacgggtcccgcctgagactcctgcaagtgaccccagcagactctggcgagtacgtttgcagagttgtgggctcatcaggcacccaggaagcatctgtgctggtgacaatccagcagcgcctttccggttcccattcccagggagtagcctatccagttagaattgagtccagctcagctagccttgctaacggtcatactttggatctaaactgcctggtggcatcccaagccccacacactattacatggtacaagcgcggaggcagcttgccctcgcggcatcagatcgtaggttcacggctgagaattccacaggttactcccgctgattccggggaatatgtttgtcatgttagtaacggggccggaagtagagaaacaagtcttattgtaacaattcagggcagcgggtcgtctcacgtcccatcggtcagtccaccgattcgaattgaatcctcatcccccactgtggtagaggggcagacactggatctgaattgtgtggtggctagacagccgcaggcaatcattacgtggtacaagagaggcgggagcctgccttcacgacatcagactcacgggtctcatttaagacttcaccagatgtccgttgctgacagcggagagtacgtgtgccgggctaataataacatcgacgctctcgaggcttctatcgtgatctcagtgagcccctccgccggaagcccttctgccccaggaagttcaatgcccatacggatagagtcctcttcaagccacgtggcagaaggggagaccttggatctgaactgtgtagttccgggtcaggctcacgcccaggtgacgtggcataagagaggcggaagcctcccatcccatcatcagactcggggatcaagactgcgactccaccacgtctcgcccgcggattctggcgagtatgtgtgtagagtgatggggtcatccggtcctctggaagcgtccgttctggtgaccatagaggcctcaggctcatcggcggtgcatgtgcccgcacccggaggggccccacccattaggattgagcctagcagctcccgcgttgcagagggacagacacttgatttgaaatgtgtcgtgccaggacaagcccatgctcaggttacctggcataaacggggcggaaatctccctgccaggcaccaggttcacggacctctcctgcgcctgaatcaggtgtcccccgctgattctggtgaatactcatgtcaggtcacaggatctagcggaaccctcgaggctagcgtgctggtaacgatcgaacccagctcccctgggcctattccggcacccggactggcacagccgatctacattgaggcctcctctagccacgttactgagggccagacgttagatcttaactgtgttgtgcccggtcaggctcatgcgcaggtgacatggtataagagagggggctccctgcctgccaggcaccaaacacatggcagtcaactccggctgcacttagtgagcccggccgacagcggggagtacgtgtgccgggcagcgtcgggcccaggccctgagcaggaggcttccttcactgtaaccgtccccccatctgagggtagctcttaccgactgcgctctcccgtgatttcaattgaccctccttcttctacagtgcagcagggccaggacgcctccttcaaatgccttatacacgatggtgccgctccaatttctctggagtggaagacaagaaaccaagaactggaagacaatgtgcatatctcaccaaatggttccatcataacaattgtgggaacccgccctagcaaccatggaacatataggtgcgtcgcctccaatgcgtacggggtcgcccagtctgtcgtgaacctctccgtgcatggtcccccgaccgtgagtgtgcttcctgaaggcccagtgtgggttaaggtgggcaaggccgtgacattagagtgtgtgtccgctggcgagcccagaagttcagctagatggaccagaatatcatccacaccggcaaagttggaacaaaggacttatggacttatggacagccacgccgtgcttcagatctcttctgcaaagcctagtgacgcaggcacttatgtgtgtctggcccagaatgccctaggcacggcccaaaagcaggtcgaagtaatcgtggataccggagcaatggcccccggggctccgcaggttcaagcagaagaggccgagcttaccgttgaagccggtcacaccgccaccttacgctgctctgccacgggaagccccgctccgaccatccactggtctaagctgcgctctcctttgccgtggcaacacaggctggagggggacacccttattataccaagggtggcacagcaggatagcggccagtatatctgtaacgctactagtcctgctgggcacgccgaggctactataattctccacgttgaaagtcccccctatgctacaacagtcccggagcatgccagtgtgcaagccggggagacagtgcagctgcagtgtcttgcccacggtacacctcccctcacttttcagtggagtagggttggctcttctctgcctggccgagctaccgcaaggaacgagctgttacattttgaacgcgccgctccagaagattctggaaggtaccgatgtcgtgtcaccaacaaagtcggatcagcagaggcctttgcccaattgctcgttcagggacctcccggctctctcccagctacaagcattccagctggaagcacgcccaccgtgcaggttactccccaactggagacaaagtctatcggggcctctgtcgagtttcactgcgctgtcccctcggatagaggcacacaacttcgatggtttaaggagggcggacagttgccaccagggcattcagttcaggatggcgtattgaggattcagaacttggaccagagttgtcaaggtacgtacatctgccaagcacatggcccttggggcaaagcgcaagcatctgcacaactggtcatccaggctctcccatccgtcttgataaatattcgcacgagtgttcagaccgtggtggttggtcacgccgttgagtttgagtgcttggccctcggtgatcccaaaccccaggtgacttggagtaaggttggaggacatcttcgcccaggaattgtgcaatccggtggagtagtgcgcattgcccacgttgaactggcagacgcaggacagtatcgatgcacagccactaacgctgccgggaccacccaaagtcacgtgctgctgctcgtgcaagcactgccacagatcagcatgccccaggaggtgagagttcctgctgggtcagctgcagtcttcccatgtattgcttctggctaccccacacccgatatcagttggagtaaactggatgggagcctgccaccggatagccgcctcgaaaataacatgctgatgcttccctctgtaagacctcaggacgctgggacttacgtgtgtactgctacaaataggcagggaaaggtcaaagcattcgctcacctccaggtcccggagagggtggtgccttatttcacccagactccttactcttttctccccctgcctactatcaaagatgcttatagaaaatttgagattaagatcacattcagacctgattcggccgacggaatgctcttatataacggacagaaacgagtcccaggctccccgacgaatctggccaatcgccagccagatttcatctctttcggcctggtgggagggcggcccgagttccggtttgacgccgggtcgggtatggcaaccattcgtcatcccacccctctggctctggggcatttccacaccgtcacgctgttgaggtccttgacgcaggggtcacttattgtgggagatctggctcccgtgaacggcacatctcaagggaagttccagggcctcgacctgaatgaggaactgtatctagggggataccccgactatggagccattccaaaagctggcctgtcttctgggtttatcggctgcgtgcgcgagttgcgcattcagggcgaggagatcgtgttccacgacctcaatttgactgcccacggaatcagccattgcccaacctgcagagacaggccttgccagaatggcggacagtgtcatgactctgaaagttctagttacgtgtgcgtctgccctgcgggcttcacggggtctagatgcgagcattcccaggccctccactgccatccagaggcgtgtggacctgatgcaacttgtgtgaacagacctgatggcagaggatatacctgtcgctgccatctcgggcgaagcgggctcagatgtgaagaaggggttactgtgaccacccccagtttgtccggtgccggcagctatctggcattaccagcattaactaatacccaccacgagctgcgcttagacgtcgaatttaaacccttagcccccgatggcgtcctcttattttcaggcggcaagagcggtccagtggaagactttgtgtctcttgctatggtgggcgggcatcttgagttccgctatgagctcgggtcagggcttgccgtgctgcgcagtgccgaaccactggccctgggccggtggcacagggtgagtgcagagcgactgaataaggatgggtcactccgcgtcaacggggggcggccagtgctgagaagttcccccggcaagtcccaggggcttaaccttcatacactcctctacctagggggcgtagagcctagcgtccctctctctcccgccacaaacatgagtgcccacttccggggatgcgtgggagaggtgtccgtgaatggaaaacggctggacctcacatattccttcttaggaagtcagggtatcggccagtgctacgatagctcaccatgtgaaagacagccctgtcaacacggggcgacttgtatgccggccggggagtatgaatttcaatgcttgtgtagagatgggtttaagggtgatctctgtgagcacgaagagaacccttgtcagctgagagagccttgcttgcatgggggcacttgccagggaacccgctgcttatgtctccctgggttcagcggccctcgatgccagcaaggtagcgggcatggaattgcagaatccgattggcacctcgagggctccgggggtaatgacgcgccagggcaatacggcgcatacttccacgatgatggattcttagcattcccggggcacgtcttcagccggtccctaccagaggtcccggaaactattgaactagaagtgcggacatccacagcctcagggctcctgctgtggcagggcgtggaagtgggcgaggcgggccaggggaaggactttattagccttgggctgcaggacgggcaccttgtctttcgttaccagctgggctccggtgaggcaagattggtttcagaggatcctattaacgacggagagtggcatagggtgacagctctgcgtgagggacgaagagggagtatacaggtagatggcgaggagttggtgtccggtcgtagtccaggacctaacgttgccgttaacgccaagggcagtgtttacataggaggagctccagatgtggcaacccttacgggcggacggttttccagcggtatcaccggctgcgtgaagaacttggttctgcactcagcccgccctggcgctcctccgcctcaacctctggacttgcaacacagagcccaggcaggtgctaatacgcgcccttgcccaagttag

SEQ ID NO: 119725 - DNA, 720 bp, synthetic construct
  misc_feature 1..720: note = Description of Artificial Sequence: Synthetic coding sequence
  source 1..720: mol_type = other DNA
gtcacccacggcttacgcgcctacgacggcctatctctgccagaagacattgaaactgttaccgcttctcagatgcggtggacacacagctatctgagcgatgatgaagatatgttggccgatagcatcagcggagatgatcttggctctggcgacctcggttccggtgactttcagatggggtcatggatggctggctttctgtggtcctggatgtgggcaaggaaaggcatgcggatgggtctcaggttcaggaggtgttgcagtggcagttcacccgcggccctgtggccaccaacctctcctctgccccgagacagttcatccgatgcatgggcgcaatgcccgtcctcacaggaaccagctcgtagaccatctctgccagctactgccaccatgagtgtttggccgtggtccatagctgtgacgggcgggccaacagctggcacttgcctcatgtcgtccattgtaagaagtcagtcgtgggtctcagccccgcattcactctccctgtggagaaggcacttataccgcccaggccagaggcaaccatcatgtgacagtcatcaatctccgacactccttagcccctgttttcccgtccctagcggaccttgcccagtgggacctcgacgaccacacgctgcaatgggcaccgcctcccctgagactacatccgccacagacagacgcactgcccgcacagcggccatgtcctag

SEQ ID NO: 119726 - DNA, 567 bp, synthetic construct
  misc_feature 1..567: note = Description of Artificial Sequence: Synthetic coding sequence
  source 1..567: mol_type = other DNA
atgaacgccggtgcatctgtgctgacgttcccctgggccgtttatgggcttcctagggcacgcccagcagtcaccgatctgacaggaccgcttccaccctcttctccagcattgccttccgtccttatcaacattcggacctccgtacagacagtggtggttggccacgccgtcgaattcgaatgccttgcactgggtgatccaaagcctcaggttacctggtcgaaagttggcggacacttgcgacctggcattgtccagtcgggtggagtcgtgcggattgctcatgttgagcttgcagatgcaggtcagtataggtgtaccgcaacaaacgcggcaggaacaacccagtctcatgtgttactgctggtgcaggctctgccccagatctccatgcctcaggaggttagagtgcccgcgggcagcgccgctgttttcccttgtatcgcctctggctacccaactccagacataagttggtccaagctcgacggtagtctgccccccgattcccggttggaaaataacatgctaatgctgccttccgtacgccctcaggacgcctag

SEQ ID NO: 119727 - DNA, 594 bp, synthetic construct
  misc_feature 1..594: note = Description of Artificial Sequence: Synthetic coding sequence
  source 1..594: mol_type = other DNA
tgaaccccaagcggcctctacctggggacctgtgagcgctgttcttgccacgggcatagtgaggcctgtgagcccgagaccggcgcctgtcaagggtgccaacaccacaccgaaggacctcggtgcgagcagtgccagcctggttattacggagacgcacagaggggaacacctcaagactgccaactttgcccgtgctatggagaccctgctgccggacaagcagcccacacttgctttttggatactgacggacaccctacctgtgacgcttgctctcctggacactcaggtaggcactgcgaaagatgcgctcccggttactacggcaacccctcacaaggacaaccctgtcaacgcgactcacaggtcccgggacccatcggttgcaattgcgacccacaaggctccgtgagctctcagtgtgacgctgcagggcagtgtcaatgtaaggtgtctccaaatccatgtccatgcggggcatgttcagcacccctgccccgcccatgcggagaaattcgacagcacctggttgaagcggagacctgggcatggggagccgggcacggaggccagggtagagggtgtccgtag

SEQ ID NO: 119728 - DNA, 492 bp, synthetic construct
  misc_feature 1..492: note = Description of Artificial Sequence: Synthetic coding sequence
  source 1..492: mol_type = other DNA
ccacctgtgaagattgagagctcatcccctagcgtgactgagggacagactctggacctgaattgtgtggtggccggcagtgcgcacgctcaggttacttggtacaggagaggtgggtcactgcccccacatactcaggtgcatgggtcgagacttaggcttcctcaagtgagccccgcagactcaggggagtatgtgtgccgagtagaaaatggctccggtcccaaggaagcgtcaatcaccgtcagctactgcccaccagcatggagttggtgcgtgcccggctccacacgacccatccggattgagccctcttcatctcatgtagccgagggccagactttggatttgaattgtgttgtcccaggacaggcgcacgcccaggtaacatggcacaagagggggggcagcttgcctgccaggcatcagacccatggatctctgctcaggctacatcaggtgacccctgcagactctggcgagtatgtctag

SEQ ID NO: 119729 - DNA, 573 bp, synthetic construct
  misc_feature 1..573: note = Description of Artificial Sequence: Synthetic coding sequence
  source 1..573: mol_type = other DNA
ccagaggacattgagacagtgaccgctagccagatgaggtggactcatagctacctgtctgacgatgaagacatgttggccgactcaatctccggagacgacttgggatccggggatcttggatctggggatttccaaatggtatatttccgtgcactggtcaacttcactagatccattgaatactctcctcagttggaagatgctggatccagggaattccgggaggtaagtgaagccgtcgtggatacgctggagtctgaatatttgaaaatacccggcgaccaggtggtatcagtggtgtttatcaaggaattggatgggtgggtattcgtggagctcgatgtgggatcagagggcaacgctgacggggctcagatccaagagatgctccttcgggtgatcagctccggttcagttgcgagctacgtaacttcccctcaggggtttcaattcagacgcctgggaactggcgagccaattttggtttcagggattgcgagctcgcggctcgtcgggtcgcctttctccgtgtcggcaattggctctcaactagggctggctcaccactag

SEQ ID NO: 119730 - DNA, 624 bp, synthetic construct
  misc_feature 1..624: note = Description of Artificial Sequence: Synthetic coding sequence
  source 1..624: mol_type = other DNA
ggggagtccagagagggaagaggctacagacaagtggcccagagggtggctgagcgttctcccgtccccagtttactatcacacagcggatgcgtggtacacacaagattatctcctgtccctagcgttagccccccgataaggatcgaatcatcatcccctactgtggtagaggggcagacactggatttgaactgcgtggtagctcggcagcctcaagccattattacttggtataaaaggggtggaagcctaccctctcgtcaccagacccatggtagtcacctgcggctccatcagatgtccgtcgcagactccggggaatacgtctgccgagcgaataataacatcgacgccctcgaagcgagcattgtgatatccgtgtccccctcggcaggtagtccttcagctcccggatcttcgatgcccatcaggattgagtcttcctctagtcacgtagccgaaggtgagacgctggacctgaattgcgtagtgcccggacaagctcacgcccaggttacttggcacaagaggggaggaagtctgccatcccatcaccaaacccgcggatccaggctcagattgcaccatgtctccccagctgattcgggcgagtatgtttag

SEQ ID NO: 119731 - DNA, 1104 bp, synthetic construct
  misc_feature 1..1104: note = Description of Artificial Sequence: Synthetic coding sequence
  source 1..1104: mol_type = other DNA
atgggctggcgacgcggcaggggcgctccccgtttcccagatggcatggcagcgggccaaaggcggtcttccctctcccgtcttgggtcacaggcagagggcctcctgactagccagacaatgggcgggcaggccgagacactactgacttcacaaaccgggtggcttcttggaagggggtgcaatctgggcagcccgggaggccaggtctcttgggacaaggtccgaattccaggcgtcttacagcgcctcggagtcacctacttcgtggtggccgtactggaacttctttttgccaaaccagtgccagagcattgtgctagcgaacggtcttgtctgtcactcagggacattaccagcagttggccccagtggctattgatcctcgtcttggagggcttgtggctcgggctaacctttcttctgcccgtgccaggctgtcctacgggatatctgggacccggtggcataggggatttcggtaaataccccaattgcacaggcggtgccgcggggtatattgatagattgctattgggggatgatcacctgtaccaacacccctcatccgctgtgctctatcacacagaagtggcttacgatcctgagggtatccttggaacaataaattccattgtgatggcatttttgggagtgcaggcgggcaagatcctgttatactacaaggccagaactaaggacattctgatccgtttcaccgcatggtgctgtatccttggcctgattagcgttgccttaacaaaggtaagcgagaatgagggcttcatacctgtgaataagaacctgtggtcactgtcgtacgttactacgctaagcagctttgctttcttcatcctgctagtgttatatccagtcgtagatgttaaaggactctggaccggcactcctttcttttatcccgggatgaacagcatcttggtctacgtgggacatgaagtcttcgagaactactttccattccagtggaagcttaaagacaaccagtcccataaggaacacctgacgcagaatatcgttgccaccgcactttgggttctcatcgcctacattctatatcgcaaaaagatcttttggaagatttag

SEQ ID NO: 119732 - DNA, 669 bp, synthetic construct
  misc_feature 1..669: note = Description of Artificial Sequence: Synthetic coding sequence
  source 1..669: mol_type = other DNA
atgtctggcgccggccgagccctcgccgcccttcttttggccgcctcagtgctctccgccgccctacttgcgccaggcgggtcttccggaagggatgctcaagctgccccccctagagatttggacaagaagaggcacgcagagctcaaaatggaccaggctctattactcattcacaacgagcttctatggactaatctgactgtctactggaaatctgaatgctgttaccattgcctgttccaagttctggttaacgttcctcaaagccctaaggccggcaagcctagcgccgcagccgcgtccgtgagcacccagcacggcagtatcctgcaactaaacgacacgctggaggaaaaagaggtgtgtcggcttgaataccgttttggcgaatttggtaattactctctgctggttaagaacattcacaacggcgtttccgagatagcttgtgaccttgccgttaacgaggacccagtggacagcaacctgcccgtctccattgcgttcttaatcggactcgccgtgatcatagtgatatccttcctgcgtctcctcctaagggtcttgctgtgccatccaggctggtctgctgttgcaccctcgaggttgactccctcttccgcttccagagtgcacaccattcttctgccgcagcccccagagtag

SEQ ID NO: 119733 - DNA, 1908 bp, synthetic construct
  misc_feature 1..1908: note = Description of Artificial Sequence: Synthetic coding sequence
  source 1..1908: mol_type = other DNA
atgtccggagcaggacgggcacttgctgccctactgcttgcagccagcgtcctgtcagctgccctactcgcaccgggcggatccagcggtcgggatgcgcaggcagcaccaccaagagatctggataagaagcggcacgctgagctaaagatggatcaggcactgttgcttatccataacgagctgctttggactaatctgactgtgtattggaagtccgagtgctgttatcactgtctgtttcaagttctagtgaacgttccccagagcccaaaggccggaaagcctagtgctgcagctgccagcgtatctactcagcatgggtccattctccaacttaatgacaccctcgaggagaaagaggtgtgtaggctcgaataccgctttggggaatttggcaactactctctgctcgtgaagaatatccataacggcgtgagcgagatcgcctgcgatcttgccgtcaacgaagatcctgtagatagcaatctgccagtgtctatagcgtttctcattggcctggccgttattatcgtgatctcgttcttacgattgttattgagccttgacgactttaacaattggatcagtaaggcgattagctcccgagagacagatagactaatcaattctgagctcggcagcccgtcccggactgacccactagacggagatgtccaacccgccacttggaggctgtccgccctgcccccaagactgcgcagtgttgataccttcaggggcatagccctcatactgatggttttcgtgaattatggaggcggcaaatactggtacttcaaacatgcgtcgtggaatggcttgactgttgcagaccttgtgtttccctggttcgtgttcatcatgggtagttcgatatttctctcaatgacatctatcttgcagagaggctgctcaaagttccggctcctgggcaaaatcgcatggcggtcttttctgctcatttgtatcgggatcattatcgtaaatcctaactactgtctcgggcctctgagctgggataaggtacggatcccgggtgttctgcagcggttgggggtgacttacttcgtggtcgcagtccttgagcttcttttcgcgaaacctgtgccagagcattgcgccagcgaaagatcctgcctctctttgagagatattacatccagctggccccagtggctgctaatactggtgctggagggcctgtggctaggcctgacctttcttctgccagtgcctgggtgtcctaccgggtacttgggcccaggaggaattggcgatttcggcaagtacccaaattgcacgggcggagccgctgggtatattgatagactgttgttgggcgacgaccacctgtatcagcacccttcctctgcggtgctgtaccatactgaggtggcttatgacccagagggcatattgggaaccattaatagcatagtcatggctttccttggagttcaggcgggcaaaatcctgctctactacaaggccaggactaaggatattctgatacgctttaccgcttggtgctgcattctgggcttgattagtgtggccctgactaaagtgagtgagaacgagggattcatccccgttaacaagaacctgtggagcctctcctatgttactacactatcttcctttgcattcttcatactattggtgttgtaccctgttgttgacgtgaaaggcctgtggactggcactccgtttttttatcctggaatgaattctatcctggtttatgtgggtcacgaggtgtttgagaactattttccctttcagtggaagttgaaggataatcagtctcataaagagcacctgacacagaacatcgtggcgaccgcactgtgggtgctcattgcctacatcttatatcggaaaaagattttctggaagatctag

SEQ ID NO: 119734 - DNA, 1992 bp, synthetic construct
  misc_feature 1..1992: note = Description of Artificial Sequence: Synthetic coding sequence
  source 1..1992: mol_type = other DNA
atgaccggtgctcgagcaagcgccgctgagcagagacgagccggccgatcagggcaggcacgggccgccgagcgcgcagcgggcatgtctggggctgggcgggcgctggctgcgttactgttggccgcatccgttttgtcagcagctttgctagcacctggtgggagcagcggtcgggatgcgcaagcggcccctccccgcgatctggacaaaaagagacatgcagagctgaagatggaccaagctttactactgatccataatgagctgctctggacaaacctaacagtttactggaaaagcgagtgctgctatcactgcctttttcaggttctcgtgaatgttcctcagagccctaaggccggcaagccctccgcggctgccgcctcagtgagcacgcagcatggctctattctgcaattaaatgacactttggaagaaaaggaagtgtgtcggcttgagtatcgattcggagaatttggcaactatagcttgctggtgaagaacattcacaatggggtgtccgaaatcgcttgtgacctcgccgtgaacgaagaccccgtggactctaacttgcccgtctccattgctttcctgataggcctggccgttatcatcgtgatcagcttcctccgtctgctcttatctctagacgatttcaataactggatcagcaaagcaatatcttcaagagaaaccgataggttgataaacagtgagctcgggtctccaagtagaaccgacccactggatggcgatgtccagcccgctacttggaggctgtccgctctacccccgcgactgaggtctgttgacacctttcgtggtattgccttaattctgatggtcttcgtgaattacggcgggggtaaatactggtacttcaagcatgcatcctggaatggcctcaccgtggcagacttggtgtttccatggtttgtgtttataatgggatcgagtatctttctctcaatgacctcaatacttcagcgcggctgtagtaaattcaggctccttgggaaaatcgcatggcgatcattccttctcatctgcattgggatcattattgtgaaccccaactactgtcttgggccacttagctgggataaagttcggattcccggcgtgctgcaacgcttgggcgtcacctactttgttgtcgcagtgctcgaactattgtttgctaagcccgtgccagagcattgcgcatctgaaagaagctgcctgtccttgcgagacattacttccagttggccacagtggcttctcattctagtgcttgaggggctctggctcggtttaacattcctgctgcccgtgccggggtgtcctaccgggtacctcggacctggagggattggagattttggaaaatacccaaattgcacgggaggcgcagcagggtacattgataggttgcttctgggggacgatcacctgtatcagcatccgtccagtgcagttctgtaccatacagaagtggcctacgaccctgaaggaatccttggcaccattaacagcatcgtgatggcttttctaggggtacaagctggcaagattctcttatattacaaagctagaaccaaagatatactgattcgcttcacggcttggtgctgcatcttgggcctgattagtgtagcactcaccaaggtgagcgaaaatgaaggctttatcccagttaataaaaatctgtggtcactgagctacgttaccacccttagcagcttcgccttcttcatactgctggtgctctatcccgtggtcgatgtgaaggggttgtggaccggtacaccattcttctacccaggaatgaacagtattctggtatacgtgggccacgaggtgttcgagaactattttcctttccagtggaagctgaaggataaccagagccataaagagcacttgacgcagaatatcgtagctaccgcactatgggttctgatcgcgtacattctgtatcgtaagaaaattttttggaagatttag

SEQ ID NO: 119735 - DNA, 1647 bp, synthetic construct
  misc_feature 1..1647: note = Description of Artificial Sequence: Synthetic coding sequence
  source 1..1647: mol_type = other DNA
atgcgagtgctgtgcgcctttcctgaagccatgccctcttccaattctcgccccccagcgtgcctcgcgcccggggcgctttatcttgcgctgctgctccacctctctctcagctctcaggccggtgacagaagaccactgccggtggaccgtgccgctggcctgaaagagaaaaccctgatcctgctcgatgtttctaccaaaaatccagtccgaacagtgaacgaaaattttctaagccttcagctggatccaagtatcatccacgacggatggttagactttctgagttctaagagactcgtaaccctggccaggggactgagtcccgcattcctgcgctttggtggaaagcgtactgattttctgcaatttcaaaacttgcgaaatccggccaaatctagaggcggaccagggcctgattactatcttaagaactacgaggacgatattgtgcgttctgatgtcgctctcgataagcagaaaggatgcaagattgcacagcaccccgatgtgatgttggagctccagcgggaaaaagccgcacagatgcatttagtgctgcttaaggagcagttttcaaacacatatagtaaccttattttgaccgcgcggtccttggataagctctacaattttgcagattgtagtggactgcacctaattttcgctctcaacgccctgaggagaaatcccaataattcctggaacagctcatcagccctctcactgctgaaatattcggcatctaagaagtacaacattagctgggaactggggaacgagcctaacaattatcgcaccatgcatggcagggcagttaacgggagccaactgggaaaagactatatacagctcaagtcattactgcaaccaattaggatctacagcagggccagcttatacgggcccaacatcggacgcccaaggaagaacgtgatcgccctgctggacggtttcatgaaggttgccggttctacggtcgacgctgttacgtggcaacattgctatatcgacgggagggtagtcaaggtgatggactttttaaagactcggctgctcgataccctatccgaccaaatcagaaaaatccagaaagtggtgaacacgtacaccccaggtaaaaagatctggctggagggcgttgtcacaactagcgccgggggcacaaataacctgtccgacagttatgctgccgggtttctgtggctcaatacactcggcatgctggcaaaccaaggcatcgatgttgtgatccgtcacagcttttttgatcacggatataatcacctcgtcgatcagaattttaatccattgccagactattggttgtctctcttgtacaaacggctgatagggcccaaggttctggcagttcacgtagcgggcttgcaacgcaagcccaggccaggccgggttatccgagataaacttaggatttacgcccactgtaccaatcaccataaccataactatgtccgaggctcaatcacactcttcataataaatctccacagaagccggaagaagataaagctcgccgggactctgcgcgataagttggtgcaccagtacctcctgcaaccttatggtcaggaaggcctcaaatccaagacccaacgctgccaatattgtggtatcatctag

SEQ ID NO: 119736 - DNA, 1605 bp, synthetic construct
  misc_feature 1..1605: note = Description of Artificial Sequence: Synthetic coding sequence
  source 1..1605: mol_type = other DNA
atgagggtgctgtgtgccttccccgaggcgatgccttcatcaaattcccggcctccagcgtgcttggcaccaggggcgttgtacctggcacttcttttacatctatcattaagctcccaggctggcgatcgaaggcccctcccagtggatcgggctgccggcctgaaagagaagacacttattttgcttgatgtgtcgacgaaaaaccccgtgaggacggtcaacgagaactttctttcgctccaactagatcccagtattatacacgatggctggcttgattttctgagcagcaaacgtctcgtgacactagctcggggcctgtctccagcattcttaagattcggaggcaagaggaccgattttctgcagtttcaaaaccttcgaaatccagccaagagccgcgggggccccgggccggattactacctgaaaaattacgaagatgatatcgtcaggtctgacgtcgcattggataagcaaaagggatgcaagatcgcacaacaccccgatgtgatgctcgagcttcaacgagagaaagcggcacaaatgcacctggtgcttctcaaggaacagtttagtaacacctatagcaaccttatccttacggaaccaaataattaccgcaccatgcacggcagagcagtgaatggcagccagctgggtaaggactacattcaactgaaatctttgctgcagcctattcgcatctacagtcgggccagcctgtatggccccaatataggccggccccgcaaaaatgttatcgccttactggatggcttcatgaaggtggccggcagcacagtggacgccgtcacttggcagcactgctacatcgacggtagggttgtcaaggtgatggattttctcaagacccggctgcttgatactttgagtgatcagatcagaaagattcagaaagttgtgaatacatacacacctggaaaaaaaatttggctcgagggagtggtaactaccagtgcgggcggcaccaacaaccttagcgactcttacgctgcgggctttctgtggttgaacactctggggatgctggccaaccagggcattgatgtagtcattcggcactccttcttcgatcatggctataaccacctggtggatcaaaatttcaaccctctcccagattactggctgagcttactttataagagactgattggaccaaaggttctcgcggtgcatgttgccgggctgcagcgcaaacctaggccagggcgcgtcatcagggacaagctccgcatctatgcccactgcactaaccaccacaatcacaattatgttcggggttctatcaccctattcatcattaacctccatcgctctcgcaagaagattaaactggcaggcactctgcgcgacaagttagtccaccagtatctgctgcagccatacggacaggaggggctaaagtcaaaatctgtgcagctgaatggccagcccctcgtgatggtggatgatgggacgctacccgaactgaagcctcgtcctctgcgcgcaggacggaccttagttattccaccggtcacaatgggcttctatgtagttaagaacgtcaatgcgctggcatgtagataccggtag

SEQ ID NO: 119737 - DNA, 1779 bp, synthetic construct
  misc_feature 1..1779: note = Description of Artificial Sequence: Synthetic coding sequence
  source 1..1779: mol_type = other DNA
atgcgggtgctgtgtgcgtttcctgaggcaatgcccagttccaacagccgacccccagcctgcctagcacctggtgccctgtacctggccctgctgctgcacttgtcccttagcagtcaagcgggcgatcgtcgacccttgcccgtggatcgcgccgctggacttaaagagaagactctaatcctgttggacgtatctaccaaaaaccccgttcgcaccgtgaatgaaaactttctctcgttacaactcgaccccagtattatacacgacggatggctagatttcttgagctcaaagcgtctggtaaccctggcccgcggcctgagccccgcctttcttcgcttcggggggaaacgaacggactttcttcaattccagaacctgcgaaaccctgcgaaatctcgagggggccccggtcctgattactacctgaagaactatgaggacgacatcgtgaggtctgacgtggccctcgacaaacagaagggatgtaaaatagcccaacaccccgatgtgatgctggaactgcagcgcgagaaggccgctcagatgcacctcgtgttacttaaagaacagttttcaaatacttacagcaatctgattttgacagctaggtctctagacaagctgtacaatttcgcggactgctccggattacacctgatatttgccctgaatgcactgcgacggaatccaaacaacagctggaacagttcgagcgccttatctctgctcaagtattctgcctctaaaaagtataatattagctgggagctgggtaatgaacctaacaattacaggaccatgcatggccgggcagtgaacgggtcccagttaggcaaagactacatccagcttaagtccctgctgcagcccattagaatatatagcagggcgagcctgtacggacctaacattggcagaccaaggaaaaacgtgatcgctctgcttgacggttttatgaaagtggctgggtccacagttgacgcagtgacgtggcaacattgctacatcgacgggcgggttgttaaggtcatggacttcctcaagacccgactccttgatacactgagcgatcagattagaaagattcaaaaggtggtgaacacctacactcccggaaaaaaaatctggctcgagggcgtggtgacaacatccgccggcgggacaaacaacttgtccgactcttatgcagctggatttctctggcttaacacgttaggcatgctggcaaatcaaggaatagatgtggtgatcagacactctttctttgatcacgggtataaccacctggtagatcagaatttcaatccgctgcccgactattggctgtcactgctgtataaacggctgattggtcctaaggtactggcagtccacgttgcaggattgcagcgaaagccccggcccggccgcgttatcagagacaaactgcgtatttatgcccattgcaccaaccatcataatcacaactacgttcgtgggtcaatcacattgtttattattaacctgcaccgcagtagaaaaaagatcaaactggctggcaccttgagggacaaacttgtgcaccagtatctgctgcaaccatacggccaggagggactcaagtctaagagcgtgcagctgaatggacagcccctggtaatggtcgatgacggcacccttccagagctgaaacctcgccccctccgggcaggacggacgctggtgatccctccagttaccatgggattctatgtggtaaaaaatgtgaacgctctggcatgtaggtaccggtag

SEQ ID NO: 119738 - DNA, 1443 bp, synthetic construct
  misc_feature 1..1443: note = Description of Artificial Sequence: Synthetic coding sequence
  source 1..1443: mol_type = other DNA
atgcgagtgctgtgcgccttcccagaagccatgccttccagcaactcccggcctcccgcatgtctggcccctggggcactgtatcttgccttgctcctgcacctgtcgctgtcctctcaggcaggggaccgcaggcccctgcccgtggaccgggcggctgggttgaaggagaaaacactgatcctcctcgacgtttctaccaaaaatccggtgcggaccgtgaacgagaacttcctttctcttcaactggacccaagcattattcacgacggttggctggactttctgtctagcaagcgcctggtgactctcgccagaggtctctctccagccttcctccggttcggtggtaaaaggactgatttcctccagtttcagaacctgcgaaaccctgcaaaatcacgtggcggccctggaccggactactatctgaagaactacgaggatgagcctaacaactataggaccatgcatggcagggctgtcaatggcagccagctgggaaaagactacattcagctgaagagtttgctgcaaccgattcgtatttactcccgcgcctccttgtacggccctaatatcggccgccccaggaaaaacgtgatcgcgctccttgacgggttcatgaaagtggccgggtcgacggtggatgcagttacttggcagcactgttatattgacggccgggtcgttaaagtaatggattttttgaagacacggctgctcgataccctgagcgatcagattaggaaaatacagaaagtggtgaatacatacactcctgggaagaagatttggttagaaggcgtagtcactacatcagctgggggaacgaataatctgtctgattcttatgctgcgggcttcctgtggctgaatacactggggatgttagccaaccaaggcattgatgttgtcattagacacagcttctttgatcacggttacaatcatctcgtagatcagaatttcaaccccttacccgactactggttgagtctcctgtacaagaggttaatcggtcccaaggtgctcgccgtccacgtcgccggtctgcaacggaagccgcgccccggccgagtcatccgggataaactccgcatatatgcccattgcaccaaccaccacaatcataattatgtgagagggtcaatcactctctttattattaatttacacagaagccggaagaagatcaaactggctggaaccttgagagataagttggtccatcagtacctgctgcaaccttatggccaggaggggcttaaatctaaatcagtacagttgaatggacaaccgctggtgatggttgatgacggaacactacccgagctcaagccacgcccactgagagcagggaggaccctggttattccacctgtgaccatgggtttctatgtggtaaagaacgtgaatgctctcgcctgccgctatcgatag

SEQ ID NO: 119739 - DNA, 1251 bp, synthetic construct
  misc_feature 1..1251: note = Description of Artificial Sequence: Synthetic coding sequence
  source 1..1251: mol_type = other DNA
atgaaacgagagcgcggggccttatcgcgagcaagcagagcgctgaggttggcgccatttgtatacctgcttctcatacagaccgatcctctggaaggtgtcaacattacctctccagttcgtctgatccacggaactgttggtaagagtgccctgctgtcagtccaatacagttctacaagcagcgatagacccgtggttaagtggcagctgaagagagacaagcccgtgacagtcgtacagagtattggaacagaagttatcggtactctcaggccagactaccgggacagaatccgactgtttgaaaatgggagcttgctcctctctgatctgcaactggcggatgaggggacctatgaagtcgagatctctataacagatgacacctttacaggtgagaagaccattaatttgacggtggacgtgccaatcagccgtccccaagtgttggtggcttcgacaacagttctggaactgtctgaagccttcaccctaaattgttctcacgagaatggcaccaagcccagctatacatggctcaaggatggcaagcccctgctcaatgacagccgcatgctgctctccccagatcagaaggtattaacgattacaagggttctgatggaagacgacgatctgtacagctgtatggtagaaaatcccattagccaaggcaggagtctgccggtgaagatcaccgtctaccgcaggagttcgctctatattattctatccactggcggcatatttctgctcgttaccttggtgacagtttgcgcctgttggaagccttccaagaggaaacagaagaaattggaaaaacagaacagcctggagtatatggaccagaacgacgacagattgaagccagaagccgacaccctgccacgaagcggagagcaagagcgaaaaaaccctatggctctgtacatcctgaaggacaaggactctccagagaccgaggagaacccggcccctgagccacgatccgctacagagccaggcccacctggttatagcgtttcccctgcagttccaggtcgaagtccaggactccccataagaagtgctagaagataccctcggagccccgctcggtctccagccaccggaagaacccacagtagtcctccccgcgccccttcatcccccgggagaagcagatcagccagtcgtacccttcgtactgccggtgtacacattatccgcgaacaggacgaggccggacccgtggaaatctcggcttag

SEQ ID NO: 119740 - DNA, 1104 bp, synthetic construct
  misc_feature 1..1104: note = Description of Artificial Sequence: Synthetic coding sequence
  source 1..1104: mol_type = other DNA
atgaagcgagaacgcggggccctaagtagggcctccagagctctgcggctggccccatttgtctacttgctgcttatccagactgaccctctggagggggttaatattacatccccggtgcgactcatccacggaaccgtgggtaaatcagccctgctctccgtgcagtacagttcgaccagcagcgacagaccagtggtgaaatggcagctcaaacgggataagccagttactgtcgttcagagcattggcactgaggtcatcgggaccctgaggcccgactaccgcgaccgcatcagactgtttgagaacgggtccctgttactcagtgacctccaactggccgatgagggaacatatgaagttgagatttcaataacagatgatacttttactggggaaaagactatcaacttaacagtggacgtgcctatctctcgcccgcaggtgctggtggcctccaccacagttctggaactgtcagaagcttttactttaaattgctcccacgagaatggcactaaaccttcttacacctggttaaaggatggcaaaccactcctgaatgatagccggatgctgttatctcctgaccaaaaagtgctcacaataacaagagtgctgatggaagacgatgatctctacagttgtatggtggagaaccccatcagccaggggaggagtctcccagtcaagataactgtgtatagacggagctctctttacataatcctgagcacaggtgggatcttcctgctcgtgactcttgttactgtttgtgcatgttggaaaccgagcaagaggaaacagaagaaactcgagaaacaaaatagtctcgaatacatggaccagaatgacgaccggctcaaacccgagggtgaactgcctgcgacccagtccccaattccctcaacaatccgaagcgttggttgctgggaaaaagcggaattgggagacaaggagaactcttcagcaggaactctgccatctgatctgggtgcctccaaagggaaagagccggagccagcatctctcgcctcttcacacagcctacctcgcagacacgctatgcctagcactctttcagtttcagtccacgaatag

SEQ ID NO: 119741 - DNA, 669 bp, synthetic construct
  misc_feature 1..669: note = Description of Artificial Sequence: Synthetic coding sequence
  source 1..669: mol_type = other DNA
atgagccagaccaagatgctgaaggtgcgtgtcacgttgttttgcatccttgccggaattgtgctggcgatgaccgccgtcgtgaccgaccactgggcggtgctgtctccacatatggagcaccacaacacaacctgcgaagcagcacatttcggcttgtggcgcatttgcaccaagagaattccaatggacgactctaaaacctgtgggccaattacactgcccggggaaaaaaattgttcgtactttagacatttcaacccaggggagagttccgagatctttgagttcaccactcagaaggagtactcgatctccgctgccgcaattgccattttttctttaggattcataatcctcggctctctttgcgtcttacttagtctgggcaaaaaacgggattatctcttacgccctgcaagcatgttctacgcttttgccggcctgtgtatcctggtgagcgtggaagtgatgagacagtccgtaaaacggatgattgacagcgaagacacggtctggatcgagtattactactcatggtcgtttgcatgcgcctgtgcagcctttattctcctgttcttgggtggtctcgccctgctgcttttttcactcccgcgtatgcctcgcaatccctgggaaagttgcatggatgctgagccagaacattag

SEQ ID NO: 119742 - DNA, 633 bp, synthetic construct
  misc_feature 1..633: note = Description of Artificial Sequence: Synthetic coding sequence
  source 1..633: mol_type = other DNA
atggacctcgaggagttcttgagcgagaatgggatcccacccagcccttctcagcatgatcactcaccacatccccccggcctccagccggccagttcggccgctccaagcgtgatggacttgtcatctcgtgcaagtgctccactacaccctgggatccctagtccaaattgtatgcagagcccaataaggccagggcaacttctgccagccaaccggaacaccccaagtcctatcgatcccgatacgatccaggtaccagtcggatacgagcccgaccccgccgacctagcactgtcgagcatcccaggccaggagatgttcgaccctcggaagcgaaaatttagcgaagaagagctaaagccacagcctatgattaaaaaagcgagaaaagtctttatccccgacgacttaaaagatgacaagtactgggcccgccgcaggaaaaataacatggcagcgaagcggtcaagagacgcccgacggttaaaggaaaaccagattgccatcagggcctcctttttagagaaagagaattccgctctgaggcaggaagtcgctgatctccggaaggaactggggaaatgcaagaacattctggccaagtacgaagccagacatggccctctttag

SEQ ID NO: 119743 - DNA, 1095 bp, synthetic construct
  misc_feature 1..1095: note = Description of Artificial Sequence: Synthetic coding sequence
  source 1..1095: mol_type = other DNA
atgcatccccaggtggtgatcctaagcctgatcttgcacctggctgacagcgtggcaggtagtgttaaggtgggcggcgaggccggtccaagcgtgacattgccttgccactattccggcgcggtgacctctatgtgttggaatagaggtagctgtagcctgtttacatgtcaaaacggcattgtgtggactaacggcactcacgtgacttacagaaaggacacacgctataaactcctcggagacctcagtcggagagatgtatcactgaccattgagaacactgcagtgtctgactccggtgtgtactgctgcagagtcgagcaccgcggatggttcaatgacatgaagatcaccgtgagtctggagatcgtcccacccaaagtgaccactacccccattgttactacagttccgacggttacaaccgttaggacttcaacgaccgtccctacaactaccaccgtgccaatgaccaccgttcccacaaccacagtacccaccacaatgagcatccccacgaccacaacagtcctcaccactatgaccgtgtcaacgacgacgtcggtgccgaccacgacttctatacctactaccacatccgtgcccgtgaccaccactgtgtcaacctttgtcccgcccatgccattgcccagacagaatcacgagcccgttgccacatcaccgagtagtcctcaaccggctgaaactcacccaacgacattgcagggggctattcggcgcgagccgaccagttccccattgtacagttacaccactgatggaaatgacaccgtgacagagtcgagtgacggcctgtggaataataatcagactcagctcttcctggaacacagtcttctgactgccaatacgacgaaaggcatctacgctggagtctgcatttctgttctggtcctgctcgcactactcggtgttatcattgctaagaagtatttctttaagaaggaggtgcagcaactgtcggtctccttttccagcctccagattaaggcccttcagaacgccgtggaaaaagaagtgcaagcagaggacaatatatacatcgaaaacagtctgtacgccaccgattag

SEQ ID NO: 119744 - DNA, 1206 bp, synthetic construct
  misc_feature 1..1206: note = Description of Artificial Sequence: Synthetic coding sequence
  source 1..1206: mol_type = other DNA
atgcaccctcaggtggtgattctgagcctgatccttcatctggcagatagtgttgccgggtccgtgaaagtggggggagaagccggcccatctgttacactcccatgccactacagcggcgcggtaacctccatgtgctggaatagaggttcctgcagcctctttacatgccagaacggcatcgtgtggacgaacgggacacacgttacgtaccgaaaggacactcgttacaagctccttggcgatctgagtcgacgtgacgtgtccctgacaattgagaatactgctgttagcgatagcggagtgtactgctgtagggtcgaacaccgcggttggttcaacgatatgaagatcacagtttctctggagatagtgccccctaaggtcacaacaacgcctattgtgaccactgttcctacagtaacaacagtgcgtacctctaccaccgtaccaacaacaacaactgttcctatgacgaccgttcccactacaaccgtgccaacaactatgtccattcctactaccaccactgtcctgacaaccatgactgtgagcaccaccacgtccgttccaaccacaacgtccatccccacgacgacttcagttcccgttaccactacagtctctacattcgtgccccccatgcctttgccaagacaaaatcacgagccggttgcgacctcaccatctagcccacagcctgctgaaacccaccctaccactctgcagggggcaatcaggagggaacccaccagcagccctctttacagttataccactgatgggaatgacactgtgactgagtcttccgatggtctgtggaataacaaccagactcaactttttttagagcatagtctgctgaccgcaaatacgactaagggtatttacgctggcgtctgcatatccgtcctggtacttctggccctactcggtgtaatcattgctaagatgtttcacctggcagcatttaaacttaaattgtgcaagatgcaactgaagagaaagtccaaacagaaaaccattagcacactgaggattgtgttcatgcccaggaccaagacacagtggtgtagtctccgggtgtatgcccatgaatgccggcgcctgaacaggcaccaacatattaggcgtctcctggaccctaagaccatctttctgtttcagtttcatttggcattccagcacgtgagtgatactggctag

SEQ ID NO: 119745 - DNA, 672 bp, synthetic construct
  misc_feature 1..672: note = Description of Artificial Sequence: Synthetic coding sequence
  source 1..672: mol_type = other DNA
atgcatccccaggtggtgatcctaagtctgattcttcacctagcagacagcgtggccgggtctgttaaggtgggaggggaggcagggcctagtgtaaccttaccttgtcactattctggcgccgtcacatctatgtgctggaacagggggtcctgctctcttttcacctgccagaatggcattgtgtggacgaatggcactcacgtaacatataggaaggacacccgatataagctcctcggcgacctcagtcggcgtgacgtcagcctgactatcgaaaatacagccgtgtcagatagcggcgtgtattgttgtcgcgtcgaacaccgcggatggtttaatgacatgaagattaccgtgtccttagagattgtgccacctaaggttactactacccccatcgttactacagtcccaactgtcaccacggtaaggacttcaacaactgtacccaccaccactacggtgcccatgaccacggtgcccacgacaaccgttcccacgacaatgagcatccccaccacaaccaccgtgctcactacaatgaccgttagcactaccacttctgtccctaccaccacctccatcccaacaacaacctccgtccccgtcacgactaccgtcagcacttttgtgcccccgatgccccttcctcgtcagaatcatgaatag

SEQ ID NO: 119746 - DNA, 1095 bp, synthetic construct
  misc_feature 1..1095: note = Description of Artificial Sequence: Synthetic coding sequence
  source 1..1095: mol_type = other DNA
atgcatccacaggtggtcattctgagcctgattctccacttagccgattcggtcgctgggtcagttaaggtgggcggagaggcgggtcccagcgtgaccctcccttgccactactctggggccgtcacgagtatgtgttggaatcgcgggtcttgtagcctattcacctgccagaacggcatcgtgtggacgaacggcactcatgttacatacagaaaagacacccggtacaagctgttgggagatctatcccgaagagatgtgtcccttacaattgagaatactgccgtctctgactcgggggtatattgttgccgagtggagcacagaggttggtttaacgatatgaagattactgtgtcactggagatagtgccgcctaaggtgacaacaacccccatcgttactacagtgcctaccgtgaccaccgtgagaaccagtaccacagtcccaactaccactaccgtacccatgacaactgtccccactactactgttccaacaactatgtctatcccaactacaactacagtccttacaaccatgactgtaagtaccactacttcagtccccactacaacttctattcctaccacaacaagcgtcccggttaccaccacagtctcgacttttgtgccaccaatgccactgccacggcaaaatcatgaacccgtggccacaagcccatcttccccccaaccagcagaaacgcatccgactacccttcaaggagctatccgccgcgaaccaacctcgtccccgctgtattcttacacaacagatgggaatgacactgttacggagagcagtgacggactttggaacaacaaccagactcagttattcttggagcacagcctgttaacagcgaacaccaccaaggggatatacgcgggtgtatgcatttccgtactggtgttattagccctcctcggcgttatcattgccaaaaagtatttcttcaaaaaagaagtccaacagctctccgtgtcgttctcctctctgcagataaaagccctgcagaatgcagtggagaaggaggtgcaggctgaggacaatatatatatagagaatagtctctacgctaccgactag

SEQ ID NO: 119747 - DNA, 1095 bp, synthetic construct
  misc_feature 1..1095: note = Description of Artificial Sequence: Synthetic coding sequence
  source 1..1095: mol_type = other DNA
atgcatccacaggtggtgatcctgagcctaatcttgcatctggcagattctgtcgccggttccgtgaaagtcggcggcgaggccggacccagtgtcaccctcccctgccattacagcggagctgtaacatctatgtgctggaatcgcggcagctgctccctctttacttgccagaatggcattgtatggaccaacggaacgcatgtgacctataggaaagacacacggtacaaactgctgggggacctgtcaagaagggatgtgagtctcacgatcgagaacactgccgtttctgattcaggcgtatattgctgtcgggtcgagcatagaggatggtttaatgacatgaagattaccgtgtcccttgagatcgtgcctcccaaagtgactacaacgccaatcgtcacgacagtgcctaccgttaccactgtacgcacgagtacaacggttcccactaccacaacagtgccgatgaccaccgtgcctacgacgaccgtccctaccacaatgtcgatacccaccacaactacagttctcacaaccatgaccgtgagcacaacgacaagtgttccaactacgacctcgattcctaccaccacttctgtgcccgtaactaccaccgtctcgactttcgtaccacctatgccactaccgagacagaaccatgagccagtggctaccagcccatcatctccgcaacctgcagaaacccacccgacgacattgcaaggtgcgattagacgggaacccactagctcccccttatacagctatactacagacggaaatgataccgtaacagaatcaagtgacggcctatggaacaacaatcaaactcagctatttctggaacacagtctgctcacagcaaatactacgaaggggatttacgctggagtttgcattagtgtcctagtgctgttagccttgcttggggtcatcattgctaaaaagtacttcttcaagaaggaagtccaacagctgtccgtttccttttcttcgcttcaaattaaggccttgcagaacgccgttgaaaaggaggtgcaggccgaggacaacatatatatcgaaaatagcctgtacgccaccgattag

SEQ ID NO: 119748 - DNA, 522 bp, synthetic construct
  misc_feature 1..522: note = Description of Artificial Sequence: Synthetic coding sequence
  source 1..522: mol_type = other DNA
atggaacccggcgccggacatctcgacgggcacagagccggttctccgtctctccggcaggccctctgtgatggctccgccgttatgttcagcagtaaggaaagaggtagatgtacagtcatcaattttgttccactcgaggctcccctgaggagcactccgagatcccggcaggtgactgaggcttgtggcggagaagggcgggcagtgcccctgggctccgaaccagaatggagcgtcgggggcatggaggccaccttggagcaacatctggaggatacgatgaaaaatccctcaatcgtcggggtcctctgtaccgacagccagggactgaaccttggatgtagaggaaccctttcagacgagcatgctggggtaatttcagtcttggcccaacaagcggctaaactgacaagcgatcctaccgatatccctgttgtgtgtctggaatctgacaatggtaatatcatgatccagaaacacgatggcataacagtggcagtccataagatggccagttag

SEQ ID NO: 119749 - DNA, 267 bp, synthetic construct
  misc_feature 1..267: note = Description of Artificial Sequence: Synthetic coding sequence
  source 1..267: mol_type = other DNA
atgggcaattggggcttaggaatcgctccatgggtagacggggagagtgaactagagttccgcaggctgggcatgcaggggccactggaagccctacggcgcagagagtggaatacccagcgtgcttcgttttcattttccttcctcattgctctatctccccacacagttgactattgtcatagttacgaactcttcaatcgcagatggcatggccatgtgctcgcaactcagcggccctctttgttcattctgatgctggtgtag

SEQ ID NO: 119750 - DNA, 2334 bp, synthetic construct
  misc_feature 1..2334: note = Description of Artificial Sequence: Synthetic coding sequence
  source 1..2334: mol_type = other DNA
atgggccgggggtctgggacctttgagaggctcctcgacaaggcaacatctcagcttctgctggagacagactgggagagtatcctgcaaatctgcgaccttatcaggcagggggatactcaagccaagtacgcagtcaactccattaagaagaaggtcaatgacaagaatccccacgtcgcgctctacgcgctcgaggtgatggaatccgtggtaaagaattgtggccaaactgtgcacgacgaagtggccaataaacaaactatggaggagttgaaagatctcctgaagagacaagtggaggtgaatgtgaggaacaagattctctacctgatacaggcatgggcccacgctttcaggaatgagccaaagtataaagtcgtccaggatacataccagatcatgaaggtcgaaggacacgtattcccggagtttaaagaatctgatgccatgttcgccgccgaacgggccccagattgggtggacgccgaagagtgtcaccgctgtagggtgcagtttggggtgatgacacggaagcaccactgtcgagcctgcggccaaattttttgcggtaaatgtagtagtaaatacagcactatccctaagttcgggattgaaaaggaggtacgggtctgtgagccctgctacgaacaattaaatcgaaaagccgaaggaaaagcaaccagtaccaccgaactgccccccgagtacctcacaagccctctgtctcaacagagtcaactgccacccaagcgggacgaaacagcgctgcaggaagaggaagagcttcagctagctctggcactgtcccagagcgaggcggaagaaaaggaaaggctgagacaaaagtctacatatacatcctaccctaaggcagaacccatgcccagcgccagtagtgccccccctgcatccagcctgtactcaagtcctgtgaattccagcgcacctcttgcagaggatatcgaccccgagctggcccggtatcttaatcggaactattgggagaagaagcaggaagaggcaagaaaaagccctactccttccgccccagtgccactgactgagcccgccgcacagcccggggagggccacgcagcgcccaccaatgtggtcgagaaccctctgcctgagacagacagccagcccattccgccatccggcggcccattctctgaaccccaatttcacaacggagagtctgaagagagtcacgaacagttcctgaaggcattgcagaacgctgtcacaacttttgtgaatcgcatgaaatctaaccacatgcggggccgttcaattactaatgattcagcagtgctaagcctcttccagagcataaacggaatgcatcctcagctgcttgaactgcttaaccagctggatgaaaggaggttgtattatgaagggctgcaagacaagctggctcagatccgggatgctagaggcgcgctttcagcactgagagaggagcacagagagaagcttaggcgcgcagctgaggaagcggagcggcagcgccagattcagctcgcacaaaaactagagataatgcgacagaagaagcaagagtatttggaggtccagaggcagctagcaatccagcgattgcaggagcaggagaaagaacgccaaatgcggctcgagcagcagaagcagaccgtccagatgcgagcccaaatgccggcttttcctttgccttatgctcagctccaggccatgcccgccgctggaggagtgctctaccagccctcaggccccgcgtcatttccgtccacattcagcccagcaggatcagtcgaaggctcccccatgcacggtgtgtacatgagtcagccggcacctgcagcgggcccatacccctcaatgccaagcacggccgccgatcctagcatggttagcgcctacatgtacccagcgggagccactggcgcccaggccgctccccaggcccaggctggccctactgcctctcccgcctactcttcctatcagcccacacctaccgcaggttaccagaacgtagcctcccaggccccccagtcactgcccgccatctcccaaccaccacaatcctccaccatgggatatatgggatcccagtccgtgagcatggggtatcagccttacaatatgcagaacctcatgaccacccttccatcacaggacgcgagtcttcctcctcagcagccatacatcgccggccagcaaccaatgtaccaacagatggctccatcagggggtccccctcagcagcagccgccagtcgcccagcagccacaagcgcaggggccacctgcacagggaagcgaggcgcagcttatcagcttcgattag

SEQ ID NO: 119751 - DNA, 2076 bp, synthetic construct
  misc_feature 1..2076: note = Description of Artificial Sequence: Synthetic coding sequence
  source 1..2076: mol_type = other DNA
atgggacgcggtagcgggacctttgaaaggctccttgataaggcaacatcccaactgctgctcgagacagattgggagtccatcctgcagatttgcgatcttatccgccagggcgatacccaagccaagtacgccgtcaacagcattaagaaaaaggtcaacgacaagaaccctcacgtcgccctgtatgccttggaagtaatggagtcagttgtgaagaactgtggtcagacagttcacgatgaagtggcaaataagcagacgatggaagagctgaaggacttgctgaaaaggcaggtcgaagtgaacgttcggaataagattctctacttgatacaggcttgggcccacgcattccggaatgagcctaaatacaaggtggtgcaggatacataccaaattatgaaggtcgaaggtcatgtcttcccggagttcaaagaatctgatgctatgttcgctgctgagcgggcccccgattgggttgacgccgaagagtgccaccgttgccgtgttcagtttggggttatgaccaggaagcaccactgtcgggcgtgcggacaaatcttttgcggcaagtgctctagcaagtattccactatccccaaattcggaatcgagaaggaggttcgcgtttgtgaaccgtgctatgaacaactgaacagaaaggcagaagggaaggccacctctactactgagttgccacctgaatacttaacgtcgcccctctcacagcagtcacagttaccccccaaacgcgatgaaaccgcgcttcaggaagaagaggagctccagctcgctcttgccctgagccagtcggaagcggaggagaaggagcgactgcgccaaaaatcaacctacacctcctatccgaaagccgagcctatgccaagcgcctcgtctgctcctccagcatcctcattgtacagttcccccgtgaacagctccgcccctctcgcagaagacattgatccagagctggctaggtatctgaataggaactattgggaaaagaaacaggaagaggctcgcaagagtcccacaccgtccgcccctgtccctctgacagaacccgccgcccagcccggggaaggacacgccgccccaactaacgttgtggagaatccattacctgagacagactctcagccaatacctcctagtggaggccctttttctgaacctcagttccataacggcgagagcgaagagtcccatgagcagtttctgaaagccctgcaaaacgccgtcactacatttgttaatcggatgaaatccaaccacatgagagggcggagcataactaatgatagcgccgtgctatcactgttccagagcatcaatggtatgcacccccagttactggaactgcttaatcagctggacgaacgacgcctgtattatgaggggttgcaggacaagcttgcccaaatcagggatgcaagaggggccctgtccgctttaagggaggaacaccgcgagaaactccgaagggccgcagaggaagccgaaagacagcgacagatccagcttgcacagaaacttgagattatgatgcatggcgtctatatgtcccagcccgctcccgctgcagggccatacccctcaatgcctagcactgccgctgaccccagtatggtgagtgcgtacatgtatccggcgggagcgaccggggctcaggctgcccctcaagctcaagccggccctacagcaagccctgcatactcctcttaccagcccacgccaactgccggctatcaaaatgtggcctcacaggctccccagtccctcccggcaatcagtcagcctccccagtcttctaccatgggctacatgggctcacagagtgtgagcatggggtaccagccttataatatgcaaaacctcatgaccacactgccttcacaggatgcaagtttgccaccccaacaaccatacatcgccggtcaacaaccaatgtaccagcagatggccccttccgggggcccacctcagcagcaaccaccagtagcacagcagccccaggcccagggaccccctgcccagggcagcgaggctcagctcatttctttcgattag

SEQ ID NO: 119752 - DNA, 324 bp, synthetic construct
  misc_feature 1..324: note = Description of Artificial Sequence: Synthetic coding sequence
  source 1..324: mol_type = other DNA
atgagattgagcaagacacttgtcgatatggacatggctgactactctgctgccctggatccagcctacacaactctggagttcgagaacgtgcaagtactgaccatggggaacgacttcgtggccgccgccagtagacagatcgaagcctcacctcccactagtctcgaacacatctggaggggggggcagtttagcactggaagacatgtgcctatcaggcggcaccagcctcagcgagcacagcagcccgggtgccagagacctgtgtgccatctacgcggaccgggacacggacagacacttagatgtctggaactttag

SEQ ID NO: 119753 - DNA, 1425 bp, synthetic construct
  misc_feature 1..1425: note = Description of Artificial Sequence: Synthetic coding sequence
  source 1..1425: mol_type = other DNA
atgagactgtccaaaaccctggtggacatggacatggctgactattcggccgctttggatccagcctatactacactggagttcgagaatgtgcaggtactaacaatgggcaacgatacttccccctctgaaggcaccaatctcaacgcacctaatagcctgggcgtcagcgccctgtgcgccatatgtggagaccgagccactggtaagcattacggcgcctcatcctgcgacgggtgtaagggatttttcaggaggtcagttcggaaaaaccacatgtattcctgcaggttctcacggcaatgtgtggttgacaaagacaaacgcaaccagtgtcggtactgcagactgaagaagtgctttcgggccgggatgaagaaggaggctgtacagaatgaaagggaccgtataagcacccgtcggtcgtcctacgaggactcctcactaccttcaatcaacgcgcttctccaggctgaggtgcttagccgtcaaatcacgtccccagtgtctggcatcaatggcgatatccgggccaagaaaattgcctcaatagcagacgtctgtgaatctatgaaagaacagttgctggtcttggtggagtgggccaagtatattccagctttctgcgaacttcctctggatgaccaggtagcgctgctgcgtgcgcacgccggggagcacttattactgggtgcaacaaaacggtcgatggtgttcaaagacgtactgctgttagggaacgattacatagtgcccaggcattgccctgagctggccgaaatgagccgcgtatctattcgaattctggacgagcttgtgctgccctttcaagaacttcagatagacgacaacgagtacgcttacctgaaagcaattattttttttgatccagatgcaaaggggctttctgatccaggaaagataaaacgtctcaggtctcaggtacaggtatctttggaagactacattaacgataggcagtatgactccaggggcaggttcggggaactgctcttgttgctgcccacattgcagtccattacgtggcagatgattgagcaaattcagtttattaagcttttcggcatggctaaaatcgataatctcctgcaagaaatgctgctgggtggaagcccttccgatgcccctcatgctcatcatcctctgcacccccatctaatgcaggaacatatgggtacgaatgtaatagtcgccaacactatgcccacccacctgagtaatgggcaaatgtgcgagtggccccgacctagaggacaggctgcgactccagaaacaccacaaccttctcctcccggcggcagcggatccgaaccatataaactcctgcctggcgccgtggcgaccattgtcaaacccctgtccgccatcccccaaccgactatcacaaaacaagaggtcatctag

SEQ ID NO: 119754 - DNA, 1359 bp, synthetic construct
  misc_feature 1..1359: note = Description of Artificial Sequence: Synthetic coding sequence
  source 1..1359: mol_type = other DNA
atggtctcagtcaatgcccccttgggcgctcccgtggaaagctcctatgatacttccccttcagagggtactaaccttaacgctccgaactccctcggtgtgtctgcactgtgcgctatttgcggcgaccgagccaccggcaagcattacggggccagtagttgcgacgggtgcaagggtttcttccgccgttccgtgaggaaaaatcacatgtactcctgtagattctcgagacagtgtgtagtggataaggacaaacgaaatcagtgcagatactgtaggcttaagaagtgcttcagggctggaatgaagaaagaagcagtgcagaatgaaagagatcgtatcagtactcggaggtccagttacgaggacagcagtctgccaagtatcaatgcgctactgcaggccgaggtgttgtctcgccagatcacctctcctgtgtcaggtatcaatggtgacatacgagccaaaaagattgcaagtattgccgacgtgtgtgagtctatgaaagagcagctgctagtgctggtagaatgggctaagtatataccggccttttgcgagttacctctggacgaccaggtagcactacttcgggcccatgctggagaacacctgttacttggagcaactaagagaagcatggtatttaaggacgtcctgttgctaggcaacgactacattgtgccaaggcattgtcccgaattggccgagatgtcccgtgtgtcaatccgcattttggacgagttggttctgccttttcaggaactgcaaattgacgacaatgagtatgcatatctcaaggcaatcattttttttgacccagatgccaaaggcctgtctgacccaggtaaaatcaagaggttaaggagccaggtccaggtgtccctggaagattacattaacgacaggcagtacgattctcgaggtagatttggagagctcctcctcctactaccaacactccaatcaataacgtggcagatgattgaacagattcagtttattaaacttttcggaatggcgaaaatcgacaacctgctgcaggagatgctgctcggcggtagtcccagcgatgccccacacgcccaccatccactccacccacatctcatgcaggagcacatgggaaccaacgtcattgttgcaaacactatgccaacacatttaagtaatggtcagatgtgcgagtggcctcggccacgcggacaagctgccacaccagagactcctcagccatctccacccggaggctctggatccgaaccatacaaactgctgccaggagccgttgcaaccatagtgaaacccttgagtgcaattcctcagcctacaattaccaagcaggaggttatttag

SEQ ID NO: 119755 - DNA, 1515 bp, synthetic construct
  misc_feature 1..1515: note = Description of Artificial Sequence: Synthetic coding sequence
  source 1..1515: mol_type = other DNA
atgaggctgtcgaaaaccctggtagacatggacatggcagactattccgccgctctggaccccgcatacaccaccctggaattcgagaatgtgcaagtgctgacaatgggaaacgtcctgctcccacttaggctggcgcgcttacggcacccactacggcaccactggtccatatctggaggagtggacagctcaccgcagggagacacttccccatctgagggtacaaacctgaatgcaccgaacagcctgggggtaagcgctttatgtgccatttgtggcgacagagccactggcaaacattacggcgccagctcatgtgatggatgcaaaggcttcttccgcagatcagtcaggaaaaaccatatgtactcctgtagattcagccgacagtgcgtcgtcgataaggacaaaaggaatcagtgtaggtattgcagactcaaaaaatgctttagagcgggaatgaagaaagaggccgtgcagaacgagagagaccgcatctccacccgacgcagctcttacgaagacagttccctcccgtcaatcaacgcacttcttcaggccgaggtcttgtctcggcaaatcacctcacccgtatcaggcattaatggtgacattagagcaaagaagatcgcttcaattgcggacgtgtgtgaatcaatgaaagaacagttattggtcctggtcgagtgggccaagtatatccctgccttctgtgaattgccactcgatgatcaggtggccctgttgcgagctcacgcgggcgagcatctattgcttggagccaccaaaaggagcatggtgtttaaggatgtgctgcttctcggaaatgattatattgtgcctcggcattgtcccgagctggctgaaatgagccgggtttccattcggatcctcgacgagcttgtgctgccattccaagaacttcagattgatgataatgaatacgcctacctcaaagcaattatctttttcgatcccgatgctaaaggcttgagcgacccgggcaaaataaaacgtctccggagccaggtccaggtgagcctcgaggattatattaatgacagacagtacgactcaagaggtagattcggggaactcctcctcctgctgcctactctccaaagcattacctggcagatgatcgagcagatacagttcatcaagctgtttggaatggccaagatagataacctgcttcaggagatgcttctgggtggatccccctcagacgccccccatgcacaccatccacttcatccacacctcatgcaagagcacatgggcacgaatgtcattgtagccaacacgatgcctactcacctgagtaatggccagatgtgtgagtggcctaggccacggggtcaggcagccacacctgaaactccccagccctcccctcccggggggtcaggtagcgagccatataagctgcttcccggcgccgtcgccaccatcgttaagcctctgtctgcaataccccagccaactatcaccaagcaggaggtcatatag

SEQ ID NO: 119756 - DNA, 1395 bp, synthetic construct
  misc_feature 1..1395: note = Description of Artificial Sequence: Synthetic coding sequence
  source 1..1395: mol_type = other DNA
atgcgactatctaagacactggtcgacatggatatggcggactactccgccgcccttgacccagcctacactactctcgagtttgagaatgtgcaggtcctgacgatgggtaatgatacatcaccttcagagggcaccaatctaaacgcaccaaactctctgggcgtctccgccttgtgcgctatatgcggagaccgagccacaggaaaacattatggtgcaagcagttgcgatggatgtaaagggttttttaggcgctctgtcagaaagaatcatatgtattcctgtcggttctcccgccagtgcgtcgtagataaggataaaagaaaccagtgtcgctattgcagactgaagaaatgctttcgcgcgggtatgaagaaggaggccgttcaaaacgaacgagacaggatctccacaagacgcagttcgtatgaagactcaagccttccgtcgataaacgcactgcttcaagctgaggtcctgtccaggcagatcacctctcctgtgagcggcataaacggcgatatccgagctaagaaaatcgcatccatcgccgatgtgtgcgagtctatgaaggagcagctcctcgtgctggtggagtgggcaaaatacattcccgctttttgcgaactgcctctcgacgatcaggtcgccctactgcgggcccacgcaggagagcacctgctgttaggcgccaccaagagatctatggtctttaaggacgtactgctgctcggaaatgattatatcgtgcccaggcactgtcctgagctggctgagatgtctagagtctctattcgaattctggatgaactcgttctgcctttccaggagctgcagatcgatgacaatgaatacgcatacctgaaagccattatcttctttgaccctgacgcaaaaggactgtccgatcccggtaagatcaaaaggctgcgaagccaggtgcaggtctcattggaggactatatcaatgacaggcaatatgacagccgcggcaggttcggcgaattactcctgctgctgccaactctccagagcattacctggcagatgattgaacagatccagttcattaaactctttgggatggcaaaaattgacaatctgctgcaagaaatgctgttgggggggagcccatctgatgcaccgcatgctcatcatcctctgcacccacacctgatgcaagagcatatggggacaaatgtgattgtcgccaatacgatgcccacgcatctcagcaacggccagatgagtactcccgagacccctcaacctagcccacccgggggatctggttcagagccatataaactcctgccgggagccgtggccacgattgtcaagcccttatcagcgatcccccagcctactatcaccaagcaagaggttatttag

SEQ ID NO: 119757 - DNA, 1254 bp, synthetic construct
  misc_feature 1..1254: note = Description of Artificial Sequence: Synthetic coding sequence
  source 1..1254: mol_type = other DNA
atgcggttgagtaagacccttgtcgatatggatatggctgactattctgcagcattagatcccgcttatacaacattggagttcgaaaacgtgcaggtacttactatgggcaacgatacttcaccatccgaagggaccaatttgaacgcaccgaactctctgggcgtgagtgccctttgtgctatatgcggggaccgggccaccgggaagcattacggcgccagctcttgcgacggttgcaaggggttttttcggcggtcagtccgtaaaaatcacatgtatagctgtcggtttagccgacagtgcgtcgtcgacaaggataaacgcaaccagtgcaggtactgcaggcttaaaaaatgttttcgggccgggatgaagaaagaggccgtccagaacgaaagggacagaatcagtactcgaaggagcagctacgaagatagtagtctcccttcaatcaatgccttacttcaggctgaagtgctctcccgccaaattacgtcaccagtatcggggataaatggagacatcagggctaaaaaaatagcaagcatagcggatgtttgcgaatcaatgaaagagcaactgctcgtcctggttgaatgggctaagtatatccctgccttctgcgagttacctctggatgaccaggttgccttgcttagggcacacgccggagagcatctgttgctgggagctacgaaacgaagtatggtgttcaaagacgttctgctcctgggtaacgattatatagttccccggcactgtcccgagctggcagaaatgtcacgtgtgtctatccgaattctcgatgaattggtcctccccttccaggagctccagatagatgacaatgagtacgcttacttgaaggccattattttcttcgatcctgatgcaaagggattgagtgaccctgggaaaattaaaagactccgttcacaggtgcaggtgtcactggaggactacatcaatgaccgccagtacgatagccgggggaggttcggcgagctcctgctactcctgcctacactacaatccattacctggcaaatgatcgagcaaatacagtttattaaactcttcggaatggccaaaatcgacaacttgctccaggagatgttgcttggcggaccgtgccaggcacaggaaggacgtggatggtcaggcgattcacctggcgacaggccccacactgtgtcttccccactgtcatcactggccagtcctctttgccgctttggtcaggtggcatag

SEQ ID NO: 119758 - DNA, 1329 bp, synthetic construct
  misc_feature 1..1329: note = Description of Artificial Sequence: Synthetic coding sequence
  source 1..1329: mol_type = other DNA
atggtgagcgttaatgcaccattaggcgcacctgtcgagagttcatatgatacatcaccatctgagggcaccaacctgaacgcccccaattcactgggggtatcagcattgtgtgccatctgcggcgatcgggccacgggaaagcactacggcgcctcttcttgcgacggctgtaaaggatttttccgccgcagcgtccgcaagaaccacatgtactcgtgcaggttcagcagacaatgcgtggttgacaaggacaagcgaaatcagtgccgatattgcagactgaagaagtgcttccgggctggaatgaagaaggaggccgttcagaacgaacgagataggatcagcactcgcaggtcgtcctatgaggactcatcgctcccctctattaatgctttgctgcaggctgaagttttgtccaggcaaatcactagccccgtcagcggcataaacggcgacatcagggcaaaaaaaatcgcttccattgcagacgtctgtgaaagcatgaaggaacagcttctggtgctggttgagtgggccaaatacataccagctttctgcgagctgcctctagacgatcaggtggccctcctgagagctcacgccggcgaacacttgctgctgggcgctacaaagcggagcatggtgttcaaggacgtcctccttctcggcaatgactacatcgtgcctcgccactgcccagagctcgctgagatgagccgtgtttcaatccgcatcctggacgagctagttctcccatttcaggagctgcagatcgacgacaatgagtatgcatatctgaaagccatcatcttttttgaccccgatgctaagggtctgtcggaccccggaaagataaaaagactgcgctctcaagtacaagtcagcttggaagattacatcaatgaccggcagtatgactcgaggggacgttttggagaactcctactcctcctgcccaccctccagtcaattacgtggcaaatgatcgaacaaattcagttcataaagctattcggaatggctaagattgacaatcttcttcaggaaatgctgttagggggaagccccagtgatgcccctcacgcccatcatcctttgcatcctcacttaatgcaggagcatatgggcaccaacgttatagttgcaaataccatgcctacacacttgagtaatggacagatgtcgactcccgaaactccgcaaccctcaccccctgggggctcaggctccgaaccctataagttgctccccggcgctgttgccaccattgttaaaccattgagcgccatacctcagcctactatcacgaagcaggaagttatatag

SEQ ID NO: 119759 - DNA, 1227 bp, synthetic construct
  misc_feature 1..1227: note = Description of Artificial Sequence: Synthetic coding sequence
  source 1..1227: mol_type = other DNA
atgaatactactgataacggcgtgaactgtctgtgcgccatttgcggcgacagagccaccggtaagcactacggggcttccagctgcgacggctgcaaaggatttttcaggcgcagtataagaaagagccacgtatactcctgtaggttttctagacagtgtgtggtcgataaggacaagcggaatcagtgccgttactgtcggttaagaaaatgttttcgggcggggatgaaaaaagaagcggtgcagaatgaacgagacagaatcagcacaaggaggtcaaccttcgacgggtctaatattccctcaatcaacacgctggcacaggcggaggtccgctctaggcagatcagtgtgtcaagccccggctctagcacagacataaacgtcaagaaaatcgcatccataggagatgtctgcgaaagtatgaaacagcagctgctcgttttagtggagtgggctaagtacattccagccttttgtgagcttccgttagatgaccaggtggccttacttagagcacacgccggagaacacttactgttgggtgcaactaaacggtcaatgatgtataaggatatcctcctgctgggaaataattatgtgattcatcgcaatagctgcgaggtggaaatctctagggtggctaaccgtgtccttgacgagctggtccggcccttccaggagatacagatagatgacaatgaatatgcgtgtctcaaggccatagtctttttcgaccctgatgccaaagggctctccgaccccgttaaaataaagaatatgcgctttcaggtgcaaatcggtctcgaagattatatcaatgaccgtcagtacgactcgcgggggcgtttcggggaactgctgctcctgctgcctactttacagtccattacttggcaaatgattgagcagattcagttcgttaagctctttggtatggtgaagatcgataaccttctgcaggagatgctgctcgggggagcctccaacgacggttcccacctgcatcatcccatgcacccacatttgtcacaggatcccctgactggccaaaccatcttgctcgggcctatgagcacattggttcatgctgatcagatttctaccccagagaccccactgccgagtcccccacaaggcagtgggcaagaacaatacaagatcgctgccaatcaggctagtgtgattagccaccaacacctctcaaagcaaaagcagctgtag

SEQ ID NO: 119760 - DNA, 1338 bp, synthetic construct
  misc_feature 1..1338: note = Description of Artificial Sequence: Synthetic coding sequence
  source 1..1338: mol_type = other DNA
atggacatggccaactacagcgaggtgctagacccaacatatactacactcgagtttgagacaatgcaaatcctttacaactcgtctgactcctcagcccccgagactagcatgaacactactgataacggtgtgaactgcctgtgcgctatttgtggggatagagccaccgggaaacactacggtgcttccagctgcgatgggtgcaaaggctttttcagaagatctatccgtaagagtcacgtttactcgtgccggttcagccggcagtgtgtggtcgacaaggataaaagaaatcagtgccgttattgccgcctccgcaaatgcttccgggccggcatgaaaaaggaagccgtccagaatgagagggaccggatctcgacccggcggtctacctttgacgggtctaacatccccagtataaatacactcgcacaagctgaggtgcgcagtagacagatttctgtgagttccccaggcagctctaccgacattaatgttaaaaagatcgcttcaattggggacgtatgtgagtccatgaagcagcagcttctggtgctggtcgaatgggctaagtatatccctgcattttgcgagctgcccctagatgaccaagtcgccctcctgcgggcacacgcaggagagcacctgctgttgggggcgaccaagaggtcgatgatgtataaggacattctgctcctaggcaacaattatgttattcaccggaacagctgcgaggtcgagatcagccgggtagccaatcgcgttctcgacgaactcgtgcgccctttccaggaaattcagatcgatgataacgagtatgcatgccttaaggcgattgtctttttcgacccagacgccaaggggctgtcagaccctgtaaaaattaagaacatgcgctttcaggtccagattggccttgaagattatatcaatgacagacagtatgattcccgggggagatttggtgagcttctgttgttacttcctactcttcagtccatcacatggcagatgatcgagcagatccagtttgtaaaattgtttgggatggtaaagatcgacaatctgctgcaggagatgctgctgggcggtgcgagcaacgatggatctcacctgcaccaccccatgcatcctcacctcagccaggatccccttacaggtcaaacaatcttgttggggcccatgagcactcttgtgcatgctgaccagatcagcacccctgaaacacccctcccatctcccccgcagggaagcgggcaggagcaatataagatcgccgcgaaccaggctagcgtgatttctcaccagcacctgtccaagcagaaacagctgtag

SEQ ID NO: 119761 - DNA, 723 bp, synthetic construct
  misc_feature 1..723: note = Description of Artificial Sequence: Synthetic coding sequence
  source 1..723: mol_type = other DNA
atgtccaggagcaacagacaaaaggagtataaatgcggagacttggtgttcgcaaaaatgaaggggtaccctcattggccagcaaggatcgacgaaatgcctgaagccgctgtcaaatccaccgccaacaaatatcaagtcttcttttttggaacacacgaaaccgcctttctaggtcctaaggacctgtttccctatgaggaatcaaaggaaaagttcggtaagccgaataaaaggaagggattttcagaggggctgtgggagattgagaataaccccacagtgaaagcctcaggctaccagagcagccagaagaagtcctgtgtggaggaacctgagccagagcccgaggctgcagagggtgacggagataaaaagggaaacgccgaagggagtagtgacgaagaggggaagctggtaatcgatgagccagcaaaggagaaaaatgaaaagggcgcactgaagcggcgcgccggcgatcttcttgaagattccccgaagcgtccgaaggaagccgagaatcccgaaggcgaagagaaagaagctgctaccctggaggtcgaacggcctctcccaatggaggtcgagaaaaacagcaccccaagcgagcccggatccgggcggggtccacctcaagaagaggaggaggaagaggatgaagaggaggaggctactaaggaggatgctgaagcccccgggatacgggaccatgaatctctttag

SEQ ID NO: 119762 - DNA, 771 bp, synthetic construct
  misc_feature 1..771: note = Description of Artificial Sequence: Synthetic coding sequence
  source 1..771: mol_type = other DNA
atgcacccagagggaggccaattcgtccctcagctcctcggacatctgctcgccaccaaactcaagaggtttctcttatccaaaggcggcaggcgggcccagatcccagatgtcagccgcgccacccctcatactattgacgaaatgcctgaggcggccgtgaagtccactgccaacaaatatcaggtcttttttttcggtacgcatgaaacggccttcctcggacccaaagacttgtttccatatgaagagagtaaagagaagttcggcaaacctaacaagcgcaagggattctccgagggtctctgggagatcgagaataacccgacagtgaaagcgtcgggttatcagagctctcagaagaaatcctgcgtggaggagcctgaacccgagccagaggcagcggaaggtgacggagataagaaggggaacgcagaggggagcagtgacgaggaaggcaaattagtcatagacgaaccagcaaaagagaagaatgagaagggcgctctgaagcgaagggccggcgacttgctagaggattcaccgaagagacctaaagaggctgagaatcccgaaggtgaagagaaggaggctgccaccctggaggtggagaggcctctgcctatggaggtggaaaaaaactcaaccccatctgagccagggagcggccgggggcctccccaggaagaggaagaagaggaggatgaggaagaggaagcaactaaggaagatgcggaagctccaggaatccgcgatcatgagagtctgtag

SEQ ID NO: 119763 - DNA, 702 bp, synthetic construct
  misc_feature 1..702: note = Description of Artificial Sequence: Synthetic coding sequence
  source 1..702: mol_type = other DNA
atggagcaacgggcagggggaaaccgggtgcagaccagcaccctgaactgcgcaggcgcagcggtcatcgacgagatgccggaggctgctgtgaaaagtacggcaaataagtaccaggtcttctttttcgggacgcacgagaccgccttcctggggccaaaagacctgtttccttacgaggagtctaaagaaaagttcggaaaaccgaataaacggaaaggcttcagcgagggcctgtgggagatcgagaataatcccaccgttaaagcctcagggtaccaatcctcccagaagaagagctgtgtcgaggagccagagccagagcctgaggccgctgagggagatggagacaaaaaagggaacgctgaaggatcaagcgatgaagaggggaagctcgtgatcgatgagccggccaaagagaagaatgagaaaggcgcactgaagagacgagccggagatctcctcgaagatagccctaaaagacccaaggaggccgagaaccctgagggggaggaaaaagaagccgctactttggaggtggagagacctcttccaatggaggttgagaagaactctaccccctccgaaccgggtagtggaagagggccgccacaggaggaggaagaagaagaagatgaagaagaggaggccactaaggaggatgctgaggcgccaggtattcgggaccacgaaagcctgtag

SEQ ID NO: 119764 - DNA, 789 bp, synthetic construct
  misc_feature 1..789: note = Description of Artificial Sequence: Synthetic coding sequence
  source 1..789: mol_type = other DNA
atgtctagaagtaatcgccagaaggaatacaagtgtggtgacctcgtgttcgccaaaatgaaaggttaccctcactggcccgcccgcattgatgagatgcctgaagccgctgtcaagagcactgctaataaatatcaggtatttttttccggccctacaagaagacacagctgggcaccgaaaacaagctctctgacaagaaatccacgccgctcacttgccagcccaacacgaggaaagggaagtgcacgcggctgtggccgctcccgtacaaccctgctgtcaaggctacccgcgatttcaccacccccatcttgtactgaaccctgtctgcctggccagtgggtgtaccctggagctaaccctactgagtccagtcagaaaaagtcatgcgtagaagaacctgaacccgaacccgaagctgccgaaggggacggcgacaagaagggcaacgccgaaggctcttctgacgaggagggtaagttggtcatagatgaaccggcaaaggagaaaaacgaaaaaggcgccctgaaacgcagggccggggacctgctcgaagattctcccaagaggccaaaagaggcagagaatcctgaaggcgaagagaaggaggcagcaacactggaggtggagaggccactgcccatggaagtcgagaaaaatagtactccttctgagcctgggtcagggcggggacccccacaggaggaggaagaggaggaggacgaggaagaggaggctaccaaagaagatgccgaagctccgggtatcagagatcacgaaagatag

SEQ ID NO: 119765 - DNA, 627 bp, synthetic construct
  misc_feature 1..627: note = Description of Artificial Sequence: Synthetic coding sequence
  source 1..627: mol_type = other DNA
atgccagaagcagccgtgaaatctacggcaaacaaataccaggtgtttttctttgggactcatgagacggctttccttggtcctaaagatctcttcccttacgaggagtccaaggagaaatttggaaaaccaaataagcgcaagggctttagtgaggggctctgggagatcgaaaacaaccccacggtaaaagcctccggctatcagagtagccagaaaaaatcttgcgtggaagaacctgaacctgagccagaggctgcagagggcgatggagataagaagggtaatgcggaggggagttccgacgaggagggcaagcttgtgatcgatgaacctgcgaaagaaaagaacgagaagggagccctaaaacgccgtgccggtgatttgttagaggactctcccaagcgtcctaaggaggccgagaatcctgaaggcgaggagaaggaggcggccaccctcgaagtcgagcggccactacccatggaggtcgagaagaactccacaccgtctgaacccggcagtggacgcggtccacctcaggaagaggaggaggaggaagacgaggaagaggaagctaccaaagaggatgctgaggccccagggatcagagatcacgagtcgctgtag

SEQ ID NO: 119766 - DNA, 723 bp, synthetic construct
  misc_feature 1..723: note = Description of Artificial Sequence: Synthetic coding sequence
  source 1..723: mol_type = other DNA
atgagtagatctaaccggcagaaggagtataaatgcggtgacttagtgtttgctaaaatgaagggttatcctcactggccagcacgcatcgacgaaatgcctgaggccgctgtgaagtccactgctaacaaatatcaggttttcttcttcggtacacacgagactgccttcctggggcctaaagacctgttcccttatgaggaatccaaggaaaaatttgggaaaccgaataaacggaagggcttttccgagggtctgtgggagattgagaacaacccgacggttaaagcatcggggtaccagagctcccagaaaaaatcttgcgtcgaagaacctgagcctgagcccgaagcagccgaaggcgacggcgacaaaaagggaaatgccgaggggtccagcgacgaggagggaaagttggtgatagacgagcctgccaaagagaagaatgaaaagggggccctcaaacgcagggctggcgacctgctggaagattcccctaagcgtccaaaggaggcggaaaaccccgaaggcgaggagaaggaagccgctacattggaagtcgaacggccgctgccaatggaggtggagaagaactccactccaagcgaacccgggtctggccgtggtcctccccaggaggaagaggaggaagaggacgaggaagaagaagctacaaaggaggacgccgaggcccccggcattagagatcatgagtctctttag

SEQ ID NO: 119767 - DNA, 2676 bp, synthetic construct
  misc_feature 1..2676: note = Description of Artificial Sequence: Synthetic coding sequence
  source 1..2676: mol_type = other DNA
atgcatgccattaacggattcgttttcgggaacctgcccgagctaaatatgtgcgctcagaagcgcgtcgcatggcatctgttcggcatgggaaacgaaatcgacgtgcacaccgcattctttcatgggcagatgctgaccacccggggacatcatactgacgtggccaatatcttccctgctacatttgtcactgctgagatggtaccctgggagcccgggacatggctgatctcttgccaggttaatagccattttcgcgatggtatgcaggccctgtacaaagtgaagtcttgctctatggcccccccagttgacctccttacaggaaaagtgagacaatatttcattgaagcacacgaaatccaatgggattacggtcctatggggcacgatgggtctacagggaaaaaccttcgagagccaggctccatatcggataagtttttccagaaaagcagcagcaggatcggggggacttactggaaagtgcggtacgaagccttccaggacgaaacatttcaagagaaaatgcacctggaggaggatcgccatctggggattctcggccccgttataagggctgaagttggtgacacaatacaggttgtgttttataatagggctagccagcctttttctatgcagcctcatggggttttttacgaaaaagattacgagggcactgtgtacaacgacggatctagctaccctgggctggtggcaaaacccttcgaaaaggtgacctacagatggacagtgccccctcacgctggacctacggctcaggaccccgcttgtctcacctggatgtacttttctgctgccgaccccattagggatacgaatagcggccttgtcggccctctgctggtctgccgagctggggcgcttggtgcagatggcaaacagaaaggagttgataaagaattctttctgttattcaccgtgcttgatgaaaacaagagctggtattcaaacgcaaaccaggcagcagccatgttggattttcggctgttgtctgaagacattgaggggttccaggactcgaatagaatgcatgccatcaacgggtttctcttctccaacctgccgaggcttgacatgtgcaagggcgacaccgtggcgtggcacctactgggcttaggaaccgagactgatgtgcacggcgtgatgttccagggcaataccgtgcagttacaaggcatgaggaaaggagcggcaatgctgtttccacatacattcgtgatggctattatgcagcccgataacctgggtacatttgagatttactgtcaggcgggatcccaccgcgaggccggcatgcgggccatctacaatgtctcccagtgcccaggacaccaggcaacaccaagacagagatatcaggctgcgcggatctattacattatggctgaggaagttgagtgggattactgtcctgatcggagttgggagagagagtggcacaaccagtcagagaaagactcttatggttatatcttcttatctaataaggacggcctgctaggaagtaggtacaagaaggctgtctttagggagtacactgatggcacctttcgaattccccgcccccggaccggacctgaagaacacttggggatcctcggccctcttatcaaaggcgaagtaggcgatattttgaccgtggtgtttaaaaataacgcctcaaggccctatagtgtgcatgcacatggcgtcttggagtctactactgtttggcccctggcggcagagccaggcgaggtggtgacctatcagtggaatatcccagaaagatccgggccaggaccaaacgattccgcttgtgtgagctggatctattattccgcagtggaccccatcaaagacatgtatagtgggctcgtgggacccttagctatttgccagaaagggatactcgagccacatggaggacgctctgacatggatagagaatttgccctgttgttcctgattttcgatgaaaataagtcatggtatctggaggagaacgtggctactcacggttcacaggatcccggttccataaacctacaggacgagacatttttggaatccaataaaatgcacgcgataaatggaaagttgtatgctaacctgcgcggcctgacgatgtaccagggcgaaagagtcgcatggtacatgctggccatgggacaggatgtggatctccataccattcactttcatgcggaatcctttctgtatcgtaacggcgaaaactatagagccgatgtggttgatctcttcccaggcactttcgaggtcgtggagatggtagcctctaacccaggcacgtggctcatgcactgtcacgttaccgatcatgtgcacgccggaatggaaactctattcacagtatttagcagaaccgagcacctgtccccacttacagtgattacgaaggagacagaaaaggccgtgcctccgagagacatcgaagagggtaatgtcaaaatgctaggtatgcagatacccattaaaaacgtagaaatgcttgctagcgttctggtcgccattagtgtgacactgctgttggttgtcctcgccctggggggcgttgtgtggtatcagcacaggcaacgcaagcttagaaggaatagacggtcaatactcgatgatagtttcaaactcttgtcattcaagcaatag

SEQ ID NO: 119768 - DNA, 3477 bp, synthetic construct
  misc_feature 1..3477: note = Description of Artificial Sequence: Synthetic coding sequence
  source 1..3477: mol_type = other DNA
atggaatccggtcacctcctttgggcactactcttcatgcagtctctttggccgcaactgacagacggcgccaccagggtgtactacttgggaatccgcgacgtccagtggaactatgcacccaagggccgcaatgtgatcactaatcagccactggactcagatatcgtagcatcctctttcctgaagtccgataaaaataggatcggtggcacatataaaaaaacaatttacaaagagtacaaggatgactcctacacggatgaggtggcgcagcctgcctggctgggcttcctcggacccgtccttcaggccgaggtcggagatgtaatactgattcatctgaagaatttcgcaacacgaccatacacaattcaccctcacggggtgttttatgagaaggatagcgaaggatcactgtaccctgatggatcatccgggccactaaaggccgatgattccgtgcctcctggcgggtcgcacatttataattggacaattccagagggccatgctcccactgacgctgaccccgcttgtttgacctggatttatcatagtcatgtcgacgcccctcgggacattgctactggactcatcggcccactcattacttgcaaacgcggcgcactggacggcaattctcctcctcagcggcaggatgtagaccatgattttttcctcctgttctctgtcgtggatgaaaacctttcttggcacttgaatgaaaatattgccacatattgcagtgaccctgcctctgtggacaaagaggacgagacctttcaagagagcaatcgcatgcatgcaattaacgggttcgtcttcggtaatctgccagagctgaacatgtgtgcccagaagcgcgtggcttggcatctgttcggcatgggcaacgagattgacgtacatacggccttttttcatggccaaatgctgaccactagagggcaccacacggatgtggccaacatttttccagctacattcgtgacagccgagatggtgccctgggaaccgggcacctggcttatatcctgccaggtgaatagccatttccgtgacggtatgcaagccttatataaagttaagtcgtgctccatggcaccgcctgttgatctccttacaggtaaggtaaggcaatatttcattgaagctcatgaaatccagtgggactacgggccaatgggccatgacggctctaccggcaagaacttgagggaacccggttcaatttccgataaatttttccagaaatcatcgagtcgcataggggggacgtactggaaagttcggtacgaggcttttcaggacgaaacattccaggagaaaatgcatctcgaggaagatcggcacttagggattctcggacctgtcatcagagccgaggtcggagacaccatccaagtggttttttataaccgggcttcacaaccgttcagtatgcagcctcacggggtattctacgagaaagattatgaggggaccgtgtacaatgatggttcatcttatccaggcctggtagctaagcctttcgagaaggtcacctatagatggaccgtacctccccacgcagggccaactgcccaggatcctgcctgtttaacgtggatgtatttctcggcagccgatcctatccgtgataccaactctggcctggtgggacctctcctggtctgtagagccggcgccctgggtgccgacggtaagcaaaaaggggtagacaaagagttcttccttctgttcacagtgctggatgagaataaaagctggtactctaatgccaaccaggctgccgccatgctggacttcaggctcttgagcgaagacatcgaaggtttccaggattccaacaggatgcacgcaatcaatggctttctgttttctaatttgccaaggctggatatgtgcaagggagacaccgtggcctggcacctgctgggactgggtaccgagactgacgttcacggggttatgttccagggaaatactgtgcagctccagggcatgcgcaagggagctgccatgcttttccctcatacttttgtaatggcgataatgcagccagacaacttggggactttcgagatctactgccaggcgggctcccaccgcgaagctggcatgcgtgccatttataatgtgagtcaatgtccggggcatcaagctacaccccggcaaaggtaccaggctgcccgcatctattacattatggccgaggaagttgaatgggactattgtcctgataggtcatgggagagagagtggcacaatcagtccgagaaggattcatatggatatatcttcctgagcaataaggatggactccttggcagcaggtacaaaaaagcggtatttagagaatacactgacggcaccttccgcatccctcgcccccgcaccggacccgaagaacacctgggaattctcggtccccttattaaaggagaggtaggagatatattaactgtcgtgttcaagaacaacgcctccagaccatattctgtccacgcacacggtgtcctggaatctactacagtctggcctctggccgctgagccgggcgaagtggtcacctaccagtggaacatccctgagcgcagtggtccaggacccaatgattcagcctgtgtgtcttggatctattactccgcagtggatcctatcaaggacatgtattccgggctggtcggccccttggctatctgccaaaagggtatacttgagcctcacgggggccgctctgatatggaccgggagtttgccctgttatttcttattttcgacgagaataaatcctggtacctggaggagaatgtagccactcacggatctcaggaccctgggagcatcaatcttcaggacgagactttcctcgagagcaataaaatgcacgccatcaacggcaaactgtatgccaatctcagggggctgaccatgtaccaaggcgaacgtgtggcttggtacatgctggcgatgggccaggatgtcgatctccacacaatccactttcacgccgaaagttttctctaccggaacggtgagaactacagagcagatgtagtcgacttgttcccaggaacgttcgaggttgtggagatggtcgcctctaacccaggcacttggctcatgcattgccacgtaactgatcacgttcacgctggcatggaaactttgtttaccgtattctccagaaccgaacatctgtctcccctgacagtgatcacaaaagagacagagaaagcagtccctcctcgtgacatagaagagggtaatgtgaaaatgcttggcatgcagatccctataaaaaatgtggagatgctagcgtcggtactggtcgccattagcgtgacactgctgttggtggtgctcgcactgggcggggttgtctggtatcaacataggcagcgaaagctgagaagaaatcgcagatccatactagatgactctttcaagttattatccttcaagcaatag

SEQ ID NO: 119769 - DNA, 3486 bp, synthetic construct
  misc_feature 1..3486: note = Description of Artificial Sequence: Synthetic coding sequence
  source 1..3486: mol_type = other DNA
atgtgggctatggagtctggtcatttactctgggccctgttattcatgcagagtttatggccacagctgaccgacggagccactcgcgtgtattacctcggaattagggatgttcagtggaactacgcgcccaaaggtcgcaacgtgataaccaaccaaccccttgattctgatatcgtggcatccagcttccttaagtctgataagaaccggatcgggggaacctacaaaaaaaccatttataaagagtacaaagacgatagctataccgatgaagttgcccaaccagcatggttgggattcctcggccctgtcctgcaggcagaagtcggcgatgtcatcctaattcacctgaaaaacttcgctaccagaccctacacaatccatccccacggcgtgttctacgagaaagatagcgaaggatctctatatccagacgggtcctccggccctctgaaagcagatgactcggtgccacctgggggatcacacatctacaactggaccattcccgaagggcatgcacctacggatgcagaccctgcttgtctcacatggatctaccacagccatgttgacgctcccagggatattgcaacaggcctcataggccccctgatcacctgcaagcgcggcgcgttggatggaaactctccaccacagaggcaggacgtagatcacgatttctttctccttttcagcgtggtggatgaaaatctgagttggcatctgaatgaaaacatagccacatactgttccgatcctgcttccgtcgataaggaggatgaaacttttcaggagagcaacagaatgcatgcgattaacggctttgtcttcggaaacctacccgagctgaacatgtgcgctcagaagagggttgcttggcaccttttcgggatgggcaacgaaatagacgtccacaccgcgttcttccacggacaaatgctcaccacaagggggcaccacacagacgtagctaacatttttccggctacgtttgttactgctgagatggtgccctgggaacccgggacctggctgatctcatgtcaggtaaacagtcatttcagagatgggatgcaggcactctacaaggttaagagctgctctatggcccctcccgtggacttgctcacaggaaaggtcaggcagtatttcatcgaagcgcacgagatccagtgggattacggacctatgggccacgatgggtccacaggtaaaaatctgagagaacccggaagtatcagcgataagtttttccaaaagagctcaagccgaattgggggcacatactggaaggtgcgatacgaagcattccaagatgaaacttttcaagaaaagatgcatctggaagaagaccgacacctcggtatccttgggccggtgattcgcgctgaagttggtgatacgatccaggtcgtcttctataaccgggcgtcccagcctttctccatgcaacctcatggcgtgttttacgagaaggactacgaggggacagtgtataacgacgggtctagttatccaggccttgttgctaaacctttcgaaaaagtcacctatcgctggaccgtaccaccgcacgccggacccaccgcccaggatcctgcgtgtcttacgtggatgtactttagcgccgcagacccaattcgggataccaacagcggtctcgtgggacctctgttagtttgcagggcaggggctttgggagccgacggaaaacagaagggggtcgataaggaattctttttactcttcactgtattggatgaaaacaaatcatggtactctaatgctaatcaagctgctgctatgctcgacttccgcctgctgagtgaagatatcgaggggttccaagacagtaataggatgcacgccataaacgggttcctgttttccaatctcccacggcttgatatgtgcaaaggggatacagttgcatggcatctattggggctgggcacagagactgatgttcatggagtgatgtttcaaggaaatacagtccagctacaggggatgcgaaagggcgctgccatgctgttccctcacacattcgtgatggccatcatgcagccagataacctgggcacatttgagatttattgtcaagccggctctcatcgagaagccgggatgagggctatctataacgtgagccaatgtcctggccaccaggctactccgagacagcgctatcaggctgctaggatttattacattatggcggaggaagtggagtgggactactgtcccgaccgaagctgggaacgggagtggcataatcaatctgagaaggacagctatggctacatctttttgagcaataaggacggcttattgggaagccgctataagaaagcagtgttccgggagtacactgatgggactttcagaataccgcggccacggactgggcccgaagaacacctgggcatactgggtccactcatcaaaggggaagttggggatattcttactgtggtgttcaaaaacaatgcatcgcggccctattccgtccatgcgcacggcgttctggagtcaacgacggtctggcccttggctgctgaacccggcgaagttgtgacttaccaatggaatatccctgagcggtcaggacccgggcccaacgactcagcatgcgtttcctggatctactactcagccgtagacccaattaaggatatgtacagcggcctcgtggggccgttagccatttgccaaaagggtatactggagccccatggcggtagatctgacatggatagggaatttgctctgctgtttttaatttttgatgaaaacaagagctggtacctcgaagagaatgtggcgacccatggcagccaggatccgggctctatcaacctccaggacgagacctttctggagagcaataaaatgcatgcgattaatgggaagctttacgcgaacttgagaggcctcacgatgtatcagggggagagggtggcctggtatatgctagcgatggggcaggatgtagaccttcacactatccacttccacgccgagtccttcctttatcgaaacggtgaaaattatcgggccgatgtggtggatctgttccccgggaccttcgaggttgttgagatggttgcatccaaccctggaacatggctgatgcattgccatgtcacagaccacgtccatgccggaatggagacactgttcacagttttttccaggaccgagcacctgagcccattaacagtcattactaaggaaacagaaaaggctgttccaccccgtgatatcgaagaagggaatgtgaaaatgctcggtatgcagatccccattaaaaatgtcgagatgttggctagcgtcctcgtggccatcagcgtgaccctgctgctagttgtgcttgccctaggcggtgtggtctggtaccagcatagacagcgaaaactgcgacgcaatagacggtctattctggatgattcatttaagctgctctcttttaagcaatag

SEQ ID NO: 119770 - DNA, 2910 bp, synthetic construct
  misc_feature 1..2910: note = Description of Artificial Sequence: Synthetic coding sequence
  source 1..2910: mol_type = other DNA
atgtgggctatggagtcaggacacctcctgtgggcactcttgttcatgcagagtctatggcctcagctgaccgatggcgccacacgggtctattacttagggattcgggacgtgcaatggaactatgctcctaagggcagaaacgtgatcactaaccagccactcgatagtgacatagtggcctcctcattcctgaagtctgacaaaaaccgcatcggcggcacatataagaagaccatctacaaggaatacaaagatgacagttatacggacgaagtggcacagcccgcttggctcggtttcttgggaccagtgcttcaggctgaagtcggagacgtgatcttgattcacctcaagaacttcgcgactcgcccttacactattcatcctcatggcgtgttttacgaaaaagactctgagggctctctgtatccagacgggtcaagcgggcctctgaaggcagacgatagtgttccacctggggggtcccacatatacaattggactattccagaagggcatgccccaactgacgcggatcccgcttgtctgacctggatttaccactcacacgtagacgcccccagagacattgctactggcctcataggtcccctgataacatgcaagagaggggccctcgatggtaacagccctcctcagcggcaggacgtcgaccatgactttttcttgttattttctgtcgtggatgagaatctcagctggcatctgaatgagaacatcgcaacgtattgtagcgacccagcaagtgtggataaagaggacgaaacattccaggagagtaaccggatgcacgcaatcaacggcttcgtttttggtaacctgcctgagctgaatatgtgtgcccagaagagggtcgcctggcacctcttcgggatggggaatgagatcgacgtccacactgcctttttccatggacagatgctcactactcgaggacatcacaccgatgtggctaacatttttcccgctaccttcgtcacagccgagatggtaccctgggaaccggggacatggctaatttcctgccaggtcaacagccacttccgcgacggcatgcaggccctatacaaagtgaaatcctgctctatggctcccccagtcgacctgctgacagggaaggtgcgccaatatttcatcgaggcccatgagatacagtgggactacggtcctatgggacacgatgggtctacagggaagaacctgagagaaccggggagtattagcgacaagtttttccagaaatccagctccagaattggcgggacctactggaaggtacgctacgaagccttccaggatgagacatttcaggagaagatgcatctggaggaggataggcaccttgggatcttaggacccgtgatccgggcggaggtgggagacaccatccaggtagtgttttataatcgcgcttcacagcccttcagcatgcagcctcatggggtcttttacgagaaggactacgagggcacagtatataacgatggcacttttgaaatatattgccaggctggatcccatcgggaagcaggtatgcgtgccatctacaatgtaagccagtgtcctggccaccaggccacgccgaggcaacggtatcaggctgcacgtatctattatattatggcagaggaggtggaatgggactactgtcctgacagatcttgggagcgagaatggcacaaccagagcgagaaggactcatatggctatattttcttgtctaacaaagatggactgctcggttccagatacaagaaggctgtgtttagggaatacaccgacggtacattccgaattccgaggccgagaaccggtccggaggagcacctggggatcctgggcccactgattaagggtgaggtgggcgatatattgaccgtggtatttaaaaataacgcgtctcgaccttattccgtgcacgcacatggggtgcttgaatcgaccaccgtttggccgctcgcagcggagcccggcgaggtcgtcacctaccaatggaatattcctgaaagatcagggcccggccctaatgacagtgcatgtgtctcttggatctactactctgccgtggatccgatcaaagacatgtattccggacttgttggtcccctagcaatatgccaaaaagggatcctagagccccatggagggcggagcgacatggaccgagaattcgccctattattcttaatcttcgatgagaataaatcctggtacttggaggaaaacgttgctacccatgggtctcaggaccccggctccatcaacctgcaggatgagacctttctggaaagcaataaaatgcacgctattaacggcaagctctacgctaatctccgaggcctaactatgtaccagggcgagcgcgtcgcttggtacatgctggcaatggggcaggatgtagacctccatacaattcatttccatgctgagtctttcctgtatcggaatggagagaactatagagccgacgttgtggatctatttcccggcacgtttgaggtagttgagatggtagcgtcaaatccaggaacttggctcatgcattgtcacgttacggaccacgtacatgccgggatggaaactttgttcacagtgttcagccgaaccgagcatttgtcgcccctcacggtcattactaaagagacagagaaagctgtccctccgcgggatatcgaggaaggtaacgttaaaatgctcgggatgcagattcctattaaaaacgtggagatgctcgcttctgtgctcgtggccatatcagtcaccctccttctggtggtattggccctgggcggggtggtttggtatcagcacagacagcggaagctcagacggaacagaagaagtatcttagatgactcctttaagctactgtcgttcaaacagtag

SEQ ID NO: 119771 - DNA, 2436 bp, synthetic construct
  misc_feature 1..2436: note = Description of Artificial Sequence: Synthetic coding sequence
  source 1..2436: mol_type = other DNA
atggaatcaggtcatttgctttgggcactgctcttcatgcagtcattgtggccccagttaacagacggcgccactagagtttactatttaggaattcgtgatgtccagtggaactacgccccaaaaggcagaaacgtcataacaaaccaaccccttgacagcgacatcgtggcatccagtttcctcaagtccgacaaaaacagaatcggcggtacttacaaaaagactatctacaaggagtacaaagacgattcgtatacggatgaggtggcccaaccagcatggttgggctttctgggcccagtgcttcaagctgaggtcggtgacgtgattttaatccacctcaaaaacttcgctacgaggccgtatacaattcatccccatggcgtcttctatgaaaaagacagcgagggaagtctttacccagatggaagcagcggccccctgaaagcagacgactccgtgcctccaggcggcagccacatctacaactggacaatcccagagggacatgccccaacggacgcagaccccgcttgcttgacttggatctatcacagccatgtagacgcccctcgcgatattgcaaccggactaataggcccacttattacttgtaagagaggcgcactggatggcaactcaccaccacagcgacaggatgtggatcacgatttcttcctgcttttctccgttgtggatgaaaacctctcatggcatctgaacgaaaacatcgctacttactgttctgacccagcttcagttgacaaggaagacgaaacattccaggaatccaacagaatgcatgccatcaatggtttcgtctttgggaacctgcccgagttgaacatgtgtgctcaaaagagggttgcctggcatctctttgggatgggtaacgagattgacgttcataccgctttcttccacggccagatgctcacaacaaggggccaccatacagacgttgctaatatttttcccgcgacatttgtcactgccgaaatggttccatgggaacctggcacctggctaatttcttgccaggtgaactcgcacttcagagacggaatgcaggccctctataaggtaaaatcttgctccatggcacccccggtcgatttgctgacaggaaaggtccggcagtacttcatcgaagcacatgagatccagtgggattacggacccatggggcatgacggcagtactggcaagaacctccgcgaaccaggctcaataagcgataagtttttccaaaaatcgagcagccggattggtgggacctattggaaggtaagatatgaagcttttcaggacgaaacctttcaggaaaagatgcacttggaagaagacaggcatctggggatcctgggaccggtgattagagccgaagttggcgatacaatccaggtagtattctataaccgcgcatctcagcccttcagcatgcagcctcacggcgttttctacgaaaaagattatgaggggacagtctacaatgatgatcccatccgggacacgaacagtggtctggtgggaccattgctcgtctgtagggctggcgctctgggagcagacggaaagcagaaaggtgttgacaaggaattctttctactcttcacagtgctggacgagaacaaatcctggtactctaatgctaaccaagccgccgcgatgttggattttcggctgctgtccgaggatatagagggctttcaagactctaataggatgcatgccattaacggtttcctgtttagcaacctccctcggttggacatgtgtaaaggggacaccgtggcctggcacctcctggggctgggaacggagacagatgtgcacggggtgatgtttcagggaaataccgttcaactgcaaggaatgagaaagggagccgctatgcttttcccccacaccttcgttatggccattatgcagccagacaacctgggaacttttgagatctattgccaggccggatcccaccgcgaggccgggatgcgagctatttataacgtatctcagtgccctggacatcaggctacacccaggcagaggtaccaggcagcgaggatatattacataatggccgaagaggtcgagtgggattattgcccggacagaagctgggagagggaatggcataaccagtccgaaaaagacagctacggatacatatttctgtcaaataaagatggtctcctcggatcccgctataagaaagccgtttttagagagtacactgacggtacatttaggataccacggccgagaacgggccccgaagaacatctgggaattttgggacccctcatcaagggtgaagttggtgacatcctgacagtggtgttcaaaaacaatgcaagccgcccttactccgtacatgctcacggggtccttgagtccaccactgtgtggccgctggcagctgagccttag

SEQ ID NO: 119772 - DNA, 3483 bp, synthetic construct
  misc_feature 1..3483: note = Description of Artificial Sequence: Synthetic coding sequence
  source 1..3483: mol_type = other DNA
atgtgggccatggaaagtggccacttactgtgggcgctgctgtttatgcagagtctgtggcctcagctcaccgacggggccacaagggtctattacctcggaataagggatgtgcaatggaattatgcccctaaggggcgcaacgtgattacaaaccagccgctggatagcgacatcgttgccagtagcttccttaagtctgataagaatcgtatcggcggtacttataagaagactatttacaaagaatacaaagacgacagctacactgatgaggtggcacagccagcatggctgggttttctcgggcccgttcttcaggcggaagttggagatgttattttaatacacttgaagaattttgcaacaaggccatacacaatccatccgcatggcgtattctacgaaaaagactctgagggctccctgtatcccgatggatctagcggacctctcaaggccgacgattctgtgccaccgggagggagtcacatctacaactggacaatccccgagggtcacgcaccgaccgatgcagaccccgcgtgcctcacatggatttaccattctcacgtggacgctccccgcgacatcgcaaccgggctgattggaccacttattacatgcaaacgcggcgcactcgacggaaatagtccacctcagagacaggacgtggaccacgacttctttctcctcttctctgtggtggatgaaaacttgtcctggcatttaaacgaaaacatcgcaacttactgttcagaccctgcctcggtggataaagaagacgaaacattccaagagtccaatcggatgcacgcgatcaacggattcgttttcgggaacctgcctgagctgaacatgtgtgcgcaaaagcgagtggcctggcatttatttgggatgggtaacgagatcgatgtacatacagcatttttccatgggcagatgttaacgacacgcggacaccacactgatgtcgcgaacatctttccagcaaccttcgtgaccgccgagatggtaccctgggagccgggtacatggctcatatcctgtcaggtgaattcacattttcgagatggaatgcaggcactgtacaaagtgaagagctgctctatggcgcctcccgtggatctgctgactgggaaggtccgccaatattttatagaggcccatgagattcagtgggattatggccccatgggccacgatgggtccacaggaaagaacctcagagaacccggtagcattagcgataaatttttccagaagagctcaagtcgaatcggaggcacgtattggaaagtccggtacgaagcttttcaagatgagactttccaggagaagatgcacctggaggaagatcgccacctcggaatattgggacctgtcatccgtgccgaggtcggagatacgatccaagtagtcttctataatagagctagccagcctttctctatgcagccacatggcgtcttctacgagaaggattacgaagggacagtgtacaatgatggttcatcctaccccggccttgtagcaaagcccttcgagaaggtcacctaccgctggacggtcccccctcacgctggtccaacagcacaagaccccgcctgtctgacatggatgtacttctcggctgctgaccctatccgggatacgaactctgggctggtaggccctttgctggtctgtcgagctggagcgctcggagcagacggcaaacagaaaggcgtcgacaaagaatttttcttgttatttactgtgctcgatgaaaacaagagttggtattccaacgccaaccaggcagccgctatgttagacttcaggttgttatccgaggacattgaaggatttcaagactctaatagaatgcatgccattaacggattcctgttttctaatctcccccggcttgatatgtgtaaaggggatactgtggcttggcatctgctgggcctcgggactgaaacagatgtccacggggttatgtttcaggggaacaccgtgcagctgcagggtatgcgtaagggcgctgccatgctgtttcctcacaccttcgttatggccataatgcagcccgataatctgggaacttttgaaatctactgtcaagcgggcagccacagggaagctgggatgcgagccatatataacgtgagccagtgcccaggccatcaggccactccccgtcagcgttatcaggctgcgaggatctactacataatggccgaagaagtggagtgggattattgtccggatcgctcatgggaaagggagtggcacaaccagtctgagaaggattcatatggctacattttcctgagcaacaaggacggcctcctgggctcacgctacaaaaaggccgtgtttcgagagtacaccgatggcacatttcgaataccacgtccccggacaggtcctgaggaacatctgggtatcctggggccgctgatcaaaggggaggtaggcgacatcctcacagtagtcttcaagaacaatgcttcacggccgtactctgttcatgcacacggagtactggagtccaccactgtgtggccacttgcagccgagccaggcgaagtcgtcacttaccagtggaacataccagaaagaagcggcccagggccaaatgatagtgcttgtgtctcttggatctattacagtgctgtagacccgatcaaggacatgtactcaggtctggtgggaccccttgccatctgccagaagggtattctggagcctcacggcgggaggtccgacatggatcgtgaatttgccctcctattcctcatttttgacgaaaacaaatcttggtatttagaggagaacgtggcaacgcacgggtctcaggacccagggagcatcaacctgcaggatgagaccttcctcgagtcaaacaagatgcatgccattaacggtaagctctacgcaaacttaagaggccttacgatgtaccaaggggaaagggtggcttggtacatgttggctatgggtcaggacgtggacttgcacactattcatttccacgcagagagctttttatatcggaacggagagaattatcgcgccgatgtggtggatttgttccctggaacctttgaagttgtggagatggtggcctcgaatcctgggacttggctcatgcactgccatgtcactgatcatgtgcacgcaggaatggaaacactgtttactgtcttctcccgcaccgagcacttatcgccactgaccgtgatcaccaaggagactgaaaaagtccctccacgtgatattgaggaagggaatgttaaaatgctgggaatgcagattcccattaagaacgtggaaatgctggcttccgtgctggtcgctatcagcgtaacgctgctgcttgttgtgctcgcactcgggggcgtggtgtggtaccagcacaggcagcgcaaactccgtagaaaccgtaggtcgattctggacgactcctttaaactgctctctttcaaacagtag

SEQ ID NO: 119773 - DNA, 627 bp, synthetic construct
  misc_feature 1..627: note = Description of Artificial Sequence: Synthetic coding sequence
  source 1..627: mol_type = other DNA
atggagtctggccacctcttatgggcactgctgttcatgcagtccctgtggcctcagctcacggatggtgccactcgcgtctattatctcggtatcagggatgttcagtggaactatgcccctaaagggcgcaatgttatcactaatcaaccactggattccgacatagtagccagcagctttctcaaatccgataaaaaccggattgggggaacctacaaaaaaactatctacaaggaatacaaggacgactcgtatacagacgaggtggcgcagcccgcttggttaggcttcctgggccctgtcctgcaagccgaggtaggggacgtcatcctgatacacttaaagaacttcgctacacggccctatacgatccacccacacggcgttttttacgagaaagattcagagggcagcctgtatcccgatggctcttcaggccccctcaaggctgatgatagtgtgccaccgggcgggtctcacatatacaactggacaattcctgagggtcacgccccaacagatgccgatcctgcttgtcttacctggatctatcattcccacgtggatgctccaagggacatcgctacgggcttgattggacctctgataacctgtaagcggtag

SEQ ID NO: 119774 - DNA, 3639 bp, synthetic construct
  misc_feature 1..3639: note = Description of Artificial Sequence: Synthetic coding sequence
  source 1..3639: mol_type = other DNA
atgacccagactctgccgtaccacctatcactactgaatgtgctgttcccagggccctgctcccggcattttaagtttaggcgcggcaagtgcgcccagcctgcttggcgcaaggtgtctgctccaagccaagacctgttgatcacaaaagtcatgtgggccatggaatccgggcacttactatgggccctgctttttatgcagagcctttggccccaactgaccgatggtgcaacgcgtgtgtattacctgggcatccgcgatgtccagtggaattatgccccgaaaggacgaaacgtcatcacgaaccagcccttagactctgacattgtggcaagctctttcttgaagtctgataaaaatagaatcggcggtacttataaaaagactatttacaaggagtataaagacgacagttacacagatgaagtggctcaacccgcatggctgggcttcctgggcccggttctgcaggccgaggttggtgatgtaattttgattcacctgaagaatttcgctacccgcccctacaccatccatccccacggggtgttttatgaaaaagattcagagggttctctctatccggacggaagcagtggacctttgaaggccgacgatagcgttccacctggtgggtcgcacatctacaactggaccattcctgaaggccacgcacccaccgacgctgaccctgcatgcctgacgtggatttatcactctcacgtagatgcccctagagatatagctacagggctgatcgggcctttaattacctgcaaacgcggtgccctggacgggaattcgccgccgcaacgccaggacgtggaccacgacttcttcctcctgttctccgttgttgatgagaatctgtcctggcatcttaatgagaatattgccacctattgttctgatcccgcctcggtggacaaggaagacgaaaccttccaggagagcaaccgaatgcatgctatcaacgggtttgtgtttggcaacttgcccgagcttaacatgtgtgcacagaaaagagtggcttggcatctgtttggtatgggaaatgaaattgatgtgcacacagctttttttcatggccaaatgctgactactcgtggacaccacacagacgtggccaacatttttcccgccacctttgtgacagctgaaatggtgccctgggagcctggaacctggctgatcagctgccaggtcaactcccatttccgggacggcatgcaggctctgtataaggtaaaaagttgcagtatggctcccccagtcgacctgctgacaggcaaagtgagacagtactttattgaggcacacgaaatacagtgggactatggacctatgggccacgatggcagtaccggcaagaatctgagggagcctgggagtattagcgacaagttctttcagaagtcctcttcacggatcggcggtacatactggaaagtgagatacgaggccttccaagacgagaccttccaggaaaagatgcatttggaggaggatcgccaccttgggatactgggccccgttatccgcgccgaggtcggagatactatccaggttgtattctacaacagagcaagtcagccttttagtatgcagccccacggggtcttctatgagaaggactacgagggaaccgtgtataacgacgggtccagttatcccggactggttgctaaaccattcgagaaagtgacttaccggtggaccgtaccgccccacgcgggacccacggcccaggatccagcttgtctcacatggatgtacttttcagccgcggaccccattcgcgacacaaattcaggcctggtggggcccctgttggtttgcagagccggcgccttgggggccgacggaaagcaaaagggtgtggataaggagttttttctgctttttaccgttttagacgaaaataagagttggtattctaacgccaaccaggcagcagctatgctggattttcggctgctttccgaggatatagaaggcttccaggattctaatcgcatgcacgctattaatggtttcttgttctccaacctgcctaggctcgatatgtgcaagggggacaccgtggcctggcacctgctcggcttgggaaccgaaaccgacgtccatggtgtaatgtttcaggggaatactgtgcagcttcagggcatgcggaagggggccgctatgttgtttcctcatacctttgtgatggcgattatgcagcctgacaatcttggtaccttcgagatctactgccaggccggttcacacagggaggctggaatgagggcaatctacaatgtttcccagtgcccaggtcaccaggctaccccacggcagcgttatcaagccgcgcgaatctactacattatggctgaggaggtggagtgggattactgccctgataggagctgggaacgggaatggcataatcaatccgagaaggactcatatgggtacatatttctatctaataaagacggcctcctgggttctaggtacaaaaaagcagtgtttagggaatacaccgacggcacattccggatcccacgtccccgtacaggccccgaggagcatcttgggattcttggccccctcattaagggagaggttggagacattctcaccgttgtgttcaagaacaatgccagccgcccttactccgtccacgctcatggcgtgctggaaagtacgacagtgtggcctctggccgccgaacccggcgaggtagtcacctaccagtggaacataccagaacgcagtggtccaggaccaaatgatagtgcctgcgtcagctggatttattacagtgcggtcgacccaatcaaggatatgtatagcggattagttgggccactagcaatttgccagaagggcatccttgaaccacatggcgggcgatccgacatggacagagagttcgcgctcttgttcctgattttcgatgagaataaaagctggtatcttgaggagaacgtggctactcacgggtcccaagatcccggatccattaatctccaggacgaaacgtttttagagtcgaataaaatgcacgctattaatgggaagctgtatgcaaacctgcgggggttgaccatgtaccaaggggagagggtggcatggtatatgctcgccatgggacaggacgttgaccttcataccatccattttcatgctgaaagctttctgtacagaaatggagaaaattatagagccgatgtagtggatctgtttccaggaacttttgaagtggtcgaaatggttgcgtctaaccctgggacatggctcatgcactgtcacgtgacagaccacgtccacgctggaatggagacactgtttacggtgttctcacgcaccgaacacttgtctccattgactgtgattacaaaggaaacagagaaggcagtcccacccagagatatagaggagggcaatgtcaagatgcttggaatgcagataccaatcaaaaacgtagagatgctggcctcagtattggtggcaatctctgtgactcttctccttgtagtgttagctctgggaggtgtggtgtggtatcagcaccggcagagaaaactcagacgaaatagaaggtcaatcctagatgattcctttaaattattatcctttaagcagtag

SEQ ID NO: 119775 - DNA, 1254 bp, synthetic construct
  misc_feature 1..1254: note = Description of Artificial Sequence: Synthetic coding sequence
  source 1..1254: mol_type = other DNA
atggctcagaaggaggggggaaggaccgtgccttgctgctccagaccaaaggtagcagctctcacagcggggaccctgctgcttctgactgctattggagccgcgtcgtgggcaatcgttgccgtcctcttaagaagtgatcaggaacccctatacccggtgcaagtgagttcagccgatgcaaggcttatggtctttgacaagacggagggtacttggcgcctcttatgctcaagcagatcgaacgcgcgtgtggccgggctgtcatgtgaggagatgggatttctccgagcactgactcatagcgagctcgatgttaggactgctggcgctaacggcacaagtggcttcttttgcgtcgacgagggaaggctgccacacacccagcggttgctcgaggtgatctccgtatgcgattgtccccgaggaagatttctggccgccatttgtcaagattgcgggcggagaaagctgcccgttgaccggattgtgggtgggcgcgatacctcgttagggagatggccctggcaggtaagtttgagatatgacggcgcccatctctgcggaggaagccttttgagcggagactgggtcctgaccgcagcgcactgttttccggagcgtaaccgggtgctgtccaggtggcgggtgttcgctggagccgtggcacaagctagcccacacggtctccagctcggcgtccaggctgtggtctatcacggcgggtacctcccctttagagatcctaattctgaagagaactctaatgacatcgctttagtgcacctctcaagtccattgccactcacagagtacatccagccagtgtgtctccccgctgctggtcaggccctggttgatggcaaaatctgcacagttactgggtggggcaacacacaatactacgggcaacaggccggggtgttacaggaggcgcgagtccccataatttccaacgacgtttgcaatggtgctgatttctacggaaatcaaataaagccaaaaatgttctgtgcgggctaccccgaaggtgggatagacgcttgccagggtgactcggggggtccctttgtatgcgaggacagcattagccgaacaccaaggtggagactgtgtggaatcgtttcctggggcaccggttgtgcattagcccagaagcctggtgtgtataccaaggtcagcgattttcgggaatggatcttccaagctatcaagacacactcggaggctagcggtatggtgacacagctttag

SEQ ID NO: 119776 - DNA, 1254 bp, synthetic construct
  misc_feature 1..1254: note = Description of Artificial Sequence: Synthetic coding sequence
  source 1..1254: mol_type = other DNA
atggcacagaaggaaggggggcgcacagtgccttgctgcagtaggccaaaagttgcggccctcaccgctggcacattattgttgctgacagcaatcggggcagcaagttgggccattgtcgctgttctgctgcgttcggaccaggagcctctctatcccgtccaggtgtcaagcgctgacgcaagacttatggtgttcgacaaaaccgagggaacgtggaggctcctgtgttcatcccgctcgaatgctcgcgtggccggactgtcctgtgaggaaatgggtttcttgagggctctgacccacagcgagctggacgttcggacagcaggagctaatggtacatcaggctttttttgcgtcgacgaggggcggcttccccacactcaaaggctcctagaagtgatctctgtatgcgattgcccccggggtagatttcttgctgctatatgtcaagattgcggtcggagaaaactgcccgtcgataggatcgtgggcgggcgggacaccagcctgggtcgctggccatggcaggtctccctgcggtacgatggggcccacctttgtggtgggtcactgctgtcaggagattgggttctgaccgccgcgcattgttttccagagcgcaaccgtgtcctctcccgctggcgggtcttcgctggggccgtggcacaggcttcgccacatggtttgcaactcggggtgcaggctgtggtgtatcacggaggctatctgcctttccgagacccgaactcagaagaaaactccaacgacatcgctctggtccacctttcttctccattgccactcaccgagtacattcagcccgtatgcctcccggctgcaggccaggctttggtggatgggaagatctgcaccgtaacaggctggggcaacacacaatactatggccaacaggccggcgtcctacaagaggccagagtacctattataagcaacgatgtgtgcaacggcgctgacttttatgggaaccagataaagccaaaaatgttctgcgcgggctaccccgagggcgggatcgatgcctgccagggtgacagcggcggcccattcgtgtgcgaagactctatctcccgaacaccacgatggcgactgtgcggcattgtctcatggggtaccggctgcgcactcgctcagaaacccggcgtctacacgaaagtctccgacttccgggagtggatcttccaggccattaagacgcactctgaagcatctggcatggtaacccagttatag

SEQ ID NO: 119777 - DNA, 1182 bp, synthetic construct
  misc_feature 1..1182: note = Description of Artificial Sequence: Synthetic coding sequence
  source 1..1182: mol_type = other DNA
atgtgtaaaatgaggacacgcgaggacatgcagctaggtaatgagggccccgggaccgctctaaggctaattcacctgcaggtgagcagcgctgacgcaagattaatggtattcgacaagactgaagggacctggcgcctactgtgctcatccagaagtaacgctagagtggcaggacttagctgcgaggaaatgggctttttgcgagctctaacccactcagagctagatgtgagaaccgccggcgcaaacggaaccagcggtttcttctgcgtagatgaaggcagactcccgcatacccagcgtctcctggaagtcatctccgtatgcgactgccctcgtggtcggttcctggctgcaatctgtcaggattgcggcagaaggaagctgcctgtagatcggattgtcggcggccgcgacacctcgctaggccgttggccctggcaagtctccttgcggtatgatggggctcacctatgtggtggcagcctcctcagtggcgactgggtgttaacggcagcccactgctttcctgaacggaacagagtcctgagtagatggcgtgttttcgctggtgcagtcgcccaggcgagtccccatgggctccagctcggggtccaggcagtggtctaccacggcggctacctcccgttccgtgacccaaattccgaggagaacagcaacgacatcgccttggtgcacctgtcgtctccactgcctctcaccgagtacattcagcccgtctgtttgccagccgcagggcaggccctggtggacgggaaaatatgcactgtgaccgggtgggggaatacacagtactacggccaacaggctggtgtgcttcaggaagctcgggtccccatcatctcaaatgacgtgtgcaatggggcagatttttatgggaaccaaatcaagccaaagatgttctgtgcaggctaccctgaaggcgggatcgacgcctgtcagggggactctggagggcctttcgtatgcgaggactcaattagtagaacaccccggtggcgtctgtgtggaatcgtctcctggggtaccggttgcgccctagcccagaagccaggggtctacactaaggtttccgattttagagagtggatcttccaggctatcaaagtgaaagtcggatccaggtgggaacctggttggggccggctcggggtgtag

SEQ ID NO: 119778 - DNA, 2103 bp, synthetic construct
  misc_feature 1..2103: note = Description of Artificial Sequence: Synthetic coding sequence
  source 1..2103: mol_type = other DNA
atgaaatgcgtcctggtcgcaaccgagggggctgaagtgctgttttactggaccgaccaggagttcgaggagtccttacggttgaagttcggtcagtctgaaaacgaagaggaggagctaccggcgctcgaggatcagctgtcaacactcctcgcgccagtgatcatcagcagtatgacaatgttagagaagctgagtgacacatacacttgttttagcaccgagaatggtaacttcctgtatgtgcttcatctgtttggggagtgtctgttcatcgccatcaacggcgatcacaccgagagcgagggcgacctgagaaggaagttgtatgtactaaaatatctctttgaggttcatttcggattagtgacagtggatggccacctgatccggaaggagttacgcccccccgatctggcccagagagtgcagctgtgggaacattttcagagcctgctatggacgtatagcagattgcgagaacaggaacaatgctttgcagtcgaggcactcgaacgattgatccatcctcagctctgcgagctctgtatcgaggccctggaacgccacgtgatccaagcggtgaacacaagtccggagcgggggggcgaggaagcgctacacgcgtttttactcgtgcactccaagcttctggctttttattcttctcatagtgcgtcctcgctgcgtccagcggacctcttagcgcttattcttctggttcaggatttgtaccccagcgagtctacagcagaagacgatatacagcctagcccccggcgggcccgctccagtcaaaatattcccgtacagcaggcctggtctccacacagcaccgggcctacgggtgggagtagcgccgaaaccgagaccgactcttttagtctgccagaggagtacttcaccccggctccatcgcccggagaccagagtagcggctccactatatggctcgagggaggaacccctccaatggacgcactgcaaattgcagaagatacgcttcagaccctggtccctcactgccccgtgcccagtgggcctaggagaatctttttagatgctaatgtcaaggagtcatactgccccctggtgcctcataccatgtattgtctgcctctctggcagggaataaatctggtgctcttaacacgcagcccttccgctcccttagctctcgtgttgtcccagttaatggacggtttcagcatgctggagaagaaactcaaggaggggccagagcccggagcgagtttgcgatcccagcctttagtaggcgatttgcgacagagaatggataagtttgtgaagaatcggggcgctcaggagatccagtctacctggctggagtttaaggcgaaagccttcagtaagtccgagccagggagtagctgggaactcctgcaggcatgcggaaagttgaagcgtcaattgtgtgccatctaccggctgaattttctcacgaccgccccttcccgcggagggcctcacctgccgcagcaccttcaggaccaagtgcagagactgatgcgcgaaaagctaactgattggaaggatttcctgcttgtcaagagccgacgcaatattacaatggtgagctatctcgaagactttccagggctggtgcattttatttacgtggacaggaccactggccaaatggtggcaccatcgttaaactgtagccagaagacatcgagcgagctgggcaaggggcctctcgccgcattcgtcaaaacaaaggtgtggagcctcatacagctggcacgccgctatttgcaaaaaggctatacaacgctcttatttcaggagggggacttctactgctcctattttctgtggtttgaaaacgacatgggatacaagctacagatgatcgaggtgccggtgctgtctgacgactcagtgcccatcggcatgctaggcggcgattactatagaaagctcctgcgctattattctaagaaccgacctaccgaagctgtgcgttgttatgaactgttggctctgcatcttagtgtgattccaactgatttattagttcagcaggcagggcagcttgccagacgcttgtgggaagcgtcccgaatccctctcttatag

SEQ ID NO: 119779 - DNA, 975 bp, synthetic construct
  misc_feature 1..975: note = Description of Artificial Sequence: Synthetic coding sequence
  source 1..975: mol_type = other DNA
atgaagtgcgtgcttgtggcaacagagggtgccgaggtactcttttactggactgatcaggaatttgaagagtctctgcgactgaagtttggacagtccgaaaacgaggaggaggaacttcccgccctggaggatcagctttcaaccttgctggcccctgtgatcatttcaagcatgacaatgctcgagaagctatcagacacttatacctgcttctccacggagaacgggaacttcttatacgtgcttcacctgtttggggagtgcctattcattgccatcaatggtgaccataccgagagtgagggcgatctgcggcgaaaattatacgtgctgaagtacctcttcgaggtccattttgggctggtgactgtggacggccacctgatcagaaaggaactgaggcccccagacctggcgcaacgggtgcagttgtgggaacactttcagtctttactatggacctatagccgcctgagggagcaggagcagtgttttgccgttgaggcactggaaaggctgatccacccacaactttgtgagctgtgtatagaggccctcgagagacacgtaatacaggccgtcaatacctccccagagaggggtggggaagaggctctgcacgcctttcttctggtccattcaaaactcttagccttctactcctctcatagcgcatcaagtctccggcccgccgaccttttagcactgatattgctggttcaggatttgtacccttctgagagcacagctgaagacgatatccagccatctccaagaagggccaggtcctcgcagaatatcccggtgcaacaggcatggtcacctcacagtaccggaccaaccggcggcagcagcgccgagaccgaaaccgacagcttcagtctgcctgaagagtattttaccccagctccttcacctggggatcagagctccggagaagatcgtagaaaggccggtgggaacaatagttag

SEQ ID NO: 119780 - DNA, 981 bp, synthetic construct
  misc_feature 1..981: note = Description of Artificial Sequence: Synthetic coding sequence
  source 1..981: mol_type = other DNA
cggctcatccatcctcagctgtgtgagctttgcatcgaagcattagagcgccatgtgattcaggctgtgaacacctctccagagagaggcggggaggaagccctccatgccttcctgctcgtccactccaagcttctggctttttactcctcgcattcggcctcttctctgagaccagcagatctcctggcccttatactcctagtgcaagatttgtatccatcggaatctacggcggaagacgatattcaagagactgactctttcagcctccctgaagagtactttactcccgctccttcacccggggaccaaagctccggctccaccatttggttagaaggcgggactcccccaatggatgccctccagattgccgaagatactctccagacattggtgcctcattgtccggtgccatcaggaccgcgaagaattttcttagatgccaatgtgaaagaatcatactgccctctggtgccacacaccatgtattgtctgcctctgtggcagggcattaatctcgtgctgttgaccaggtctccatctgcccctttggctttggtgttaagtcagttgatggacggttttagcatgctcgaaaaaaagctcaaagagggacctgagcctggagcctccttgaggagtcagccacttgtgggagacctccgtcagcgaatggataagttcgtcaaaaatagaggcgcacaagagatacagtccacctggctggagttcaaggctaaggccttttctaaatcagaacccgggtcatcatgggaacttttacaggcctgcgggaagctcaagagacaattgtgcgcaatataccgattgaacttcctgactacggccccatctcgtggaggaccccaccttccccagcatctgcaagatcaagttcagagactgatgcgcgaaaaactaactgattggaaggatttcctcttggtgaagtctcggagaaatatcaccatgtag

SEQ ID NO: 119781 - DNA, 2103 bp, synthetic construct
  misc_feature 1..2103: note = Description of Artificial Sequence: Synthetic coding sequence
  source 1..2103: mol_type = other DNA
atgaaatgcgtgttggtggcaactgagggcgccgaagtgctcttctactggacagatcaggagtttgaggagagtctgcgattgaaatttggccagagcgaaaacgaggaagaggaattgcccgctctcgaagaccagctaagcactctcctcgctcccgtgataatctcatccatgacaatgcttgagaagctatctgacacttacacttgtttttctaccgaaaatggaaatttcctgtacgttcttcacctgttcggagaatgcctctttattgccatcaacggcgaccacacggaaagcgagggcgacctccgccgcaagctttatgtcctgaaatatctgttcgaggtgcattttggactggtcaccgtcgacggtcatttgattcggaaggagctgcgccctcccgaccttgcccagagggtccagctgtgggaacacttccagtcactcctgtggacttacagccgcttacgagagcaggaacagtgcttcgccgtagaggccttggaaagattgatccatcctcagctctgtgaactctgcatcgaagcgctcgaaagacacgtaatccaggccgtgaacacctcccccgagagaggaggagaggaggcgttgcacgccttcttgctggtgcactcaaaactacttgcattttacagcagccattctgcaagttcgctccggcccgctgacctcctagccctgatcctcctcgttcaggatttatacccaagtgagtccaccgcagaggatgatatccaaccctctcctcgaagagcaaggtcatctcagaatattccagtccaacaggcttggtcacctcatagcacaggccctacgggcggtagctccgcagaaaccgaaacggatagcttttctctacccgaggaatatttcacccctgcccccagcccaggcgatcagtccagcggcagcactatctggctggagggagggaccccacccatggatgcactacagatcgccgaagacaccctccagactcttgtcccacactgccccgttcccagtgggccaagacgtatattcctggacgccaatgtgaaggaatcttattgtccccttgtgccccataccatgtactgcctgcccctctggcaggggataaacctggtgctgctgacacgctctccaagcgctcctctcgctctggtcctttcccagcttatggatgggttctcaatgctggaaaaaaagcttaaggagggccccgagcctggcgcctctctgcgctcccagcccttggtcggggacctccggcagcggatggataagtttgtgaagaatcgaggtgcccaagagatccagagcacatggctcgagtttaaagccaaagccttctcaaagtcagagccaggtagcagctgggagctcttgcaggcttgcggtaagctgaagcggcagctctgcgcaatttataggctgaacttcttgaccaccgctccaagcaggggcggtccccatctgccgcagcatttgcaggatcaggtgcagcgtctcatgagagagaagctcaccgattggaaagactttctgctcgtgaagtccagacgtaatattacaatggtgtcatacttagaggacttccctgggctagtccacttcatctatgtagatcgaacaaccggtcaaatggttgccccatcactgaactgttcccaaaaaacctcctcagagctcgggaagggcccccttgccgccttcgtgaagacaaaagtgtggtccctgatccaactggcacgcaggtatctacaaaaaggatataccacactgcttttccaggaaggagatttctattgtagctattttctttggtttgagaacgacatgggctataagctgcaaatgattgaagtacccgtgctgagtgacgacagtgtacctatcggcatgctgggaggagattactacagaaagctgctgaggtattactccaagaacagacccaccgaagctgtccgctgctacgagctcctggctctgcacttatccgtgattcccaccgaccttttagtgcagcaggccgggcagctcgctcgccggctctgggaagctagccgaatccctctgctatag

SEQ ID NO: 119782 - DNA, 2004 bp, synthetic construct
  misc_feature 1..2004: note = Description of Artificial Sequence: Synthetic coding sequence
  source 1..2004: mol_type = other DNA
atgaagtgtgtattggtcgctacggaaggggcagaggtactcttttactggactgaccaggaattcgaagagtccttgcggctcaaattcggtcagagcgagaatgaagaagaagaactccctgccctcgaggatcaactgagcactctgctggcccccgtgattatctcctctatgacaatgctggagaaactcagcgatacctacacttgcttttccactgagaacggcaatttcctgtacgtgctgcatctgttcggggagtgccttttcattgcaatcaacggagatcacacagagtcagagggggacctgcgacggaaactctatgtgctaaaatatttgttcgaagtccactttggcttggttactgtggatggccaccttatccggaaggagttgagacctccggacctcgcacaacgcgtacagctatgggaacattttcagtctctgctctggacgtactcccgtctacgggagcaagaacagtgtttcgcagtcgaggccctggaacgactcatacacccacagttgtgtgaactctgtattgaagcattggaaagacatgtcatacaggcagtcaacaccagtcctgagagaggcggagaggaggctctgcacgcatttctgttggtccactcaaaactgctcgcgttttactcctcccactcagcctcgagccttcggccagcggatctactagccctgatccttctggtccaggacctgtacccatccgagtccaccgctgaagacgatatccaagaaactgattccttttcactaccagaggagtacttcacccctgcaccaagtccaggtgaccagagtagcggatccacgatctggctagagggcgggacgccacccatggacgccctgcagattgccgaggacaccctgcagacattagtgcctcactgtccggttccctctggcccacgtcggatctttctggatgctaatgtgaaggaatcctactgtcctctggttcctcacacgatgtactgcctacccctctggcagggcatcaacttggtccttcttactcggtcccccagtgcccccttagcgctcgtcctgtctcagctcatggacggtttcagtatgctggagaagaagctcaaggaagggcctgagccgggtgccagcctgcgaagtcaacctttagtgggcgacctcaggcagcgcatggataaattcgtgaaaaaccgcggcgcccaggaaattcagtccacatggttggagttcaaggctaaggccttttcgaagtctgagcctgggagtagttgggaactcctccaagcctgtggaaaattgaagagacagctgtgcgcaatctaccggctgaatttcctcaccactgcacccagtcgaggtggtccccatctgcctcagcacctccaagatcaggtgcagagattgatgcgagagaagctgacagactggaaagatttccttttggtcaagagcaggcgcaatatcacgatggtatcttatttagaggacttccctggccttgtacacttcatatacgtcgatcgaaccaccggtcagatggtcgctccttcactgaactgcagccaaaaaacttcttcggagctgggcaagggcccactggcagcatttgtgaagaccaaggtgtggtcactgattcagctagccagaaggtatctccagaaagggtacacaacactgctatttcaggagggggacttctactgttcatactttctctggtttgaaaatgacatgggctacaaactgcagatgatcgaggtacctgtgctttccgatgacagcgtgcctattggaatgctcggaggcgactactacagaaaactcttgcgctactacagcaaaaaccgaccaacggaggccgtcaggtgctacgaattgctcgctctgcacctgagtgtcattcccactgatctgttagtgcagcaagctgggcaattagcccggcgtctctgggaggcttcaagaatccccctcctgtag

SEQ ID NO: 119783 - DNA, 480 bp, synthetic construct
  misc_feature 1..480: note = Description of Artificial Sequence: Synthetic coding sequence
  source 1..480: mol_type = other DNA
tgactgaggccgcccgatttagctcagagggtccagctgtgggagcactttcaatcgctgttgtggacctatagtagactccgtgagcaggagcagtgttttgccgtcgaggctctggagaggcttatacatccgcagctgtgcgaactgtgtatcgaggccctggagcgtcacgtgatccaggcagttaacaccagtcctgagcgtgggggggaagaggcgctgcatgcttttctactggtgcattcaaaactcttggctttctacagctcgcactctgcctcgtcactgcgacccgcagaccttttggccctcatactcctggtccaagacctgtatcccagcgaatcaacagctgaggatgatatccaggaaaccgacagttttagtctccccgaggaatatttcacaccagccccaagccctggggatcagtctagcggtgaggatcggcgtaaggctgggggaaacaattcatag

SEQ ID NO: 119784 - DNA, 3015 bp, synthetic construct
  misc_feature 1..3015: note = Description of Artificial Sequence: Synthetic coding sequence
  source 1..3015: mol_type = other DNA
atggtgcaactgtataacctgcatcccttcggtagtcaacaggttgttccgtgcaaactggagccggacaggttctgcggcggaggcagagatgctctgtttgtcgctgccggttgcaaggtagaggcgttcgccgtggccggccaggagttgtgccagcccaggtgtgcgtttagcactttggggagagtgctccggttggcatactctgaagccggcgattatctggtagcgattgaggagaagaacaaggctaccttcctgcgggcttatgtcaattggagaaataaaagaaccgagaactccagagtatgtattcgaatgattggccataatgtggagggccccttttccaaagcgttccgggaccagatgtacatcattgagatgcctttgtccgaggcgcccctttgcattagttgttgtcctgtgaaaggcgacctgttggttggctgcacaaacaaactggtgctgttctccctgaagtatcagatcatcaacgaggagttttcactcctggacttcgagcgttcactcatcatacatatcgataacataaccccagtcgaggtttccttttgcgtggggtacgtggcagttatgtccgatctcgaggtgctcatagttaagttggagtcaggaccaaaaaatggcgagagagttcaccaccatccccacaagaccaacaatcgtattcgaaggacagaggaaggcatctccaatgagattagccagctcgagtccgacgatttcgtgatttgccagaaaccgttggagttactgggcgagaaatctgaacagtccggactgtcagtcactcttgagtctaccggactcgctgacgagaagaggaaatattctcacttccaacaccttctctatagaaggttcgccccagacatctccagctacgtactttcagacgacattaagttgcattccctgcaacttctaccaatttaccagacaggcagcctgacgagtgacggtaagaacttaagtcaagaaaaagagctcttgagcctgttctgctttttctccctgccccatgtcggttacctgtatatggttgtcaagtccgttgagttaatgtctgtgtatcagtacccggagaagtcgcaacaggccgtcctgacaccccaattccttcatgttattacttccaacaatctccaatgctttacagtgcggtgcagcgcggctgcagccagagaagaggacccatatatggacacaacgctaaaagcttgtcctcctgtctccatggatgtgtgtgcattgcggatccagctattcatagggctgaaagccatttgccattttaagaatcacattatccttcttactaaggccgaacctgaggctattccagagcggaggcagtctcccaagcgcctgctgagcagaaaggacacttcggttaagattaaaatcccacctgtcgcagaggctggctggaatctgtatatagtgaataccatttcacccgtgcagctctacaaggaaatggtagactactcaaatacgtacaagaccgttaagacccagtcttgtattcaccttctgagtgaggcccatctactcgttagagctgctctgatggacgccagtcaactcgagcccggagagaaagctgaactactagaagcttttaaggagtcctgtgggcacttgggcgactgctactctagactggacagccagcacagccatttaacattgccctattataaaatgagcggtctctctatggcagaggtccttgcccgcaccgactggaccgtggaggacgggctgcagaaatatgaaaggggactaattttttatatcaatcattccttgtatgaaaacttggatgaagagctgaacgaggaactcgccgccaaggtcgtacagatgttctatgtagccgagccgaagcaagtgccacacatactgtgcagtccttccatgaagaacataaaccctctcacagctatgtcgtacctccggaagttggataccagtggttttagcagtatccttgtgaccctcactaaagctgccgtggcccttaagatgggtgacctggatatgcacagaaatgaaatgaagtcccattccgagatgaaactggtgtgtgggttcatccttgaaccccgcttactgatccagcagaggaagggccaaatcgtgcccaccgagctcgcactgcacctgaaggaaacacagcccgggctcttagtggcgtcagtcctaggcttgcaaaagaataacaagatcggtattgaggaggccgacagcttttttaaagtactgtgtgcaaaggacgaggataccatccctcagcttctagtggatttctgggaggcacaactggttgcctgtctacccgatgttgtcctccaagagctattcttcaagttaacatctcaatatatatggagactaagtaaacggcagccgccggatactactcctctcaggaccagcgaggacttgatcaacgcttgttctcactacggcctcatctatccatgggttcatgtagtgatcagcagtgatagtctcgccgataagaattacaccgaagatctctcaaaacttcagagcctaatatgtggacctagcttcgatatcgcatcgattataccttttttggaaccgcttagtgaagatacaatagctggattatctgtgcatgtcctgtgccgcacccgcctgaaggagtacgaacaatgtattgatatcctgcttgagaggtgtcccgaggccgtaatcccttacgccaaccatgagctgaaagaggaaaataggaccttatggtggaaaaagctgttgccggaattgtgtcagcgaatcaagtgtggcggcgaaaaatatcagctttacctaagctcacttaaagaaacgctcagcattgtcgccgtggaactcgaactgaaggactttatgaatgtgctgcccgaggacggtaccgctacattcttcctcccatatctgctctattgtagccgcaaaaagccactgacctag

SEQ ID NO: 119785 - DNA, 1587 bp, synthetic construct
  misc_feature 1..1587: note = Description of Artificial Sequence: Synthetic coding sequence
  source 1..1587: mol_type = other DNA
atggctacttccacatcaacggaagccaaaagtgcttcatggtggaactatttttttctctatgatgggtctaaggttaaagaagagggtgatcccacacgggcagggatctgctatttttatccgagccagacattgctcgaccagcaggagctcctttgtgggcagattgcgggtgtggtgcgatgtgtctccgatataagtgacagcccaccgacgcttgtaagattgaggaagctcaaattcgcaatcaaagtggatggggattacctgtgggtcttaggctgcgccgtggaacttccagacgtatcatgtaagcgctttctcgatcaactcgtgggcttttttaatttctacaacggacccgtgtcattagcttacgagaactgttcccaggaggaactcagtacagaatgggacacgtttattgagcaaatacttaagaataccagcgacctgcacaagatcttcaactctctgtggaacctggaccagactaaggtggagcctctgctgttgttgaaagcagctagaatactccaaacttgccagcggagcccacatatcttggctgggtgcatcctctataagggactcattgtatctacccaactacccccttcactaacagcaaaagtgctgctacatcgaaccgcaccacaggaacagagactcccgacaggtgaggacgctcctcaggaacatggaaaatggatgctgtggtcttttaaaaaccgtgtgacccatcagaacccaaacggcgccgccttgccccccaatgtgcaaatcattccggtgttcgtcacgaaagaggaggcgatcagcctgcacgaattccctgtggaacaaatgactaggagcctagcttctccggccggactccaggacggatctgcccagcaccaccccaaggggggaagtacctcagccctgaaggaaaacgcaacggggcacgtggaatcaatggcttggacaacccctgatccaactagtcctgatgaagcatgccctgacggacggaaggagaatggatgcctcagcggacacgatttggagagtatccggccggccggtctgcacaacagtgccagaggggaggtcctggggctgagttcatcgctcgggaaagagctcgtcttcctgcaagaagaattagacttgtccgagatacatatacccgaagctcaggaagttgagatggcttctggtcattttgcatttctacacgtccctgtgcccgacggacgcgccccatactgcaaggcctccttaagcgccagcagctccctggaacccactcctcctgaggatacagctattagcagccttagacccccttccgccccggaaatgcttacccaacacggagcccaagaacagctggaagaccatcccggccactcatcccaggcccctatcccccgggccgatcctctgcctaagagcactgtgttatttagcggcggatgcgtcaaaggatccgatacacaactgtgcgttcccggactagtgtggtacctggagccgcagttttactacgttatcgtccggcacttcttcgatagcatgagacagaccgccgggtag

SEQ ID NO: 119786 - DNA, 2127 bp, synthetic construct
  misc_feature 1..2127: note = Description of Artificial Sequence: Synthetic coding sequence
  source 1..2127: mol_type = other DNA
atggccaccagtacctccacagaggccaagtcggctagttggtggaactatttttttctttacgacggatccaaggtcaaagaggagggcgacccaacgcgagcaggaatttgttatttctatcctagccaaacactgctcgatcagcaagaactgctgtgcggtcagatcgcgggcgtggtgcgttgcgtgtccgatatctccgactcacccccaaccctggtgcgcctacgtaaattgaaattcgccataaaggtggacggagactatctgtgggtgctgggatgcgcggtcgagctcccagatgtctcgtgcaaacgttttctggatcagttggtgggcttcttcaatttctacaacggaccagtctcactcgcttacgagaattgttcacaggaggagctgtctacggaatgggacacatttatcgagcagatcctgaagaacacctccgacctgcacaaaattttcaactccctatggaacctcgatcagactaaggtcgaaccccttttactgcttaaggcggcgaggatcctgcaaacttgccagaggtcaccccacatcctggcaggctgtatactttacaagggtttgattgtatccacccagctgccacctagtctgactgccaaggtccttctgcaccgcacggctccacaggagcagcgactcccaaccggagaagacgccccccaagagcatggcgccgcactgccacctaatgttcagattattcccgtttttgtgactaaggaggaagccatcagcttacatgagttccctgtcgagcagatgaccaggagcctggcatcaccagccgggctccaggatggatccgcccagcaccacccaaaaggaggctctacctcagcacttaaggaaaatgccacaggccatgttgaatctatggcatggaccacccccgacccgacctctccagatgaagcttgccctgacggccggaaggagaacggatgtttgtctggccacgacctggagtctatccgaccagcaggcctgcacaacagtgcacgaggagaggtactggggctctcctctagcctcggcaaagagttggtcttcctgcaggaggagttggacctgtcagaaatacacatacccgaggcacaggaggtcgaaatggcctccggccatttcgctttcctgcacgtccccgttcctgatggaagggccccttattgcaaggcatctctgagcgcttcatcttcccttgagcctaccccgcctgaggacactgcgatatctagccttcgaccgccctcggcacctgaaatgctgactcagcacggtgcccaggaacagttagaagatcatccaggtcactccagccaggccccaatcccccgggctgaccctctgcctagacggacgcggcggccattgctgttacccaggctcgacccggggcaacgaggaaataaattgcccacaggtgaacaggggctggatgaagacgtggacggagtttgtgaaagccatgcagccccagggttggaatgttccagtggctcagccaattgtcagggcgctggtccctctgctgatgggatcagttctaggctcacgcccgccgagagctgcatgggtctggtgagaatgaacctgtacacgcactgtgtgaagggcttggttctcagcctgctagccgaggagccgctgctcggcgattcggcagcgatcgaagaagtatatcatagctctcttgcgagtctcaacggactcgaggtgcacctcaaggagacactcccacgagacgaggccgcctccacttcttctacctataattttacacactatgatcggatccaatctctgcttatggcaaacctgcctcaggtggcgactcctcaagaccgacgcttcttacaggctgtgagccttatgcactcagagttcgcacaactgcctgccctttatgagatgactgttcggaatgcaagcacagcagtgtatgcctgttgcaaccccatccaagaaacttattttcagcagctggcccccgcagcccgttcgtccggtttccccaacccacaggatggcgcctttagcctttctggcaaagcaaagcagaaacttctgaaacacggagttaacttactctag

SEQ ID NO: 119787 - DNA, 2166 bp, synthetic construct
  misc_feature 1..2166: note = Description of Artificial Sequence: Synthetic coding sequence
  source 1..2166: mol_type = other DNA
atggcacctttgtgttcgctagcccgctggaattacttttttttatatgacggtagtaaggtgaaggaggagggcgaccccacccgggctggcatctgctatttttacccgagccaaacacttctggaccaacaagagttgctttgcggtcagatcgctggcgtggtgcgctgcgttagtgatatctccgactcccctcctacactagtacgtctcaggaaactgaaattcgccattaaggtggacggcgattatctgtgggtgctggggtgcgctgttgagctgcccgacgttagctgtaagagattcctcgaccagctggtgggattctttaacttttacaacggcccagtgagccttgcatatgagaactgctctcaggaggagctttcgacagagtgggacaccttcattgagcagattctgaaaaacacaagtgacttgcacaaaatcttcaactctctatggaatttagatcagactaaagtagagcctcttctgctcctgaaggcagctcgtatcctgcagacgtgtcagagatctccgcacattttggcaggctgcattctgtataaaggactcatagtttccacacaacttcctccatcgctgactgcaaaggtcttgcttcacagaaccgctccccaggaacagcggttaccaaccggtgaggacgcgcctcaagaacatggcaaatggatgttgtggtcttttaagaatcgcgtgacccaccagaatccaaatggtgctgccttgcctccgaatgtgcagattataccagtgtttgttaccaaagaggaggctatctcgctacacgagtttcccgtggagcagatgacgaggagtcttgcaagtcccgctgggctgcaggatgggtcggcccagcaccaccccaagggcggatccactagtgctctgaaggagaatgccactggccacgtggagagcatggcttggaccacccctgatcccacaagcccagatgaggcttgtcccgatgggcggaaagaaaacgggtgtctctcggggcacgacctggaatcgattagaccggctggcctacacaacagcgcccgaggggaggttctgggactgtcctctagcttgggaaaagaactggtctttttgcaagaagagctggatctgtcagaaatccatatcccggaggcccaagaagtagagatggctagcggacatttcgccttcctgcatgtgccagttcctgatgggagagctccatactgtaaggcatccctgagtgcctcatctagccttgagcccaccccccctgaggacactgctatcagtagcctgcggccacctagtgctcctgaaatgctgacacagcacggcgcacaggagcaactcgaagatcaccccggccattcatcccaggctccaatcccaagagcagacccgttgccccgaagaacccgacgcccccttttactgccccgcctcgatcccggacagcgaggaaataaactcccaactggtgagcagggtctggatgaagatgtcgacggtgtttgcgagagccacgccgcccccggcctcgagtgcagctcggggtccgctaactgccaaggagccggccccagcgctgatggcatttcatccaggttgacacccgccgagtcttgcatgggcctggttcgaatgaacttgtacacgcactgtgtaaagggtcttgttctcagcttgctggccgaagaaccgttgctcggtgacagcgctgcaatcgaggaagtgtaccattcttcattagcaagtctgaatggtctggaggtccacctcaaggagactcttccaagagatgaggctgcctctactagttctacctacaattttacccattatgaccgcattcagagcttattaatggctaacctgccgcaggttgctacaccgcaggacagacgattcctacaggcagtttcattgatgcacagtgagtttgcgcagctccctgccctgtacgagatgaccgtcagaaatgccagcactgctgtatacgcatgttgcaaccccattcaggagacttactttcagcagctcgctcccgccgcacgctcctccgggtttcccaatcctcaagatggcgccttttcactgtccggaaaagcgaagcagaagctgctgaaacacggcgtcaatctactatag

SEQ ID NO: 119788 - DNA, 2127 bp, synthetic construct
  misc_feature 1..2127: note = Description of Artificial Sequence: Synthetic coding sequence
  source 1..2127: mol_type = other DNA
atggcaacaagtacttctaccgaggccaaaagtgcctcttggtggaactatttcttcctttacgatggtagcaaagtgaaggaggaaggagaccccaccagggcgggcatatgttacttttatccatctcagactctgctagaccaacaggaactgctgtgtggccaaatagccggcgtagtgcgatgcgtaagtgacattagtgattctcccccgactttggtgagactgaggaagctgaagttcgcaatcaaggtcgacggtgattacctttgggtcctcggctgtgctgtcgaactgcctgacgtttcctgtaaaaggtttttagaccagcttgtaggcttcttcaacttttataacgggccagttagcctcgcctacgaaaactgctcccaagaggagctatccacagaatgggacacttttattgaacaaattttaaagaacactagtgatctccacaaaattttcaactcgctatggaacctggatcagacgaaagtggaacctttactgctgctgaaggcagctcgcatccttcagacgtgccaacgctcgccgcacatcctggctgggtgtatcttgtataaggggcttatcgtgagcacacagcttccaccatccctgaccgccaaagtgctgctgcacaggaccgctcctcaggaacaacgccttcccaccggcgaagatgctccacaagagcacggcgctgcactgccgcctaatgtacagattattccagtcttcgttacaaaggaggaggccatttctctacatgagtttccggtggagcagatgactcggtcactggcgtccccagccggcctccaagatggcagcgcacagcatcatcccaagggcgggtccacttcagcccttaaggagaacgccacaggccatgtcgagtccatggcatggactaccccggatccgacaagtcccgacgaagcttgtccagacggccgcaaggaaaacggatgccttagtggccacgacctggaaagtatccgtcccgcgggactgcacaactccgccagaggagaggttttgggcctgagttcctctctgggcaaagagctggtgtttctgcaggaagaactggatctcagcgagatacacatcccggaggcacaggaagttgaaatggcttctggacatttcgcgttcctccatgtacctgtaccggacgggcgcgctccctattgcaaggcgtccctcagcgcctctagtagtctggaacccacacctcccgaggatacagccatctcaagtttgaggccaccctccgcacccgaaatgctgacccaacacggcgcccaagaacagctcgaggaccatccagggcatagctcacaggcaccaattccccgagccgacccactgccccgacgaaccaggaggccgctcctgctgcctaggctggacccaggccagcgcgggaataagttgcctactggagaacaagggcttgacgaagacgtagatggggtgtgcgaaagtcacgccgcccccggattagaatgtagctccggatcagccaattgtcagggagcaggaccttccgccgacggtatctcctctagactcacacccgctgagtcatgtatgggcctggttcggatgaacctgtacacccactgcgtgaaggggctcgttctgagcctcttagctgaggagcccttgttaggggattcggcagccatcgaggaggtgtaccatagctcattagcttccctgaatggcctagaggttcatctgaaagagaccctgcctagagatgaggccgcctctacatccagcacttataacttcactcattacgatcggattcagagcctgttgatggcaaacttgccccaagtcgcaaccccccaggatcgcagatttctccaggctgtgagtctgatgcactcagaattcgctcaactgcctgccctgtacgagatgacggttaggaatgcctctaccgccgtctacgcctgttgtaatcccattcaagagacctattttcagcagcttgcccctgcggcacggtcctctggttttccgaacccacaagatggcgccttttccctctccggtaaggctaaacaaaaactccttaagcatggggtcaacttgctttag

SEQ ID NO: 119789 - DNA, 2112 bp, synthetic construct
  misc_feature 1..2112: note = Description of Artificial Sequence: Synthetic coding sequence
  source 1..2112: mol_type = other DNA
atggccccactatgttcactcgcgaggtggaactatttttttctttatgacggctcaaaagtcaaagaggagggcgacccaactcgagccgggatctgctatttctatcctagccagaccctgttagatcagcaagagctgctgtgtgggcaaatcgctggcgtagtccggtgcgtgagcgacattagtgattccccccccaccctcgttaggctgaggaagctgaaattcgccattaaagtggatggtgattatctgtgggtgttaggctgcgcggtggagctgcccgacgtcagctgcaagcgcttccttgaccagttggtgggcttttttaacttctataacggtccagtgtcattggcctatgaaaactgctctcaggaggaactgtcaacagaatgggacacgttcattgaacagatcctcaaaaacacaagtgacctgcataaaatatttaactccctgtggaacctcgaccaaaccaaggtggaaccccttctgctcctgaaggctgctaggattctgcagacctgccaacggtcaccccacatcctcgccgggtgcatactgtacaaaggcttgatcgtgagcacccagctgcctccttccctcaccgctaaggtgctcttacacagaacagctccacaggagcagcgcctgcccaccggcgaagacgccccacaggaacatggcgcagcactcccaccaaatgtgcagattatccccgtgttcgtgacaaaggaggaagcgatatctcttcacgagtttcctgtcgaacaaatgactagatccttggcgtctcctgctggtcttcaagacggttccgcccaacatcatccaaaaggaggatcaacctcggctctgaaagagaatgccacaggccacgttgaatccatggcttggaccacccctgatccaaccagtcccgacgaggcctgtccagacgggagaaaagaaaatggctgcctaagcggccacgacttagaaagtattcgccctgccggcttgcacaacagtgctagaggggaagtactcgggctaagttcctctcttggtaaggagttggtgttcctgcaggaagagttggacctgtcagagatccatatacccgaagctcaagaagtggagatggcctccgggcactttgcctttctgcatgttccggtgccggatggccgcgctccctactgcaaagcctcactgtctgcctcttcttcgctggaaccgacgcccccagaggacaccgctatttcatcactgcgacccccaagtgctcccgaaatgctgacccaacatggtgcacaagagcaactggaagaccatcctggtcatagtagccaggcgcctatcccccgagcagatccccttccaaggcggacacgtcggccactcctgctgcctagacttgatcccgggcagcgtggtaacaagctgcctactggcgaacaaggacttgatgaagatgtagacggagtgtgtgagagccacgccgcccctggtcttgaatgtagctcagggagtgcaaattgtcagggcgctggaccaagcgctgacggcatttctagccgacttaccccagccgaatcatgtatgggtttagtgcggatgaacctatatacacattgcgtcaaggggttagtgctgagcctgttggctgaagagcctcttctgggagacagcgcagcgatcgaagaggtctaccacagttcacttgcttcactgaacggccttgaggtgcacctgaaggagacccttccccgagacgaagccgccagtacgtcaagtacttacaatttcacacattacgacaggattcagagccttctgatggccaacctcccgcaggtcgcaactccgcaggaccgcagattcctgcaagccgtgagccttatgcactcagagtttgcgcaactgcctgccttatacgagatgaccgttagaaatgcctcaacggccgtctatgcctgctgtaatccaatccaggagacatactttcagcagctggccccagctgctcgcagcagcggcttccccaatcctcaggacggggccttctcgctctccgggaaggcaaagcagaagctgctcaaacatggcgtaaatcttctgtag

SEQ ID NO: 119790 - DNA, 3390 bp, synthetic construct
  misc_feature 1..3390: note = Description of Artificial Sequence: Synthetic coding sequence
  source 1..3390: mol_type = other DNA
atggcttttgtcccagttatcccagaatcttattcccacgtcctggcagaattcgagagccttgaccccctgctcagcgccctccggttagattctagcaggctgaagtgcaccagcatcgccgtcagccggaagtggcttgctcttggcagtagtggtggtggcctgcacctgattcagaaggagggttggaagcaccgattgttcctatctcaccgtgaaggagctatctcccaggtggcatgttgcctgcacgacgatgattacgttgctgtggctactagtcaggggctggtggtagtctgggagctgaaccaggaaaggaggggcaagcctgaacaaatgtacgtgagctctgagcacaagggacgtagagtgacggccctgtgctgggataccgcaatcctgcgggtcttcgtgggggatcacgctgggaaggtgagcgctatcaaactgaatacctcaaagcaggcaaaagcggccgctgccttcgtaatgttccccgtacagactataactacggttgactcctgtgtggttcagcttgattacctggatgggcggctgttgataagttctcttacacggtcttttctgtgtgacaccgaacgggaaaaattttggaaaattggcaataaagagcgggatggggagtatggggcatgctttttccctggaagatgctctggaggccaacagccactgatatattgcgcccgtcctggaagccgcatgtgggaagtaaatttcgacggcgaggtgatttccacccaccagttcaagaagctcctgtcactacctccgctcccggtgataaccctgaggtctgaaccacagtatgatcataccgcaggctcctcccagtcactgtcattcccaaaactattacatctctccgaacactgcgtgctcacctggaccgaacggggtatctatatctttattccacagaacgtgcaggtgttgctttggagcgaagtcaaggacatccaggacgtcgccgtctgccgtaatgagctgttctgcctgcacctgaacggtaaggtttcgcatctgtctcttatctccgttgaacggtgcgtcgaacgcctcctcaggaggggcctgtggaacttggccgcacgtacatgctgcctctttcagaacagtgttattgcatctagggcccgtaagaccctcacggccgataaacttgagcaccttaaatcgcagcttgatcatggcacttataacgacctgatctcacagctggaggagctgatattgaaattcgagcccctcgacagcgcttgttcctcgcgacgatcaagcatctcttcacacgagtcttttagtatcttagatagcggcatctatagaattatttcatcacgcagagggtctcagagcgacgaagactcttgctctctacactcccagaccttgtcagaggacgagaggttcaaggagttcacgtcccaacaggaggaggacctgcccgatcagtgttgcggaagccacggaaacgaagataacgtgtctcacgcaccagtcatgttcgaaaccgacaaaaatgaaacctttttgccttttggaatacccctgcccttcaggtccccaagcccactagtgagcctgcaggccgtgaaggagagtgtttcctcatttgtccggaaaactactgagaagatcggtaccttacataccagcccagacctgaaagtcagacctgaattgcggggcgatgaacagagctgcgaggaagatgtttcatcggacacttgccctaaagaggaagatactgaagaagaaaaggaagtgacctcccctccaccggaggaggaccggtttcaggaattgaaggtcgccactgctgaggcaatgaccaaactgcaggacccactagtgctgtttgagagtgaatctttgcggatggtgctgcaagagtggcttagccatctggagaaaaccttcgccatgaaagactttagtggggtgagcgacacagacaactctagcatgaagctgaatcaagatgtgctgctggtgaacgaatccaaaaagggaattctcgatgaagacaatgagaaagagaagagagattctttgggcaatgaagagagcgttgataagaccgcttgtgaatgtgtgaggtcaccacgcgagagtctggatgacttatttcagatatgcagcccatgcgccattgcttcaggactgcggaacgacttggccgagttgactactttgtgtctagagctaaatgtgctaaattcaaaaataaagtcgacaagcggacatgttgatcacactcttcagcaatacagccctgagattttggcctgccagtttcttaaaaagtacttcttcctgctgaacctaaagcgtgccaaggaatccattaagctatcttattctaattccccatctgtgtgggatacattcatcgaaggtcttaaggagatggccagttctaatcccgtatacatggaaatggagaaaggggacttacccactcgacttaaactcctagacgatgaggtcccctttgattcacctctgctcgtggtgtacgcaactcgcctgtacgaaaagtttggagagtctgccctccgatcactgattaagttctttcccagtatacttccgagcgatattatccagctctgtcatcaccacccagcggaattcctcgcatacttagatagtttggtgaagtccagaccagaggaccagaggtctagctttctggagagtctccttcaacccgagagtctgcggctcgattggctccttcttgctgtgagtttagatgccccccctagcacctcgacaatggacgatgagggctatccgaggccccactctcacctgctcagctggggatatagtcaactgatcctgcatctgatcaagcttcccgcagactttatcacgaaagaaaaaatgaccgacatctgcaggtcctgcggcttttggcctgggtatctgatcctgtgcctggagttggaaaggaggcgagaggccttcacaaacatagtctatctgaatgatatgagcctgatggagggtgacaatggctggatccctgagactgtggaggagtggaagcttctcctccacctaatacagtcaaaaagcacgcggcctgcaccccaggagtccttaaacggaagcctatccgatgggccatctcctataaatgtcgaaaacgtggctttgttactcgctaaggccatgggccccgaccgggcctggtctttactgcaggagtgtgggctggcgctcgaactcagcgagaaattcacacggacttgcgatatcctacgcatcgctgaaaagcggcagcgggcactaatccaatctatgctggaaaaatgcgacagatttctctggtcacagcaggcttag

SEQ ID NO: 119791 - DNA, 3048 bp, synthetic construct
  misc_feature 1..3048: note = Description of Artificial Sequence: Synthetic coding sequence
  source 1..3048: mol_type = other DNA
atgtacgtaagcagcgaacacaaggggcgccgagtgactgctctgtgttgggataccgcaatcctgagggtgtttgttggggatcatgcaggcaaggtgtctgcaatcaaacttaatacttccaaacaagctaaggctgccgcggcatttgtgatgttccctgtgcagaccatcaccacggtcgattcttgtgtggttcagttggattacctggatggtaggctgctaatctcgagtctaacgaggagttttttgtgcgatacggaacgcgagaaattctggaagattggcaataaagaacgggacggggagtatggcgcctgtttttttcctggaagatgctctggagggcaacaacccctcatttactgcgctcggcctggatcacgcatgtgggaagtcaactttgatggggaagtcatctccacacaccagttcaaaaaattactctctttacctccacttcctgtgatcacactgcgaagcgaacctcagtacgatcataccgcgggcagtagtcagagtctcagctttccgaagttgctgcatctcagtgaacactgcgtgctgacttggacggaacgcgggatctacatctttataccccagaatgtgcaggtcctgttgtggtctgaggtcaaggatatccaggatgtggcagtttgtagaaatgagttgttctgcctccatttgaacggcaaggtttctcacctctccctgattagcgttgagcggtgtgtggaacggctcctgcggagaggcctttggaacctggccgctcggacctgttgcctctttcagaactcagtgatagcatcccgcgctcgtaaaacccttactgccgataagcttgagcatttgaagtcccagctggatcacggcacatacaatgacctcatctctcagctagaggagctaattctgaagtttgaacccctcgattcagcttgcagttcccgcaggtccagtattagttcacacgaatcatttagtattctggattccggaatataccgcataataagctcacgcaggggctcccagtccgacgaagactcatgtagtctgcatagtcaaacactctccgaggatgagaggttcaaggaattcacatctcagcaagaggaggacctacctgaccaatgttgcggctctcatggtaatgaggacaatgtgagccatgcacctgtaatgttcgaaaccgataagaatgagaccttccttccgtttggaatccctctccccttccgcagtccctccccgctagtgtccctgcaagcagttaaggaatctgtgagcagcttcgtgcggaagaccacagaaaaaattggcaccctgcacacaagccctgacttgaaagtgaggcccgaactgcgcggagacgagcaatcctgtgaagaagacgtttcctccgatacttgtcccaaagaagaggatacagaagaagaaaaggaggttacaagcccaccaccagaagaagatcgattccaagagctcaaagtggccaccgccgaggccatgaccaagctccaagaccccttagtgctctttgagtccgaaagtctgcgcatggttcttcaggaatggctgtcacacctcgagaagacctttgccatgaaggattttagtggggttagtgatactgataatagcagtatgaagctgaaccaggatgtgctgttggtcaatgaatccaaaaaaggaatccttgacgaggacaacgagaaagagaagagggacagtctgggcaatgaggagagtgtcgataaaaccgcctgcgaatgtgtgcggtcaccgagagaatctttagacgacttatttcaaatatgctcaccctgcgccattgcttccggactgagaaatgatctcgctgaacttaccaccctttgccttgaactaaacgtgcttaactccaagattaaaagcactagtgggcatgttgaccacacactgcagcagtacagtcccgagatacttgcgtgtcagtttctgaagaaatacttttttttgttgaacctgaagcgggcgaaggagagtattaaactttcttatagtaattctcccagtgtgtgggatacgttcattgaaggccttaaggagatggcctcctctaaccctgtgtatatggaaatggagaagggagacctccccactaggcttaagctgttggacgacgaggtgccatttgattctccactgctggtggtttatgccacgcgcctgtatgagaaattcggcgagagcgcactcaggagtctgattaagtttttcccttctattctgcccagtgacattatccagctgtgtcatcatcacccggccgaattcctagcctacctagactctctcgttaagagtcgtcccgaggaccagcggagtagctttttggagtctctgctacaaccagaatccctcaggctggattggctgctcctcgctgtaagtttggatgcgcctccgagcaccagcactatggacgatgaaggctacccgcgcccccattcccacttgctgagttggggttactctcagctgatcttgcacctcattaagctaccggccgacttcataacaaaagaaaagatgaccgacatttgccgcagctgcggtttctggcctggttatctgatcctgtgcttggagcttgaacggaggcgtgaggctttcactaatatcgtgtatctgaatgacatgtcactgatggagggagacaatgggtggattcctgagacagtcgaagagtggaaactcctgctgcatctgatacagtctaagtccacaagacccgcccctcaggaatccctaaacgggtctctgagcgacggaccaagtcctattaatgtggaaaatgtggcattgctgctggccaaagccatgggacctgatagagcttggtccctactgcaggagtgcggcctggcgctggaattgagtgaaaaattcacacggacttgcgatatccttcggattgctgagaagcgacagcgagcactgatccagtccatgctcgagaaatgtgatcggtttctgtggagccagcaggcctag

SEQ ID NO: 119792 - DNA, 3048 bp, synthetic construct
  misc_feature 1..3048: note = Description of Artificial Sequence: Synthetic coding sequence
  source 1..3048: mol_type = other DNA
atgtatgtatcctcggaacataagggcagaagggtaaccgctttgtgttgggatacggcaatcctgcgcgtattcgttggggaccacgcaggaaaagtgtctgctataaagttgaatacatctaaacaggctaaagccgcagctgcttttgtgatgttccccgtgcagacgattactacagttgattcttgcgttgtccagttagactatctggacggaagactgctgatctcctccctcacacgctcctttctttgcgatacagagagagaaaagttttggaagatcgggaacaaggaacgcgatggggaatatggggcttgtttctttcccggacgctgtagtggaggccaacaacctcttatttactgtgctcggcccggtagccgaatgtgggaggtgaatttcgacggagaggtgatctctacccatcaatttaaaaagcttctgagtctgcctcctctgcccgtgatcaccctcaggagcgaacctcagtacgatcacacagccggctcatctcagtccctgtcgtttcctaaactgctgcacctgtctgaacattgtgttctgacgtggacagaacgcggtatttatattttcatcccccagaacgtgcaggtgttgctctggtccgaggtgaaagacattcaggatgtggccgtctgtagaaatgaattgttttgcctccatctgaacggaaaggtttcacacctgtccttaatttcggtcgagaggtgcgtcgagcggttgctgagaagggggctctggaatctggccgcccggacttgttgtttatttcagaatagcgttatcgcctccagggcccggaagaccctgacagctgacaagctcgaacatctgaagtcccagctggatcacggcacctacaatgatctgattagtcagctggaggagctgattttgaagtttgagccgctggattccgcctgcagcagccgcagaagctctatttccagccatgaatccttttccattctggactcgggcatctatcgcatcatttcaagcagacgggggtctcaatcagatgaggattcatgctctttgcacagccagacgctgtctgaagacgagcggttcaaagagttcacatctcaacaggaggaagatctgcccgaccagtgctgtggatcacatggaaacgaggacaatgtttctcatgcaccagtgatgttcgagacagacaaaaatgaaacttttctgcctttcggcatcccactgccattcagaagccccagtcctctcgtgagcttgcaagctgtgaaggagtctgtgtcttcctttgtgcgtaaaaccaccgagaagattgggacactgcacacctctccggatctgaaagtgcgtccagaactgagaggggacgaacagtcttgcgaagaagatgtcagcagcgacacctgccccaaagaagaggacactgaggaggaaaaggaagtgaccagcccccccccggaggaggatcgtttccaggagcttaaagtcgcaaccgctgaagccatgactaagctgcaagatcccctcgtgctgtttgaaagcgagagcctgcgaatggtgcttcaggagtggctttctcacttggaaaagactttcgcgatgaaagatttttccggagtgtctgacactgacaattccagcatgaagctcaaccaggacgtgctactcgtgaatgaatctaaaaaaggaatcctagatgaggacaatgaaaaggagaaacgtgactccctgggaaatgaggagagcgtcgacaagaccgcatgcgagtgcgtccgcagcccaagagagtccctggatgacctctttcaaatttgcagcccatgtgcaattgcgagcggactgagaaatgacctggcggaattaactactctttgtttagaacttaatgttctcaactcaaaaataaaatctacaagcggacacgtagaccacaccctgcagcaatactcgccagagatcttagcctgtcagtttctcaagaaatacttctttctgctgaaccttaagagggccaaagagtccatcaaactgtcctatagcaattcccccagcgtgtgggatacctttatcgagggtctgaaagaaatggcctcgtccaacccagtttacatggagatggagaagggcgatctgcctactagactcaagcttctcgatgacgaagtcccctttgatagcccgctgttagtagtttacgccacaaggttgtacgaaaaattcggggagagcgcgcttaggagcctgatcaagtttttcccatcgatcctgcccagtgatataatccaactctgccatcatcatcccgcagagttcttagcctatctggacagcctggtgaagtctcgccccgaggaccagcgctcatctttccttgaaagtctgctccagccggagtctctacgactggactggttactgctcgcagttagcctggatgctcctccatccacaagtacaatggacgacgaaggatacccacgtcctcattcacacctgttgtcttggggctacagccagctgatcctccaccttatcaagttaccggctgattttattaccaaggaaaaaatgaccgacatctgcaggtcatgcggtttttggccagggtaccttatactctgcctcgaactcgagaggaggcgagaggcattcactaatattgtgtatcttaatgacatgtctctgatggagggggataatggatggatccccgagacagtcgaggagtggaaactcttattgcatttaatccagagcaaaagcacaaggccagctccgcaggaatcgttgaatggttcgctctccgatggcccctcacccatcaatgttgagaatgtggcactgctgctggcgaaggctatggggcccgatagagcctggagcctcctgcaggaatgcggcttagccttggagctgtccgagaagtttactagaacctgtgacatcctgcgcattgctgaaaagaggcaaagagctctgattcagtcgatgctagagaagtgcgaccggtttctctggtctcaacaggcgtag

SEQ ID NO: 119793 - DNA, 2328 bp, synthetic construct
  misc_feature 1..2328: note = Description of Artificial Sequence: Synthetic coding sequence
  source 1..2328: mol_type = other DNA
atgaagcgttctggcaccttacgacttctgagtgacctgagcgctttcgggggagctgccaggttgagggaattggtcgcaggagattctgccgtccgggtgaggggttcccccgatggccgccacctgcttctattgcgccctccaggcgctgttgccccacagctccttgtggcaagtcggggaccgggcgccgaattagaacgcgcgtggcctgcgggccagccttctcccctggacgccttcttcctgccgtggcccgcacgcccggcgctcgtcttggtctgggagagtgggttagccgaggtgtggggcgccggcgttggacccggatggcgcccactgcagtcaaccgaactgtgcccgggaggcggtgctcgcgtcgtggcagtggcagctctgcgcggaagactcgtgtggtgcgaggaacgtcaggcacgggcagagggccccagcggcagtcccgccgccgctttttcccattgcgtttgcgtgcggaccctagaacctagtggagaagcctccacatccctgggaaggactcacgtgttgttgcaccattgcccggcctttggccttctcgctagctgcaggcagctcttcctggttcccactgccacaacttggccaggcgtggcccacgtgttgctcatttggagccccggcaaagggaaggtgatggtagcagcaccacgtctgggtctgagctacagcaagagcctgaatccaggacggggcgatacttgggattttagaaccctactgagagggcttcctggtctattgagccctcgagaaccgctggctgtgcatacatgggctccaaccccacaaggcttgttactgctggactttggtggaactgtgagcctgctccaaagccatggaggcacaagggcagtgggcaccctgcaagaggcaccagtgggaccctgggggtccgccgccctcgggacctttcaaggcacactggcctgtgtattgggcagcaccctcgagcttctcgatatggggtcaggacagctgctcgaaaggaaggtcctgtctaccgacagagtccacttattagagcctcctgcgcccggcatggaggatgaagaagagctagagactcgaggaaacttgcggctgttgtctgcacttggcctcttctgcgtgggctgggaggcgccgcaaggagtggagctgccttctgccaaggatctggtgtttgaggaggcttgcggttactaccagagaaggtctctgagaggagcgcaactgacccctgaggagttacggcactcctccaccttccgggcaccccaggcactggccagtattttgcagggccatctgcctcccagtgcccttcttaccatgctccgtacagagcttagggattaccgcgggctcgagcagctcaaagcgcagcttgtggcgggggatgatgaagaagctggctggaccgagttggctgagcaggaggtggctagactgttgaggacggagctgattggagaccagctggctcagctgaatactgtgttccaggcccttccgacggctgcctggggcgctaccttacgcgctcttcaattgcagctggacggtaatgggaagttgcgcagccaggcgcctcctgacgtttggaagaaggtgctggggggcattacagccggcaaagagcctccaaatgggatcttaccccccttcgagttattgtgtcagtgcctctgccaacttgaaccccgttggctgcccccctttgttgagcttgcccaacaacaaggaggtcctggctggggcgccggtggccctggcctacccctttacagaagggccttggctgtgctcggtgaggaaggaacccgacctgaagccctcgagctcgaattgttgctctcctcagggagaccgaaggccgtactgcaggctgttggacaactggtgcagaaagaacaatgggaccgggctcttgacgccggactggctctcggtccgtccagcccattactgcgttccgagatctttaagctgttgctagccgaattcgcacagcatcgccgacttgacgcacatcttccgcttttgtgcaggctgtgtcctccagagctggctcctgcagagctactgctgttgttgcggacataccttcccgatgaagtggggccacctacccccttcccagaacccggggctgaaccccctttgacggtaggattactgaaggccctgctcgaacagaccggcgcccaaggctggctatccggtccagttctcagtccatatgaagacatcctatgggaccccagtacacctcctcccactccccctagagatctgtag

SEQ ID NO: 119794 - DNA, 1596 bp, synthetic construct
  misc_feature 1..1596: note = Description of Artificial Sequence: Synthetic coding sequence
  source 1..1596: mol_type = other DNA
atgctaggcttcctgtcgagggggccttctatgaaactttgtatgggattggcctgcgttttgtccctgtggaatactgtgtccggcatcaagggagaggctaaaaaggaaaagggcatgacttttcttccgaccactgtgtccggcttgcgtgaggaggaaagaaaggagaaaggtgtagcgtttctggctactaccgagctgccggcccggtcgattgatctgtcagctctcaacctaacagagttagttaacggtatgctttcgcgggcgctcaaggatagcaaaaagttctttagcctgctctccgttacttcatacagctcgttcgctttccataagttttctgttgccgtttataatatttcaaacctgaagaccgtagaccctgcgaaatttcccactcgctattgctactgtctgaacaatcggactaatgatctgtcggactttactgctctgcttgtcgatatcattggtaattctacctcgtacctaaccgaaattttcaaatctacctctatcctaagtgtgaaccagagtaatgaaagcgactgtatatttatctgcgtcatgacaggcaaatcgggtagaaatttaagtgacttttgggagattgaggagaagtacccgattataaactacacattcaccagcggccttagtggcgtcctgggtgctgccaccagggggacagccagaacgtctaaacccaccaccaagagccagaaaactctgccatcgacatctcccggtcactggacccaaagcaccccttgggccagtgccctgcggagctccccatggacagagacagcggcgccctcagaaacagaggagactctgaataccggacgaccacccgagctacccgcccgtgctaccgcgacctggttctctgcgtctcacacactgcctgccctggctacccggcgcgttgccagaactcagtggctgacagctgaccggcagacatgggcctccatcagctccgtgccttgggcgcaaactattagcgagaagaagcccggtggttccctgtgggaaacccgctcctcacctccaacgacagccggaacggaggaggccatgaatacaaccagtctgctcgcacccgcagccgagattatggctactccaggctcccctagccaggccagccccacgttgggcgcctttacgcacggcacacagacccctagccccacaaaggccacagcccctagatatccgcaaactggcgatctctctgcggaatggcccttcactgctggggaggagcctgttctggtgccacgtcctcatcaggtgtcaagatgtccacagcccctgttcaaggtaggagcaatggctgctgctcccttgactttggcaattcagaggctgaatccctgccttatggaactgtgccagttctttcagcagtgtctttgtatgtcccagaggtcaccccggaccgaggatatgaggtactgcctggaatattattcttggttcctgaaaaacgctacctacatctgccagagagtgaaacgagtcagccatagccacactctgaaacaaaaatgcttagagaacatttgcaaaagcgtttag

SEQ ID NO: 119795 - DNA, 558 bp, synthetic construct
  misc_feature 1..558: note = Description of Artificial Sequence: Synthetic coding sequence
  source 1..558: mol_type = other DNA
atgagtccatcactgcaggaaggcgctcaactgggcgagaataagccctctacgtgctctttctccattgagaggatcctggggctggaccaaaagaaggactgtgtaccactcatgaaaccccacaggccgtgggccgacacctgttcctcttctgggaaggatgggaacctctgcctgcacgttcccaatcccccgtcaggaatatccttcccgtctgtggtagatcaccctatgcccgaggaaagggccagcaagtacgaaaattacttcagcgcgagcgaacggctctcacttaagcgagaactctcatggtaccggggcaggagacctcgtaccgcctttacccagaatcagatcgaggtcctcgagaatgtgttcagggtgaactgttaccctggtatcgacatccgtgaggacctggcgcagaagttaaacttggaggaggacaggatccagatttggttccagaaccggagagccaagctgaagagatctcatcgggaaagccaattcctgatggcaaaaaaaaactttaatactaacctgctggagtag

SEQ ID NO: 119796 - DNA, 324 bp, synthetic construct
  misc_feature 1..324: note = Description of Artificial Sequence: Synthetic coding sequence
  source 1..324: mol_type = other DNA
atgtctccttcccttcaggagggcgcccagcttggcgagaataagccctccacatgctcattctccattgaaaggatcctgggtctggatcaaaaaaaggactgcgtgccattgatgaaaccacatcgcccatgggcagatacatgctctagctccggcaaggatgggaacctgtgtttacatgtgcccaacccacccagcggtataagttttccctccgtcgtcgaccatccaatgccagaggaacgtgcttccaagtacgagaattatttttcagccagcgaacgtctctcactaaagcgcgaactttcctggtatcgttag

SEQ ID NO: 119797 - DNA, 1263 bp, synthetic construct
  misc_feature 1..1263: note = Description of Artificial Sequence: Synthetic coding sequence
  source 1..1263: mol_type = other DNA
atggaagtgcccccccggctcagccatgtgcctccacctttatttccatccgcccctgcgaccttagcttctcgaagcttgtcccactggagaccaaggccaccgcgccagctcgcacccctccttccgtctcttgcacccagcagcgcgcgccagggtgctcgccgcgctcagaggcatgtaacggcgcagcagccctctcgactggcggggggcgcagctatcaagggaggtcgccggaggcgtcctgacctcttccgacggcatttcaagagcagcagcatacagcgctcagctgctgctgctgctgctactcgcacagcgagacagcacccgccagctgactcttcagtgactatggaggacatgaatgaatacagtaatatcgaggaattcgcagaaggttccaaaataaatgccagcaaaaatcaacaggatgatgggaaaatgttcataggcggtttgtcatgggacacctccaaaaaggacttgaccgagtatttgtcccgcttcggcgaggtcgtggactgcacaataaagaccgacccagttactggacgctctagaggttttggctttgtgctctttaaggatgcagcctccgtcgataaagtcctggagcttaaggaacacaaattggacggcaagctgatcgatccaaagcgcgcaaaagcgctgaagggcaaagagccccctaaaaaagtgtttgtgggaggactgtcacctgatacctctgaggaacagattaaggaatattttggagcctttggagagatcgagaacatcgaactgcccatggacacaaaaactaacgagcgtcgcggcttctgttttataacctatacagatgaggaacctgtaaagaaactacttgagagtaggtatcaccagattggcagtgggaagtgtgagattaaggttgcccagccgaaggaggtctacagacaacagcagcagcagcagaaaggggggcgcggggctgccgcaggtgggcgaggcggcaccagaggtcgcggcagagggcaggggcagaactggaaccagggttttaacaactactatgatcaggggtacgggaactataactctgcctatgggggggatcagaactatagcggttacggcggatatgattacactgggtataactacggaaattatggatatgggcagggctacgctgactacagtgggcagcagagcacctacggcaaggccagccgagggggtgggaatcatcagaacaactatcagccatattag

SEQ ID NO: 119798 - DNA, 735 bp, synthetic construct
  misc_feature 1..735: note = Description of Artificial Sequence: Synthetic coding sequence
  source 1..735: mol_type = other DNA
atggaagacatgaatgaatattctaacatagaagaattcgccgaaggttccaagatcaatgcgagcaagaaccaacaagatgatggaaagatgttcatcggtggattgtcttgggatacaagcaaaaaagacctgaccgagtacctgagtcggtttggcgaggtggtggactgcaccattaagacagacccagtgactggccgctctagaggcttcgggttcgtactctttaaagacgctgcgtctgtggacaaggtactggagctaaaggagcataaactggatggcaaactgattgaccctaagagggccaaagccctaaaagggaaagaaccaccaaagaaagtttttgtgggcgggctctctcccgatactagtgaggagcaaatcaaagagtattttggtgcctttggcgagatcgagaacatcgaactgcctatggacaccaaaaccaatgagcggagagggttctgcttcatcacctacaccgatgaggaaccagtgaaaaagctgttggaaagtcggtatcaccaaattggtagcggaaagtgcgaaattaaggttgcacaacccaaagaagtgtacaggcagcagcaacaacaacagaaaggtggacgtggcgcagcagctggaggtagaggcggcacacgaggtcgaggccgagggcagcagagcacctatggaaaagcctctaggggggggggaaaccaccagaataactaccagccttattag

SEQ ID NO: 119799 - DNA, 1263 bp, synthetic construct
  misc_feature 1..1263: note = Description of Artificial Sequence: Synthetic coding sequence
  source 1..1263: mol_type = other DNA
atggaggtcccccctcgactctcccacgtgcctcctcctctgtttccctcagctcctgcaaccctggcatctagaagtcttagtcactggaggcccagacctccccgacaactggctcccctactccccagcttggcgccctcttctgcccgacagggcgccaggagagcccaacgtcacgtgactgcgcaacaaccgagtcggcttgccggaggagccgctataaaagggggaagacgcagaaggcctgacctgttccgaaggcactttaagtcctcttccatccagcgatcagctgccgcagcggctgctacgcgaactgctcgacagcaccctccagcggactcctctgtgacaatggaagacatgaacgaatacagcaatatcgaagagttcgccgagggatcaaagatcaacgcctctaagaatcagcaggatgacggaaagatgttcatcggaggactgtcatgggatacgagtaagaaagatctcaccgaatacctgagccgctttggagaagtggttgactgcacaataaagaccgatcctgtaaccggcaggtcccgcgggttcgggttcgtgttgttcaaggatgccgcttccgtcgacaaagtgctggagctgaaggaacacaagttagacggcaagcttatcgatcctaagagagccaaggccctgaaagggaaggagccaccaaaaaaggtatttgtgggcggactgtctcctgacacttctgaggaacaaattaaagaatactttggggccttcggagagatagaaaacattgagctccctatggatacgaagacaaacgaacgccggggcttttgtttcattacatacacggatgaggaacccgtgaaaaaacttctggaatcccgataccaccagataggcagtggaaagtgcgaaattaaagtcgctcagccgaaggaagtatataggcagcaacagcaacagcaaaaaggcggacgcggtgctgcagcaggcggcagagggggcacccgtggaagaggtagaggccaaggacagaattggaatcaagggttcaacaattattacgaccagggatatgggaattacaatagcgcctatggcggggatcagaactactcggggtacggtgggtacgattacaccgggtataattatggcaactacggttacggccagggttacgcagactattctggtcagcaatcaacatacggtaaagcaagcagaggcggggggaaccatcaaaataactatcagccttattag

SEQ ID NO: 119800 - DNA, 1902 bp, synthetic construct
  misc_feature 1..1902: note = Description of Artificial Sequence: Synthetic coding sequence
  source 1..1902: mol_type = other DNA
atggctaatcaagtaaatggcaacgcagtccagctgaaagaggaagaagagcctatggatacaagctcggtgactcataccgagcattacaaaactcttattgaggccggattacctcagaaagtggctgaacggctggacgagatctttcaaactgggcttgtggcctacgtggacttagacgagcgggccattgacgctcttcgagagtttaacgaggaaggagcgctctcagtgttgcaacagtttaaggagagcgatctgtcccacgtgcagaataagagcgctttcctgtgcggcgttatgaagacataccggcagagggaaaaacaggggtccaaggtacaggagagcacaaagggacccgatgaggccaaaattaaggcccttctggagcggacaggatacactctggatgtgaccactgggcagcgtaagtacggcggccccccgcctgattccgtatattcaggtgtgcaacccggcattggtacagaagtttttgtgggtaagattcctagggacttgtacgaagatgagctggtgcctctcttcgaaaaggccggcccaatttgggatttgcgcctgatgatggatcccttgagtgggcagaacagaggatacgcatttattaccttctgcggtaaagaggccgctcaagaggccgtgaagctctgcgattcttatgagatacggccggggaaacacctgggtgtctgtatcagtgtggcaaataatcggctgttcgttgggagcatcccaaagaataaaactaaggagaacattctggaggagttcagtaaagtgacagaaggcctggtggacgtaatcctttatcaccagcccgacgacaaaaagaaaaatagagggttctgcttcctcgagtacgaagaccacaaaagcgctgcccaggcccggaggcggctcatgagtgggaaggtcaaagtatggggcaatgtcgtgacagtggaatgggcagatccggttgaggagcccgatcctgaggtgatggccaaagtgaaggtgctgtttgttcgcaacctggctacgaccgtgactgaggaaatactggagaaatccttcagcgagtttgggaaactcgaacgtgtgaaaaagttaaaagattacgcgtttgttcacttcgaagatagaggagccgcagttaaggctatggatgagatgaacggaaaggagatcgaaggcgaggaaatagagatcgtgttagcaaagccacccgataaaaagcgcaaggagcggcaggctgcgcgtcaggcctcacgatctaccgcttacgaagactactattatcaccccccgcccagaatgccaccccctattagggggcgtggtagaggcggagggagaggaggctacggatacccgccagattattacggatacgaagactactacgatgattattatggttacgactaccatgattatagaggaggctacgaggatccatactatggatacgatgatggatatgccgtacgcggcaggggcggaggacggggcggccgaggagctcccccccccccacgcggacgcggggctcctccacctcgaggacgggccgggtattcccagcgcggcgctccattagggcctccacgaggcagccgtggagggagagggggcccagcccagcagcagcggggtcgggggtcaaggggttccaggggcaaccgtgggggcaatgtaggcgggaaaaggaaggccgacggttataaccagcctgactcaaagcgcaggcagacgaataatcagcaaaattggggttctcagccaatcgcgcagcagccattgcagcaggggggcgattactctggcaactacggttataataatgacaatcaggagttctatcaggacacctacggccagcagtggaaatag

SEQ ID NO: 119801 - DNA, 1902 bp, synthetic construct
  misc_feature 1..1902: note = Description of Artificial Sequence: Synthetic coding sequence
  source 1..1902: mol_type = other DNA
atggcaaatcaggtcaacggtaacgcagtgcaacttaaggaggaagaggagccgatggatacttcctcagtgacccacaccgaacactacaagacattaattgaagctggattgccccagaaagtggccgagcgccttgatgaaatattccaaaccggcttagtcgcatatgtagacctcgacgaaagggcgatcgacgccctgagggaattcaacgaggagggggccttgagtgtccttcagcagtttaaggaatctgacctgagccacgttcaaaataagtcagctttcctgtgcggagtgatgaagacctataggcagcgggagaagcagggcagcaaggttcaggaaagtaccaaaggaccagacgaggccaagatcaaagccctgttggaaaggacaggctacactctggatgtgacaacagggcaacggaaatatggcggaccaccccccgattctgtatatagcggcgttcagccaggcattggcacggaggtgttcgtaggcaaaattcctagggatttatatgaagatgagctggtgccactttttgaaaaggcagggcccatctgggacttgaggctgatgatggatccgctaagcggccagaaccggggctatgcgttcattaccttctgcggaaaggaagccgcacaggaagcagtgaagctttgcgacagctacgaaatccggccagggaaacatctaggcgtgtgtatcagcgtggcgaataatcggctttttgtgggctccatccctaaaaataagactaaagaaaacattttggaagagttctccaaagtgactgagggcctcgttgacgtcattctgtaccatcagcctgacgataagaaaaaaaacagaggcttctgcttccttgagtacgaagaccacaaaagtgctgcacaagcccgcagacgcctgatgtctggaaaggtcaaggtctggggcaacgtggtgaccgtggagtgggcagaccctgtggaagaacctgacccagaggtgatggctaaggtgaaggtgttgtttgtgcgaaacctggctacaactgttaccgaggaaatcctggagaaaagtttctcagagtttggaaaactggaacgagtaaagaagctgaaagattatgcattcgtgcacttcgaagacagaggagcagctgtcaaagcaatggatgaaatgaacggaaaagagatcgagggcgaggaaatcgaaatcgtcctggccaaaccccctgataaaaagagaaaggagaggcaggctgccagacaggcttcaagatctactgcctacgaggactattactatcacccacccccccggatgcctcctccgatccgcggccgaggacgcggaggaggcagaggtgggtatggctaccctcctgactattatggatacgaagactactacgatgattactatgggtatgattatcacgactataggggtgggtatgaagatccatactacggctacgacgacggctatgctgtgaggggtagaggcgggggacgaggagggaggggagcacctcctccgcctcggggccgtggggccccaccaccacgtgggcgagctggttactctcagcggggagcccccttaggccctcctaggggcagcagaggtggaagaggaggtcctgcccagcagcagcggggcaggggttcgagagggagccggggaaaccgcggaggcaacgtcggcggcaaacgaaaggccgatggatacaatcaacccgactccaagcggagacagaccaataatcaacaaaactgggggagccagcccatagcgcagcaacctctgcagcaaggcggggattattccggcaactatggatacaataatgataatcaggaattctaccaggatacttatggacagcaatggaagtag

SEQ ID NO: 119802 - DNA, 1911 bp, synthetic construct
  misc_feature 1..1911: note = Description of Artificial Sequence: Synthetic coding sequence
  source 1..1911: mol_type = other DNA
atggctaatcaggtgaacgggaacgccgttcagttgaaggaggaggaggaacctatggatacttcctcagtgactcacacagaacactataagacgcttatcgaagcgggccttccccagaaagtggcagagagactggatgagattttccagacaggactggttgcatacgtggatcttgacgagagagccatcgacgctctgcgggagtttaacgaggaaggcgccttgtctgtgctgcagcagtttaaggagtctgatctttcacacgttcaaaacaagagtgccttcttgtgcggagttatgaaaacatatcgccagcgggagaagcagggctctaaggtgcaggaaagtacaaagggccctgatgaagccaaaataaaggctctcctcgagcggactggatacacacttgatgtgacaacagggcagcggaagtacggcgggccgccgcctgactctgtctacagcggagtgcagcctggtattggtaccgaggtgttcgtcggaaaaattcccagggatctctacgaagacgagctggttccgctgtttgaaaaggccgggcccatctgggaccttagattgatgatggaccctctttcgggccagaatcgcggatacgccttcattactttttgtgggaaggaagccgctcaggaagccgtgaaattgtgcgattcatacgaaatcagacccggtaaacatctgggagtgtgcatttcggtggccaacaaccgtctttttgttggatccataccaaaaaacaagaccaaagagaacattttggaggagttttctaaggttaccgggcttaccgaaggcctcgtggatgtgattttgtatcatcaaccagatgataaaaagaaaaatcggggcttttgcttcctggagtacgaagaccacaagtcagccgctcaggcaaggcggagactgatgtcaggcaaggtgaaagtgtggggtaacgtggtgaccgtggagtgggctgacccagtggaagaaccagatcctgaggtcatggcgaaggtgaaggttctgttcgtgagaaacctggcaaccaccgtgacagaggagattttggagaagtccttttcagagttcgggaaattagagagggtgaagaagttgaaagactacgccttcgttcactttgaagataggggagcagcagtgaaggctatggatgagatgaatggtaaggagatcgagggggaagagattgaaatagtgctcgcaaagccccccgataaaaagaggaaggaacgacaggctgccaggcaagcgtcccgctcaacagcatacgaagactactactaccacccacctcctaggatgcctcctccaatcagagggcggggcaggggggggggtcgtggtggatacgggtatccacccgattactatggttacgaggattactatgacgattattacgggtacgattatcatgattatagaggcggctacgaggatccctactacggttacgacgacggctacgcagtcaggggccggggcggtgggcgaggagggcgcggcgctcccccgccccctcgggggcggggagcacctcctccacgagggagagctggctactctcagcggggtgcacctttgggcccccccaggggttcccgcggaggtcgaggtggtcccgcacaacagcagaggggacggggctcccggggcagtcggggaaacagggggggtaacgtgggtggtaaacgcaaggctgacgggtacaaccagcctgactccaagaggagacagaccaacaatcaacagaactgggggtcacaaccaatcgcacaacagccattacaacaaggtggtgattattcggggaactatggttacaacaacgacaatcaggaattttatcaggacacctacgggcagcaatggaaatag

SEQ ID NO: 119803 - DNA, 1422 bp, synthetic construct
  misc_feature 1..1422: note = Description of Artificial Sequence: Synthetic coding sequence
  source 1..1422: mol_type = other DNA
atgaaaacataccgacaacgcgaaaaacagggttctaaagtgcaggagtcaacgaaaggtcctgacgaggcgaaaattaaggctttgctggaacgtaccggatatacactggatgtgacaaccggccaacggaagtatggcgggccaccacctgactctgtatactccggagttcagcctggaatcgggaccgagtgtgatagctacgagattcggcctggtaaacacctcggtgtctgcatatcagtcgcaaataataggttgttcgtgggcagcataccaaagaacaaaacaaaggagaacatattagaagagttcagtaaggtaaccgaaggactcgtcgacgtcatcctgtaccaccagcccgatgacaagaagaagaaccgtggattctgttttttagagtatgaagaccataagtctgcagctcaggctcgacgccgactaatgagcggaaaggtcaaagtgtggggaaacgtcgtgacagttgaatgggcggaccccgtggaagagcccgatccagaggttatggctaaggttaaggtgctattcgtgcggaacctggccaccacagtgacggaggagatcttagagaagtcgttcagcgagtttggcaaactcgaaagggtgaaaaagctgaaggactacgcattcgtccattttgaggataggggcgctgccgtcaaagcgatggacgagatgaatggtaaggagattgagggtgaagaaatcgaaatcgtgcttgccaagcctcccgataagaagagaaaggaaagacaggccgcacgccaagcctccaggtctacagcctatgaggactactactaccaccctccccctcgcatgcctccacccatccgcggccgcggacgaggcggaggtcgcggagggtatggctatcctcctgattattacgggtatgaagactactacgacgactactatgggtacgactatcacgactaccgaggggggtatgaggatccatattacgggtatgacgatggatatgccgtgcgtggccgaggaggtggcagagggggtcgcggcgctcctcctcctccaagaggccgcggggccccacctcccagaggcagagcgggctactcccaaaggggagcacccttaggtccccctcgcggatctagggggggtaggggcggacccgctcaacagcaacgcggccgaggtagccggggatctagagggaaccgcggcgggaatgtgggaggaaaaaggaaggctgacgggtataatcagcccgatagcaaacggcgccagactaataaccaacagaactggggctcacagcccattgcacaacaaccgctgcagcaggggggagactactctgggaactacggatacaataacgacaaccaagagttctatcaggacacatatggccagcaatggaagtag

SEQ ID NO: 119804 - DNA, 1788 bp, synthetic construct
  misc_feature 1..1788: note = Description of Artificial Sequence: Synthetic coding sequence
  source 1..1788: mol_type = other DNA
atggctaatcaggtcaacggaaatgcagttcagctgaaggaggaggaggagcctatggatacctcgagtgttacccatacagaacactacaaaaccttgattgaggctggcctcccccagaaagttgccgagcggttggatgagatattccagaccggcttagtcgcttacgtggatctggacgaacgagcaatcgatgcactacgagaatttaatgaggagggcgcccttagtgtactccagcaatttaaggaatctgatctctcccacgtgcagaataagtctgccttcctgtgcggggtgatgaaaacatatagacagcgagaaaaacaaggctctaaggtccaggagagtaccaaggggccagatgaagcaaaaatcaaagtgtttgtaggaaaaatccctagagatctctatgaggacgaactcgtgccactgtttgaaaaggccgggcccatctgggacctccggctgatgatggacccactgtccggtcagaatcggggctacgcattcattacattctgtgggaaggaggccgcacaggaggctgtcaagctgtgcgacagctatgaaattcggcccggcaaacacctgggggtatgcattagtgtcgctaataataggctgttcgtgggatccattcccaaaaataaaactaaggagaatatcctggaggagttcagcaaggtaaccgaaggccttgttgatgtgattctctaccatcagccggacgataagaagaagaacagggggttctgtttcctggagtatgaggatcataagtcagcagctcaggctcggaggaggctcatgtccggaaaagtgaaagtctgggggaacgtggtgacagtcgagtgggcggatcctgtggaggaaccagacccagaggttatggctaaggtcaaagtcctctttgttaggaatttggcaactacagttaccgaggagattcttgagaaaagcttcagcgaatttggtaagctggagcgagtgaaaaaactgaaggattatgctttcgtgcactttgaggataggggagcagccgtaaaggctatggacgagatgaatggaaaggagattgaaggcgaagagattgaaatcgtgctcgctaaaccaccagacaagaagagaaaagagcgccaggctgcacggcaggcgtcaagaagtactgcttacgaagactattactaccaccctcctccccgcatgccccccccaattcgcggacgaggacgaggcggagggcgcgggggttatggatacccacctgattattacggctatgaagattattacgatgattactatgggtacgattaccacgattaccgcggggggtatgaggacccttactatgggtacgatgatgggtacgcggttaggggacggggcggggggcgaggggggcgaggcgcacccccgccacccaggggaaggggcgcccctcctcccaggggacgcgcaggatattctcagagaggcgcgccactcggaccccccagagggagtagagggggccgggggggccccgcacaacaacaaagaggccgtgggagcagaggaagtcggggcaacagggggggcaacgtgggtgggaaacgcaaggctgatggatataatcagcctgactcaaagcggagacagaccaacaaccagcagaattggggatcccagccgattgctcagcagcctctccagcaggggggggactattcgggcaattatggttataataacgacaatcaggaattctatcaggacacctacggccagcagtggaagtag

SEQ ID NO: 119805 - DNA, 2304 bp, synthetic construct
  misc_feature 1..2304: note = Description of Artificial Sequence: Synthetic coding sequence
  source 1..2304: mol_type = other DNA
atgcggagctgggctttttcttatttggacgcaatggacaatatcacaagacagaaccagttctacgacacccaggtaatcaaacaagagaacgaatccgggtatgagcgtcgccccctggagatggaacaacaacaggcctaccgccctgaaatgaagactgaaatgaagcagggcgccccgacatccttccttccgccagaagcgagccagcttaagcccgacagacagcaattccaaagccgtaagaggccttatgaagaaaaccgaggaagggggtatttcgagcatagagaggaccgccgcgggagatccccccagcctccggcggaagaggacgaggacgacttcgatgataccctggtggcaatcgatacttacaactgtgacctccacttcaaggtggcccgggacagaagtagtggctaccccctgacaatcgagggttttgcctacttgtggagcggagcccgcgcctcatatggagtgaggcgcggtagagtttgtttcgagatgaagattaacgaggagatcagtgtcaaacacctgccatccaccgaaccggacccgcacgtagttcggatcggatggtcgctggactcatgctccactcaactgggcgaagagccgttctcctacggctacggaggcaccggcaagaaatcgaccaacagccgtttcgaaaattacggagacaaatttgctgaaaatgatgtgattggttgttttgcagacttcgagtgcggcaatgacgttgagctgtcttttacaaaaaatggaaagtggatgggaattgccttccgcatccagaaggaagcccttgggggccaggcactctatccacacgtgttggttaaaaactgtgccgtggaattcaatttcggtcagcgcgcagaaccctattgcagcgtattgcccggatttaccttcatacaacatttaccactaagcgagaggatccgggggactgtcggtcctaagagcaaggccgaatgtgaaatactgatgatggtaggcctgcccgccgccggcaaaaccacatgggctatcaagcacgcagcctctaatcctagcaagaagtataacatcttgggcaccaacgcaataatggacaaaatgcgggtgatgggccttagacgacagagaaattatgcaggcagatgggatgtcctgattcagcaggccacacaatgcctcaatcggttgatccaaattgcggcgcggaaaaagaggaactacatcctggaccagaccaacgtgtacggaagcgcgcagcgtaggaaaatgaggccatttgaggggttccagagaaaggctattgtaatctgtcctacggacgaggacctgaaagacagaaccatcaaacgaacagacgaggagggaaaggatgtaccggatcacgcagttctggagatgaaggccaattttacactcccagacgtcggggacttcttagacgaggtgctgtttatagagctgcagcgagaggaggcagacaagctggtgcggcagtacaacgaggaagggcgtaaagccggtcctccacctgagaagagatttgataatagggggggtgggggatttaggggcaggggtggaggcggggggtttcagcgctacgagaatcgtggaccccccggaggtaatcgcggcggtttccagaatagaggcggaggctcaggaggaggaggcaactacaggggcggctttaataggagcggtggagggggttactcacagaatcggtggggaaacaataaccgcgataataataatagcaataatcgcgggtcctataaccgggcaccacaacagcagccaccgccacagcagccacccccacctcagcctcctccccagcaaccaccgcctcctccgagttattctccagctagaaatccacccggggcctcaacatacaacaagaattccaatattccgggcagctccgctaatacctctacaccaactgtctcgtcatattccccgcctcaaccaagctattcacagcctccgtataaccaaggcgggtatagtcaagggtacacagcccccccacctcccccccctccccccccggcgtataactatggcagttatggcggctacaatcccgccccctacacgccaccgccccccccgacggctcaaacctatccccagccatcctacaaccaatatcagcagtacgctcagcagtggaaccaatattaccaaaatcaggggcagtggcccccctactatggaaattatgactacggatcctatagcggcaatactcagggcggcacgtcaacccagtag

SEQ ID NO: 119806 - DNA, 369 bp, synthetic construct
  misc_feature 1..369: note = Description of Artificial Sequence: Synthetic coding sequence
  source 1..369: mol_type = other DNA
atggacgtgagaagactgaaggtgaatgaattacgggaagagttgcaacggcggggccttgatactcgcggtctgaaggcagagctggcagagaggcttcaggcagctctcgaggcagaggaacctgacgacgagagggaactggacgcagatgatgagcctgggaggcccggccatatcaatgaggaagccgagctccagcccgccactctgcagcccggtaggctgcagcccggactccattcccccactgcttccacttccactactacatgtctgcaactgtgggagctcaggcgcctccagcctgggccattgtatcccaccgcaactccacattgtaccgacttgccgtctgcacagctgtag

SEQ ID NO: 119807 - DNA, 2271 bp, synthetic construct
  misc_feature 1..2271: note = Description of Artificial Sequence: Synthetic coding sequence
  source 1..2271: mol_type = other DNA
atggacaacattaccagacagaaccaattctacgatacacaggtcatcaagcaagaaaacgagtccggttacgaaaggaggccgctggagatggagcagcagcaggcttatcggccagagatgaaaactgaaatgaagcagggagcccccacgtcatttctcccacccgaggctagccagcttaaacctgatagacaacagttccagtcccgtaagagaccttatgaagagaaccgcgggcggggttacttcgaacaccgcgaggaccggcggggaaggtcgccccagcctccagcagaggaggatgaggatgatttcgacgacacgctcgtcgcaattgatacctataattgcgatctgcactttaaagtggcccgggacagatcctcaggatatcccctgactattgaagggttcgcttacctctggagcggtgcaagagcttcatacggagtccgaagaggccgagtttgcttcgagatgaagataaacgaagagatctccgtcaaacacctgccgtcaaccgaaccagaccctcatgttgtgcggatcgggtggtcgctggattcatgtagtacacagctgggggaggaacctttctcttacggctacgggggcaccggcaagaagtctaccaacagccgttttgagaactacggcgataaatttgcggagaacgacgtcattgggtgcttcgcagactttgagtgtggcaatgacgtcgaactaagctttaccaaaaacgggaagtggatgggtatagctttccgcattcagaaggaagccctgggcggccaggcgctttaccctcacgtgctggttaaaaactgcgctgtcgaatttaatttcggccagagagcagagccgtattgtagcgtgctccccggctttacctttatccaacacctgcccctctcagagagaatcagggggaccgttggacctaagagcaaggccgagtgcgagattctcatgatggtgggtctgcccgccgctggcaagactacttgggccattaagcatgccgcttcaaatcccagtaagaagtacaatatattagggacgaacgccatcatggataagatgcgggttatgggcttgcgtagacagcgtaattatgcaggccgctgggacgtcctgatccagcaggcaacacagtgcctgaatcggctgatccagatcgctgcgcgtaaaaaacggaactatattctggatcagacaaacgtgtacggcagcgcccaaaggagaaagatgcggccgttcgaaggctttcagaggaaggcgatcgtgatatgccccaccgacgaagacctcaaggataggactattaaaaggacagacgaagagggtaaagacgtcccggatcacgccgtgctcgagatgaaggccaacttcacactgcccgatgtgggagactttctggacgaggtactttttattgagctgcaacgcgaggaggctgataagttagtacgtcagtacaatgaggagggacgcaaggcagggcccccgcctgagaagagattcgacaaccggggcggcggggggtttagaggacgtggcggaggtggaggctttcagaggtacgaaaaccgcgggccgcctggcgggaaccggggcgggttccagaaccggggaggcgggtccgggggcggcggaaactatcgagggggcttcaaccgttcaggtgggggcgggtattcccagaatcggtggggaaataacaacagggacaacaataactctaacaacaggggatcctataatcgcgcgccgcagcaacagccgccacctcaacagcccccccccccccaacctcccccccagcagcctcctcccccaccctcctactctccagcgaggaacccccctggggcgagcacttacaacaagaattccaacattcccggatcatcggcaaatacctctactcccacggtaagctcttacagtcccccccagccaagttacagtcagccaccatacaaccagggcgggtattcccagggatacaccgcccccccacctccgcccccaccgccccccgcttacaactacgggtcttatggaggatataatcctgcaccgtacacccccccgccacctcctacagcccagacctatccccagccgagctataatcagtatcagcagtacgcccagcagtggaaccagtattatcagaaccagggacagtggcctccttactacggtaattatgattatggctcctattccgggaacacacagggaggaacatccacccagtag

SEQ ID NO: 119808 - DNA, 2259 bp, synthetic construct
  misc_feature 1..2259: note = Description of Artificial Sequence: Synthetic coding sequence
  source 1..2259: mol_type = other DNA
atggatgtgcggcgcctgaaggtgaacgagctgcgggaggagctgcagagacggggtctggataccagagggctcaaagcggagctagcagagcgcctccagccaccgcctcctgggctccagccccatgctgaaccaggtggctacagtgggccagacggacactacgctatggataacatcactcggcaaaaccagttctacgatactcaagtgatcaaacaggagaatgagtctggatatgagcgccgaccactggagatggagcaacagcaggcttaccgaccagaaatgaaaactgagatgaaacagggtgctccaacctcatttcttccaccggaggcctcccagctgaagcccgaccgtcagcagttccagagccgcaaacggccatatgaagaaaatagaggaagaggctattttgagcatcgtgaagatcgacgtggccggtcacctcagccaccggccgaagaggacgaggatgatttcgatgatactctggtggccattgacacatataactgcgatctacacttcaaagttgccagagacaggtcaagcggttatcccctgaccatcgaggggttcgcctacctctggtccggcgcacgagcatcctacggcgttcgccgcgggagggtctgtttcgagatgaaagattttgagtgcggaaatgacgttgagctcagcttcacaaaaaacggaaaatggatgggcatcgctttccgcatacagaaagaggccttggggggccaggcactttatcctcatgtgctggtcaagaactgtgccgtagagttcaactttggacagagggccgagccgtattgttcggtcctgccagggtttacgttcatccagcacctgccccttagcgagcgaatacggggcacagtgggcccgaagtcaaaagcagagtgcgagattctgatgatggtgggcctgccagcagccggcaagacaacctgggcaatcaagcatgctgctagtaatccctctaagaagtacaatatccttggcactaacgcaatcatggataagatgcgggtgatgggcctacggagacaacggaattatgccgggcgttgggacgttctgattcagcaggccacacaatgcctgaaccgactcattcaaattgctgctcgaaagaaacgaaactatattcttgatcaaaccaacgtttacgggtctgctcagcggcgaaaaatgagaccatttgagggctttcagcgcaaggcaattgtaatctgcccaacagacgaagatctaaaagaccgcactattaaaagaaccgatgaggaaggcaaagacgtgcccgatcatgccgttctggagatgaaggctaatttcaccctccccgatgtcggtgattttctggacgaagtacttttcatcgagctgcagcgggaagaggcagacaagctggtgagacagtacaatgaagagggcaggaaagcaggacctcctcctgagaaacgtttcgacaatagaggtgggggagggttccgggggcggggaggaggcggcgggtttcaacggtatgagaaccgggggccccctggcggcaaccgcggaggctttcagaatagaggcggcgggagcggcggggggggaaactatagaggaggctttaaccgcagtgggggtggtggctattctcagaatcgctggggcaacaataatagagataataacaactccaataaccgaggcagctacaacagggccccccaacagcagccaccaccccaacagccccctccaccgcagcccccgccccaacagccaccacctccaccctcatattctcccgctcgcaatcccccaggtgcttccacatacaacaagaatagcaacatacctggctctagcgcaaacacatcaacacccactgtgtcctcctattcacctccacagagctttggcttcttccctagtactttccagccaagctatagccagccgccttacaaccagggaggatattctcaggggtatacagccccgcccccaccgcccccacctcctcctgcctacaactacggctcatacggcgggtacaaccccgccccatacacccccccaccaccacccacggcccagacgtacccacagcccagttataaccaatatcagcaatacgcccagcaatggaatcagtattaccagaaccagggccagtggccaccttactacggcaattacgactatgggtcctactctgggaatacccaagggggcactagcacccagtag

SEQ ID NO: 119809 - DNA, 2571 bp, synthetic construct
  misc_feature 1..2571: note = Description of Artificial Sequence: Synthetic coding sequence
  source 1..2571: mol_type = other DNA
atggacgtccggagactgaaggtgaatgaactgcgggaggagcttcagcgccgtgggctggatacacggggcctgaaggctgagctggcagaacgcctgcaggccgcgctggaggctgaggaaccagatgatgagcgggagcttgacgctgacgatgagcctggtagacccggccacattaatgaggaggtggaaactgaaggcggcagtgaactcgagggaactgcgcagcccccacccccgggccttcaaccacacgccgagcccggcggatatagcggcccggacggtcattacgcgatggataatatcacaagacagaatcaattctatgacactcaagtgataaagcaagaaaacgagagcgggtatgagcggcgccccctggagatggagcagcagcaggcttatcgcccagagatgaaaacagagatgaagcaaggggccccaacctctttcctgcctccagaagcgagccagctgaaaccagacagacagcagttccagagcagaaagcgaccttatgaggagaaccgcggacggggctacttcgaacaccgcgaggatagaaggggacgctctcctcagcctccagctgaggaagatgaagacgactttgatgacacactcgtggctatagacacctataattgcgacctgcatttcaaagtggctcgcgaccgctcaagtggttaccctttgactattgaggggttcgcgtatctgtggagtggtgcgcgagcctcttatggagtcaggcgaggccgcgtgtgttttgagatgaagatcaacgaagagataagcgttaagcacctaccgtccactgaacccgaccctcatgtggttcgaatcggttggtcgttggactcctgtagcacgcagctcggagaagagccattctcgtatggctatgggggtactggtaagaaatccactaattctagatttgaaaactatggcgacaagttcgccgaaaacgacgtcattggatgtttcgccgactttgaatgcggaaacgatgtggagttatcctttactaagaacggcaaatggatgggcattgccttccgcatacagaaggaggccctgggcggccaggcactctatcctcatgtattggtgaaaaattgcgctgtcgagtttaatttcggtcagcgagccgagccatattgttctgtcctgccaggtttcaccttcatccagcacctgccgctttccgagcgaattagaggcaccgtggggcctaaatccaaagccgagtgcgaaatcctgatgatggtaggcctgcctgccgcagggaagaccacctgggccattaaacatgcggccagcaacccgtcaaagaagtataatattctgggcactaatgccatcatggacaagatgagggtgatgggcctgcggcggcagaggaattatgcaggtcgatgggatgtattgatccagcaggcaactcagtgtctaaaccggctgattcaaatcgccgcccgcaaaaaacgcaactatatactcgatcaaaccaacgtttacggcagcgctcagaggaggaaaatgcggccgtttgagggcttccagagaaaggccatcgtcatttgccctacagacgaggacctgaaggacaggaccataaaacgaacagacgaggaggggaaagacgtccctgatcacgccgtgctagagatgaaagcgaacttcacacttccggatgtcggggattttctcgacgaggtgctttttatcgagctccagagggaggaagctgacaagctggttcgccagtacaacgaagaagggagaaaggctggcccgccacccgaaaagagattcgataacaggggcggtgggggctttcgcggccggggaggaggcggagggttccagaggtacgagaacaggggccctcccggcggaaaccggggtgggttccaaaatcgcgggggcggcagcgggggtgggggtaactatcgtgggggttttaacagatcaggcggcggaggttactcccaaaatcggtggggtaacaacaatcgcgacaacaacaatagtaacaatcggggaagctacaaccgagccccccagcagcaacctcccccacaacagcctcccccaccgcagccgcctccccagcagcctcccccccccccaagttattccccagcccggaatcctcctggggcatcaacttacaacaaaaattccaacatccccggctctagtgctaacacttccacacccaccgtgagcagctactcccctccccagccctcttatagccaaccgccatataaccagggtggctatagccagggctataccgccccccctcccccaccacctcctcctcccgcttacaattatggaagctatgggggctataaccctgctccatacaccccccccccgcctcccactgcccagacctacccccagccatcgtacaatcaatatcagcagtacgctcagcagtggaaccagtattaccagaaccagggtcagtggccgccttattacgggaattacgactacgggagctatagcggcaacacgcaaggcggcacatccacccaatag

SEQ ID NO: 119810 - DNA, 2751 bp, synthetic construct
  misc_feature 1..2751: note = Description of Artificial Sequence: Synthetic coding sequence
  source 1..2751: mol_type = other DNA
atggactgtgagcattccctatcactgccttgtcgtggcgccgaggcttgggagatagggatcgataaatatctctacgccatgcggctaagtgatgagacccttatagacataatgactagatttcggaaagagatgaaaaacggtctgtccagggacttcaatcccactgctacagtgaaaatgctcccgaccttcgtgcgcagcattcccgacggaagtgagaaaggcgattttattgcattggacctgggcggtagtagctttcgaatcctgcgggttcaggtgaatcatgagaaaaatcagaatgtgcacatggaaagcgaggtctatgacaccccagaaaatatcgttcacggctctggtagccagctttttgaccatgtagcagaatgcttgggggatttcatggaaaagcgaaagattaaggacaagaagctgcctgtcggctttacattttcctttccctgccagcagtcgaaaatcgacgaggccatcttaatcacctggacaaaaaggtttaaggcctctggggttgagggcgccgacgtcgtgaaactcctgaacaaagcgatcaagaagcgcggtgactacgacgctaacatcgtggccgttgtgaatgatacagtgggaaccatgatgacatgcgggtacgacgatcagcactgtgaagtaggactgatcattggcaccgggactaacgcctgctatatggaggaactgcgccacatagatctggttgagggcgacgaaggtcgcatgtgtatcaacaccgaatggggggccttcggagacgatggaagcctggaggatatccggaccgagtttgacagggagatagaccgaggatctctgaatcctgggaagcagctgtttgaaaaaatggttagtggcatgtatctcggcgaattggtgagacttattctggtgaagatggccaaggagggattgctgtttgagggcagaataacacccgagctcctgacccgtggaaaattcaacacgtctgacgtgtccgctatcgagaagaataaagaaggactccataatgccaaagaaatcctaacccgattgggggtggagccctctgatgacgactgtgtgtctgttcaacacgtatgcactatagtgagcttccggagcgctaacctagtggccgctaccttaggcgccattctaaatcgcttgagggataataaaggcaccccaaggcttagaactactgtgggcgttgatggttccctctataagacccatccacagtacagcagacgcttccataaaaccctcaggaggctggtcccagattctgatgtacgattcctcttgagcgaaagtggcagcggcaaaggggctgccatggttactgcagtggcttaccgcctcgccgaacagcaccgacaaatcgaggagacgctggcccatttccatctgactaaagacatgctgctggaggtgaagaaacgcatgagagctgagatggaactcggccttaggaaacagactcataacaacgcagtcgttaagatgctaccttcctttgtccgccggacacctgatggcacagaaaatggggatttcttggcacttgacttgggaggcacgaactttcgggtgctgctcgtgaagattaggtcgggcaaaaagcgcacagtggagatgcacaataagatttacgccatcccgatcgaaattatgcaggggacaggagaagagctgttcgaccatattgttagctgcataagcgacttcttggactacatgggtatcaaaggaccccggatgcctctgggtttcacattcagttttccttgccagcagactagcctggacgctggcatacttatcacttggacgaagggattcaaggctaccgattgcgttgggcacgacgtggttaccttacttcgcgacgcaataaaacgaagggaagagttcgacttggacgtggtggctgtggttaatgataccgtaggcacaatgatgacatgcgcctacgaagagccgacttgtgaagtgggcttgatcgttgggactggatccaatgcctgttacatggaagaaatgaagaacgtggagatggtagaaggcgatcaggggcagatgtgtataaatatggagtggggggccttcggggacaacggttgtttagatgatattcgaacccattacgatcgtctggtggatgaatactcactcaacgccgggaagcagaggtacgagaaaatgatctctggaatgtacctgggggaaattgtgagaaacatattgattgactttaccaaaaaggggttcctgtttcgcggtcagattagtgagacgctcaagacacgaggcatcttcgaaaccaagttcctgagtcagatcgaaagcgacagattagcgctcttgcaggttcgcgcaatcctacagcagttgggactgaattccacatgcgacgacagtattttagtgaagactgtctgcggcgtcgtgagcaggcgcgctgcccagctgtgcggtgcagggatggcagcagtcgttgataagattcgggaaaatagggggctggataggctcaacgtgaccgtgggggtggacggcacgctgtacaagctgcacccacactttagtcgtattatgcaccaaacagtaaaggagctttcacctaagtgtaatgtgagttttttgctcagcgaggacggttccggaaaaggcgccgcccttatcactgcggtcggcgtgaggctaagaaccgaagctagttcatag

SEQ ID NO: 119811 - DNA, 2754 bp, synthetic construct
  misc_feature 1..2754: note = Description of Artificial Sequence: Synthetic coding sequence
  source 1..2754: mol_type = other DNA
atgatcgccgcccagcttcttgcttactattttaccgagttgaaagatgaccaagttaagaaaattgacaaatacctctatgctatgcgcctcagtgatgaaactcttatagacatcatgactaggttccgtaaggagatgaaaaatggtctctcccgcgatttcaaccccaccgcaactgtgaagatgctgccaaccttcgtgaggtcaatccccgatggatctgagaagggggactttatcgccctggacctcggaggcagcagtttcagaatactaagagtgcaggtgaatcacgagaagaatcagaatgttcacatggagtctgaagtgtacgatacccctgaaaacatcgtgcatgggtccgggagtcagttgtttgatcacgtcgctgagtgcctgggcgacttcatggaaaaaaggaaaattaaagacaaaaaactgcctgtgggtttcactttcagtttcccgtgtcaacagagcaagatagatgaagccattcttatcacctggacaaaacgattcaaagcttccggtgtagagggcgccgacgtggtaaaattactgaataaagcgatcaagaaacgcggagattacgacgctaacatcgtggcggtcgtcaacgacactgtcggaactatgatgacctgtggttatgatgaccagcactgcgaagtgggtctgatcatagggactggcaccaatgcttgctacatggaggaacttagacacattgacctagtcgagggagatgaagggagaatgtgtataaacacagaatggggggctttcggcgatgatggttcccttgaggatatccgcacagaattcgatcgcgaaatcgatagaggctccctgaacccagggaagcagttgtttgagaaaatggttagtgggatgtacctcggcgagctggtgaggcttattctcgtgaaaatggccaaggaaggactgcttttcgagggtcgaataacacccgaactgttgaccagagggaagtttaatacatcagacgtgtcagcgatcgagaagaataaggaaggtctgcataacgctaaggaaattttgacaagactgggggttgaaccgagcgacgatgattgcgtatccgttcagcatgtgtgtacaattgtctcgttccggtcagcaaaccttgtcgccgcgaccctgggagccattctgaatagattgcgtgacaataagggcaccccaagactgcgaacaacagtcggggtggacggttccctatacaaaacccatcctcagtactctcggcggtttcacaagactctgagacgtctcgtgcctgactcagatgtgcgctttttgttaagtgagtccggctctgggaagggggccgccatggttactgcggtcgcctaccggcttgctgagcagcatagacagatcgaggaaactttggcccattttcacctgacgaaagacatgctcctggaggtgaagaaaaggatgcgtgcagaaatggaactcgggttacgaaagcagacccataacaacgcagtcgtgaagatgcttcccagtttcgtgcgccgtacacctgatgggactgagaacggggactttctggccttggacctggggggcactaatttcagagttcttttagtgaagatccgcagcgggaagaaacggacagttgagatgcataataagatttacgctatcccaatcgagattatgcagggaaccggcgaggagctattcgaccacattgtatcatgtatttcagatttcctggactacatgggaatcaaggggcctagaatgccactgggattcactttcagtttcccttgtcagcagacctcacttgatgcgggaattttaattacctggacgaaagggttcaaagcgacagactgcgtgggccacgacgtggtgaccctcctccgagacgccatcaaacgtcgcgaagaatttgacttggatgtggtcgccgtggtcaatgacacagtgggtacgatgatgacctgtgcttacgaggaacctacctgcgaggtgggactgatagttggtactggatctaacgcctgctacatggaggaaatgaaaaacgtggagatggtagagggcgaccagggccagatgtgcatcaacatggaatggggcgcttttggcgacaacggctgcctggacgatatcagaacccactacgaccgactcgtcgatgaatattcactgaacgctggaaaacaacggtacgagaagatgatttcagggatgtatctaggtgaaatcgtacggaacatattaatcgatttcactaagaagggttttttgtttcggggtcagattagcgaaacattaaaaacaagagggatatttgaaacaaagtttctatcccagatcgaaagcgatagacttgcgctgctgcaggtccgggccatcctgcagcaacttggcctgaactccacctgcgatgacagtatactggtcaaaaccgtgtgcggagtggtcagcaggagagcggcacagctatgcggagcagggatggcggccgtcgtggataagatacgcgaaaatcgaggcctcgacagattgaacgtcacagtcggggtcgatggaaccctgtataagctgcacccccatttttctagaatcatgcaccagacagtgaaagaactctcaccaaaatgcaacgtaagcttcctcctgtccgaagatggctccggcaaaggggcagcactgattaccgccgtgggggtccggcttcgcacagaggcctcctcctag

SEQ ID NO: 119812 - DNA, 2718 bp, synthetic construct
  misc_feature 1..2718: note = Description of Artificial Sequence: Synthetic coding sequence
  source 1..2718: mol_type = other DNA
atggccaagcgcgcacttcacgacttcattgataagtatctctatgctatgcgcttaagtgatgagaccctaatagatataatgacacgatttcgcaaagagatgaagaatggccttagcagggacttcaatcccacggccacagtgaagatgctgcccacattcgttcgttcaattcctgatggtagcgagaaaggagattttatagctctagaccttggggggtccagctttcgcattctgcgggtccaagtgaaccacgagaagaatcagaacgtccatatggaatccgaggtgtacgacaccccagaaaacatagttcatggcagtggatcacagttgtttgaccatgtggctgagtgtctgggcgattttatggaaaaacgcaagattaaagacaagaagctgcctgtcggatttacatttagttttccgtgccagcaaagcaagatcgatgaggcaatcctaataacttggaccaaacgtttcaaggcatcaggcgtcgaaggagccgatgttgtaaaactgttaaataaagcaattaaaaaacgaggagattacgatgcaaatatagtcgctgtggttaatgataccgtgggtactatgatgacctgtggatatgatgaccagcactgcgaggtgggtttgattataggtaccggtaccaacgcgtgctatatggaggaactgagacatattgatttggtggagggggacgaaggacgcatgtgcatcaacaccgagtggggagcattcggcgatgacggcagtctcgaagatattcgaacagagtttgaccgcgagattgaccggggcagtctgaatccggggaaacagttattcgaaaagatggtttcaggcatgtacttgggtgagttggtgcgcctgatacttgttaagatggccaaggaaggtctactgttcgaggggagaatcacgccagaattgctcacgaggggtaagtttaatacatcggatgtttctgccattgagaagaacaaagagggactgcataacgctaaagagattctgaccagactgggcgttgaaccttcggatgacgactgtgtctctgtacagcacgtctgcactattgtgtccttcagatcagccaatctggtagcagcgaccttaggagcaatccttaataggctgcgagacaataaaggcacaccaaggctcaggacaactgtgggcgtggacggatcattgtataaaacacatccgcagtactctcgccggtttcacaagacccttcgcagactggttccggattctgacgtgcgctttctcctctcagaaagcggttccggaaaaggagccgcgatggttactgccgtcgcttaccgactggcagagcagcaccgccagatcgaagagacgctcgctcacttccacttgaccaaggacatgctgcttgaagtcaaaaagaggatgcgagccgagatggagctaggcttacggaaacaaacacataacaacgccgtggtcaagatgttgccttcctttgtccggcggacccctgatgggactgaaaatggagacttcttagctctggatctgggcgggacaaacttcagagtgctgctggtcaagatacggtcaggaaagaagaggacagttgaaatgcacaacaaaatttatgcaatccctatcgagatcatgcaggggacgggggaagagctctttgaccacatcgtttcatgtatatccgactttctcgattatatggggattaaagggccccgaatgccattagggtttactttttctttcccgtgccagcagacctcattggacgcaggcatcctgatcacatggacaaaaggctttaaagccactgactgtgtcggccatgacgtggtgacccttctgagagacgcaataaagcggcgagaggagtttgatctggacgtcgttgcagtcgtgaacgacactgtggggactatgatgacttgcgcctatgaggaaccaacttgcgaagtggggcttatcgtggggactggctcaaacgcctgttacatggaggagatgaaaaatgtggagatggtggaaggtgaccaaggacagatgtgtatcaatatggaatggggcgccttcggagataacggatgcctcgacgacatcaggactcactatgaccggctcgtggatgagtactctctgaacgcaggaaaacagcggtatgaaaagatgatctccggcatgtacctcggggagatagtacgcaatattttaatcgacttcaccaaaaaggggttcctctttagaggccagatttccgagacactgaagacacggggcatttttgaaaccaagttcttgtcccagatcgaaagcgacagactcgctctccttcaggtgagggccatccttcaacagctgggactgaatagcacttgtgacgatagcatcctcgtgaaaacggtatgtggggttgtatctcgcagagctgctcagctttgcggcgccggcatggcagccgtggtagacaagattcgtgagaacaggggacttgatcgtttaaatgtgactgtgggcgtggacggtacactgtataagctgcatcctcacttttcccgcattatgcatcagacagtgaaagaactgagcccaaagtgcaatgttagcttcctgttaagtgaggacggctccggcaaaggtgccgctctcatcactgcagtgggcgtgcggctgcggaccgaggccagtagttag

SEQ ID NO: 119813 - DNA, 2766 bp, synthetic construct
  misc_feature 1..2766: note = Description of Artificial Sequence: Synthetic coding sequence
  source 1..2766: mol_type = other DNA
atgggccagatatgccaacgcgagagcgccacggcagccgaaaaacctaaacttcacttgctggcagaatccgagatcgacaaatatctatacgcaatgcgtttgtctgacgaaactcttattgacattatgacacgcttccgcaaggagatgaagaatggacttagcagggatttcaatcccacagcaaccgttaagatgctacctaccttcgtccggtccattccagacggcagcgagaaaggcgattttatagccttagacctaggtgggtcatcatttagaatcctgcgcgtgcaggttaatcacgaaaagaatcagaacgtccacatggaatcagaggtctacgatactcccgagaacatcgtgcatggatctggttctcagctcttcgaccacgtggcagaatgtctgggcgattttatggagaagcggaagatcaaggacaagaagctgcccgtaggtttcacgttctcatttccctgtcagcagtcaaagatcgatgaagctattctcataacctggactaagcggttcaaagcgtccggggtagagggggccgatgttgtgaagctccttaacaaagcaatcaaaaagagaggcgactatgacgcaaacatcgttgccgtggtgaacgatacggtaggaacgatgatgacctgcggatacgacgaccagcactgcgaggttgggctcataattggtacaggcaccaatgcctgctatatggaggaattgcgccacatcgatttagttgaaggcgacgagggcaggatgtgtatcaacacggaatggggcgcgttcggtgatgatgggtcgctggaagatattaggaccgagttcgatagggaaattgaccggggttccctgaatccaggtaaacagctgttcgaaaaaatggtgtccgggatgtacctcggagaactagtccgattaatattggttaagatggcgaaagagggcctgctgttcgaggggcggatcacccctgaactgctgacccgcgggaagttcaacacaagtgacgtcagtgctatcgaaaagaataaagaagggctacacaacgcaaaggaaattctaacacggttgggagtagaaccgtccgacgacgactgtgtgtccgtccagcacgtgtgtaccatcgtctccttccggtctgcgaaccttgtggctgcaaccttgggggcgatccttaaccggctaagggacaacaagggtacccctaggttaagaactaccgtgggagtcgatgggtccttgtacaagactcacccacagtatagccgcaggtttcacaagaccttgcggcgcctggtccccgactcagatgtgaggtttttgctgagtgaatccggcagtggtaaaggtgcagctatggtgaccgctgtagcctaccgactagctgaacaacatcgccagatcgaagaaactctggctcattttcaccttacaaaggatatgctcctggaggtcaagaagaggatgcgagccgaaatggaattagggttacgcaagcaaacccacaacaatgcagtcgtcaagatgcttccctcctttgtgagaagaacccccgatgggacagaaaacggcgatttcttagcactcgatcttggcgggaccaatttccgcgttctgttggtgaaaatcaggtccggcaagaaacgaaccgtcgagatgcacaacaagatttacgctatccctattgaaataatgcagggtactggcgaggagcttttcgaccatatcgtttcatgcatatcagattttcttgactacatgggcattaaaggaccaagaatgcctcttgggttcaccttttcttttccctgtcaacagacatcattggatgcagggatactgatcacctggacaaaaggcttcaaggctactgactgcgtagggcacgatgtggtgaccctgctaagagacgccattaaacgtagagaagagtttgacctggacgtcgtggccgttgtgaacgacacagtgggcaccatgatgacgtgtgcttacgaggagcctacctgcgaggtgggcttgattgtggggacaggatcaaatgcatgttacatggaggaaatgaaaaacgtagagatggtggagggcgatcagggtcagatgtgcattaacatggaatggggagccttcggggataacggctgcctagatgacattcggacacattatgatcgccttgtggatgagtattctctgaacgccggaaagcaaaggtacgagaaaatgattagcggcatgtacctcggcgagatcgtgcgtaacattttaattgatttcacgaagaaagggttcctgttccggggccagatatcagagacactcaaaactcgggggatttttgagaccaaatttctgtcacagatcgagtctgaccgcctggccctgttgcaagtgcgcgctattctgcagcagctggggttgaatagtacatgcgatgactccattcttgtcaagaccgtatgcggggttgtgagccgacgggcagcacagctgtgcggggctggcatggctgcggttgtagacaaaattagagagaataggggactcgataggctcaacgtgactgtgggcgtcgacggaacgctttataagctgcaccctcactttagtagaatcatgcatcaaaccgtcaaagagctttcaccaaaatgtaacgtgtcctttctgttgagcgaagatggcagtggtaaaggagcagcactgatcacagcggtcggcgtgcggttaagaactgaagcctcttcttag

SEQ ID NO: 119814 - DNA, 2748 bp, synthetic construct
  misc_feature 1..2748: note = Description of Artificial Sequence: Synthetic coding sequence
  source 1..2748: mol_type = other DNA
atgatagcggctcagcttctggcatactactttaccgagctgaaagatgatcaagtcaagaaaatcgataaatatctgtatgctatgcgcctctccgatgagactctgatcgacatcatgactagattcaggaaagagatgaagaatgggttaagccgggactttaatcccaccgccaccgtcaaaatgctccctacgtttgtccgtagcatccccgacgggagtgaaaagggggactttattgccctcgacctcggaggatccagttttagaatcctcagagtgcaggtgaatcacgagaaaaatcagaacgtacacatggagagtgaagtttacgatacccctgagaatatcgtccacggttccggaagccagctcttcgaccacgtggccgagtgccttggagattttatggagaaacgcaagatcaaagataaaaagttgccagtgggctttaccttcagcttcccgtgtcagcagagtaagatcgacgaagctatactcatcacatggacaaaaaggtttaaggctagtggggtggagggcgccgatgtagtcaagcttctgaacaaggccatcaagaaacggggggattacgacgcgaacattgtggctgtcgttaacgacaccgtggggactatgatgacctgcgggtatgatgatcagcactgcgaagtcgggctcataatcggcactggaaccaacgcatgctacatggaggagctgcgccatatcgacttagtggagggagatgagggcaggatgtgtataaataccgagtggggggcatttggggacgatggcagtctggaagatattcgcaccgaatttgatcgggaaatagaccgtgggagcctgaaccctggaaagcaactctttgaaaagatggtctcgggcatgtatttgggggaactcgttaggctcatcctcgtcaagatggccaaagaggggttactgtttgaaggacgtatcacacctgaactcctcacgcgcgggaagttcaacacatccgacgtgagtgccatcgagaaaaacaaagaagggctgcacaatgctaaggagattctgacccggctcggagtggaaccatccgacgacgattgtgtgtccgtgcagcacgtgtgcacaatcgtatctttccggtcagctaatttggtggccgccacactgggagctatacttaatcgacttcgagataataaggggacccccaggctccgaactactgtcggcgtagatggttctctgtacaagacgcacccacagtactctcgaagattccacaaaacattaagaagactggtgcccgattcagatgttcgattcctactttctgagagtgggtccgggaaaggggccgctatggtgactgccgttgcatacaggctggctgagcaacacaggcaaattgaggaaactctggcccattttcatctgaccaaagatatgctgctggaagttaagaaaaggatgcgggccgagatggagctcggccttagaaagcaaacgcataacaacgcagtagtgaagatgctccccagcttcgtgcggcgaacaccagacggcaccgagaatggggacttcctcgccctggatctcggcggcactaatttcagggttctgctggttaagatccggtccgggaagaaaagaaccgttgagatgcacaacaaaatttacgccatcccaatcgagataatgcagggtactggagaagaactcttcgatcacatagtctcctgtatcagtgactttttggactacatgggcatcaaggggccgcggatgcccttgggatttacattttcttttccttgccagcaaacaagcctggatgctggcatattgattacttggaccaaaggatttaaagccactgattgcgttggacacgacgtcgtaaccctcttgcgagacgccattaagaggcgcgaagaatttgacttggacgttgtggccgtcgtgaacgatacagtgggcactatgatgacctgcgcctacgaagaaccgacctgtgaagttgggttaatcgttggcacaggaagcaacgcctgttatatggaggagatgaagaatgttgaaatggtcgagggcgaccagggccagatgtgcatcaatatggaatggggcgccttcggcgataatggctgtcttgacgacatccggactcattatgatcgcctcgtggacgagtattccctgaatgcaggtaaacaacgttacgagaaaatgatctccgggatgtacctcggggagatcgtcaggaacattctaatcgatttcacaaagaaaggattcctatttcgtgggcagatcagcgaaacactgaagaccaggggcatctttgagacaaaatttctatcgcagatcgaaagtgaccgcctggccctgctccaggtgcgtgcaatactgcagcagttgggcctgaactcaacgtgcgacgattctatcctggtgaagacagtatgcggggttgtctctcgtagggcagctcagctgtgtggagctggcatggccgcagttgtcgacaagatccgcgagaatagggggctggaccggctcaacgtcaccgtgggcgttgatggaactctgtacaaattgcacccacatttcagccgcattatgcaccagaccgtcaaagagctgtcacccaaatgcaatgtttcttttctgttgtctgaagacggctccggaaaaggtgctgcactgatcactgccgtgggcgtaagactgcggacagaggcttag

SEQ ID NO: 119815 - DNA, 345 bp, synthetic construct
  misc_feature 1..345: note = Description of Artificial Sequence: Synthetic coding sequence
  source 1..345: mol_type = other DNA
atggcgaaaagagccctccacgacttcatagataaatatttgtatgccatgcgactgagcgatgaaacccttatcgacatcatgactcgctttaggaaagaaatgaaaaatggactgtctcgtgattttaatccaaccgccactgttaagatgctccccacattcgtccgatctatacccgacggttctgagaaaggggatttcattgctctggatctgggggggtctagttttcgcatcctgcgagtgcaggtaaatcacgaaaaaaatcagaacgttcacatggagtcagaagtgtatgacacacccgaaaatattgtgcacggctcaggctctcagctttag

SEQ ID NO: 119816 - DNA, 876 bp, synthetic construct
  misc_feature 1..876: note = Description of Artificial Sequence: Synthetic coding sequence
  source 1..876: mol_type = other DNA
atggactgcgagcattccctgtccctcccttgtcgcggtgcagaggcttgggaaatcgggattgataagtatttgtacgccatgaggctgtccgacgagaccctgattgacatcatgactcgattccgcaaagagatgaaaaatggactgtccagggactttaaccctaccgccacggtgaaaatgctgccaacttttgtacgttccattcctgacggctccgagaagggagacttcatagccctcgacctgggtggtagtagttttagaattttaagagttcaggtgaaccacgaaaaaaaccaaaacgtgcatatggagagcgaggtgtacgacacccctgaaaacattgttcacggctccgggtctcagttgtttgatcatgtggcagagtgcctcggcgactttatggaaaagaggaaaattaaggacaagaagctacctgtggggtttactttttcgtttccttgtcagcagagcaagatcgacgaagctatactgattacatggacaaagcgtttcaaggcctcgggagtcgaaggagccgatgtggttaaactgctaaataaagccataaagaaacggggtgactatgacgctaatatagtggcggttgtgaatgacacagtgggtacgatgatgacctgcggatatgacgatcaacactgcgaagtcggactaataataggcacgggcactaatgcttgctatatggaggaacttagacatattgacctcgtggagggggacgaaggacgcatgtgtataaacacagagtggggtgccttcggtgacgatggaagcttagaagacatcaggaccgagttcgacagagagatcgataggggctcactgaacccagggaagcaactttag

SEQ ID NO: 119817 - DNA, 2859 bp, synthetic construct
  misc_feature 1..2859: note = Description of Artificial Sequence: Synthetic coding sequence
  source 1..2859: mol_type = other DNA
atggggcagatctgccagagagagtccaggcagggcctggccatgctccctcgactttttctgaacccctggagacaggtgatcctactcccccagcccccgaaagtgttggggctccaagcaacagcagctgagaagcctaagctccatctgttggccgagagcgaaatcgacaaatacctgtatgctatgcgcttaagtgatgagacattaatcgatatcatgaccaggtttaggaaggagatgaagaacggattaagtagggactttaaccctactgcaactgtgaagatgctgccgacattcgttagaagtataccagacggaagtgagaagggagactttattgccctggatcttggaggaagcagttttcgaattttgcgcgtgcaggtaaaccacgagaaaaaccagaacgttcacatggagtcagaggtgtatgacaccccagagaacatcgtgcacggctccggctcgcagctcttcgatcacgtcgccgaatgcctgggcgactttatggaaaaaaggaaaatcaaagataaaaagcttcccgtgggcttcaccttctctttcccctgtcaacagtcaaagatagatgaggcaatcctgataacatggaccaaaagatttaaggcttccggcgtggaaggcgcagacgtggtgaaactgctcaataaggccattaagaaacggggggattacgacgcgaatatcgtggctgtggtgaatgatacagtagggaccatgatgacttgcgggtatgacgaccagcactgcgaggtggggctgattatcgggacaggcacaaatgcctgctatatggaggaactgcgtcacattgatcttgttgagggtgatgaggggagaatgtgtatcaacaccgagtggggcgctttcggcgatgacggcagcctggaagacatccgcacagagtttgatcgagagatcgatcgtggcagcctgaaccctggaaaacagttattcgagaaaatggtcagcgggatgtatctgggggaacttgttagactgatactcgttaagatggcgaaggagggtttgctgttcgagggacgaatcacccccgaactgttgacccgcggcaagtttaacaccagcgacgtctctgccatcgagaagaacaaggaagggctccacaacgctaaggagattctaacacggctgggtgtggagccgtcagacgatgattgcgtcagcgtgcagcacgtgtgcaccatagtgtccttccgctccgccaacttagtggcagctaccctgggagcgattctgaaccggctgcgcgataataagggcactcctaggctccggactaccgtcggagtggacggctccctgtataagacacacccccaatattcccggaggttccataaaaccctgagaaggctggtacccgattctgacgtgcgtttcttactgagcgagagcgggtccgggaagggtgcggccatggttactgccgtagcttaccgcctggcagaacaacacagacagatcgaggaaacactggctcactttcacttaaccaaagatatgctgctggaggttaaaaaacgcatgagggctgagatggaactaggactgcggaaacaaacacacaataacgctgtcgtgaagatgctgccttcattcgtgaggcggactccggacggaaccgagaacggcgacttcttagccttggacttgggtgggaccaacttccgcgtactacttgtcaaaataaggtcaggcaaaaagcggacagttgagatgcacaataaaatatacgctatccctattgagatcatgcagggtacaggagaagagttattcgatcatatcgtatcttgcatctccgacttcctcgactatatgggtataaaggggccacgcatgcccctgggcttcaccttttcctttccgtgccaacagacttctttagatgccgggattctgatcacctggacaaaggggtttaaggcgactgattgtgtgggccacgatgtcgttaccctcctgcgggacgctataaaaaggcgcgaggagtttgatctggacgtcgttgcggtagtgaacgacaccgtgggcacaatgatgacctgtgcctacgaggagccgacctgcgaggtcggtctcatcgtgggtacaggaagtaatgcttgctacatggaggaaatgaagaatgtggagatggtggaaggtgatcagggtcagatgtgcatcaatatggagtggggagccttcggcgacaacgggtgcctagacgacatccgcacacactatgatcgcctggtcgatgaatacagtcttaacgccggtaaacaacggtacgaaaaaatgatctccgggatgtacctcggtgaaatagttagaaacatcttgatcgacttcaccaagaagggttttctctttcggggccagatcagcgaaaccttgaaaactcgcggtatcttcgagacaaagttcctgtcacagatcgagtccgatcgattagccctcctccaggtcagagccatactacagcagctaggtctgaatagtacctgcgatgatagtatcttggtaaagaccgtgtgtggggtggttagtcgccgggccgcccaactgtgtggtgctgggatggccgccgttgtagataaaatccgggaaaacagaggcctcgacaggctcaatgtgaccgtcggcgttgatggaaccctgtacaagttacacccacactttagccgcataatgcatcagaccgtcaaagagctctccccgaaatgcaacgtgtctttccttctctccgaggacggctctgggaagggtgctgcgttaataaccgctgtgggcgtccggctgcggactgaagctagttcatag

SEQ ID NO: 119818 - DNA, 420 bp, synthetic construct
  misc_feature 1..420: note = Description of Artificial Sequence: Synthetic coding sequence
  source 1..420: mol_type = other DNA
atgggccagatttgtcagcgcgaatctgcaactgctgccgagaagcctaagttacacctgctggccgagtctgagatagacaaatatctgtacgccatgagactttcggacgagacgctgatcgatattatgacccgtttccggaaggaaatgaagaacgggctcagtcgagatttcaatcccaccgcaacggtgaagatgttgccaacgtttgttcgaagcatccctgatggaagtgaaaagggcgacttcatagccttagacctgggagggtcctcctttagaatcttacgtgtgcaggtgaatcatgaaaaaaatcaaaatgtgcacatggagtccgaggtgtatgatacaccagaaaatatcgtacacggaagcgggtcccaactctttgaccatgtggctgagtgcctcggctag

SEQ ID NO: 119819 - DNA, 2754 bp, synthetic construct
  misc_feature 1..2754: note = Description of Artificial Sequence: Synthetic coding sequence
  source 1..2754: mol_type = other DNA
atgatcgccagccaccttcttgcttattttttcactgaactgaatcatgaccaggtccagaaggtggaccagtatttgtaccatatgaggctcagcgatgagaccctattagaaatatcgaagagattccgtaaggagatggaaaaaggtctaggtgccacgacacatccaactgctgctgtgaaaatgcttccaacatttgtccggtcaactccagatggaaccgagcacggcgagtttttggctctcgatttgggcgggactaatttcagggttctgtgggtgaaggtgacggacaatgggctgcagaaagtggagatggagaatcagatctacgctattccagaagacatcatgagaggaagtgggactcagcttttcgaccatatcgccgagtgcctagccaacttcatggataagcttcagattaaagataaaaaactgccactgggctttacatttagcttcccatgccatcaaacaaaactggacgagtcattcctggtctcttggacaaaagggtttaagagtagtggggttgaaggtcgggatgtggtggctctgatcagaaaagccattcagcgtcggggggacttcgatatcgatatcgtggctgtcgtgaatgacacggtggggaccatgatgacatgtggctatgacgaccacaattgtgaaattggactcatcgtgggcaccggcagcaatgcatgctacatggaagaaatgcgccacatcgatatggtcgaaggcgacgaggggcggatgtgtattaatatggagtggggcgcgtttggcgacgacggtagtctgaacgacatacgcactgaattcgatcaggagattgacatgggaagcttaaatccaggcaaacagctcttcgaaaaaatgatttcaggaatgtacatgggcgagctcgttagactcatactggtcaagatggcgaaagaggaactgctgtttgggggaaagctgagcccggagctcctgaacacgggacgcttcgagacaaaggacatttcagacattgagggggagaaagacgggatcagaaaggctcgcgaggtgctcatgcgtttgggactggatcccacccaggaagattgcgtggcaacccatcgcatctgtcagatcgtgagtactagatcggcttccctgtgcgctgctaccctcgccgccgttttgcagaggataaaggaaaataaaggagaagaaaggctgcgctccactattggggttgacggcagcgtctacaagaaacacccccacttcgcaaaacggctccacaagactgtgagaaggctcgtgcctggctgtgatgtgcgatttcttcgtagtgaggacggctcaggcaagggcgcggcgatggtcacagccgtagcttaccggcttgccgaccaacatcgcgcgagacagaagacgttagaacacctgcagctctctcacgatcagctgcttgaggtcaagcgccgcatgaaagttgagatggaacgaggactctctaaggagactcacgcgtcagcaccagtaaagatgcttcccacatacgtttgtgccacacccgacgggaccgaaaaaggagattttttggctctggatttgggagggactaacttccgcgtcctcctagtccgagtccgtaacgggaaatgggggggagtggagatgcataataaaatatatgcaatcccccaagaggtgatgcatggcaccggggatgagttgtttgatcacatagttcaatgtattgcagacttccttgagtacatgggcatgaagggagtgtcactacctctcggctttacattcagtttcccctgtcagcagaattccctcgacgagtctatcttgctcaaatggaccaagggatttaaggctagcggttgtgagggcgaagacgtcgttactctactcaaagaggctatacatcgccgcgaagagttcgacttagatgtggtggccgtggtcaacgacactgttggcaccatgatgacttgtggttttgaggatccacactgcgaagtcggactcatagtaggcaccgggtcaaacgcctgttatatggaagaaatgcgaaatgtagaactggttgagggtgaagagggacggatgtgtgttaatatggaatggggggccttcggggataacggatgcctcgatgacttccgcacggagttcgacgtggctgttgatgaactgtctctcaacccaggtaaacagagatttgaaaaaatgatctccgggatgtacttgggtgagattgtccgtaatatcctcattgactttacgaaaagagggctgcttttccggggaagaatctcggaaagactgaaaaccagaggcatctttgagacaaagttcctgagccaaattgagagtgactgcctcgcattgctacaggtgagagctattctgcagcatcttgggctggagtctacatgtgacgattccattattgtgaaagaagtgtgcacggttgtagcccggagggctgcacagctgtgcggagccggcatggcagcggtggtggacagaattagggagaaccggggattggatgccttgaaggtaactgtcggagttgatggcaccctgtacaaactgcacccccactttgccaaggtgatgcatgaaactgttaaggacctggctccgaaatgcgatgtctcctttttgcaaagcgaagacggcagcggtaagggggctgccctgataactgcggtggcatgcaggatccgcgaggcaggacagaggtag

SEQ ID NO: 119820 - DNA, 2670 bp, synthetic construct
  misc_feature 1..2670: note = Description of Artificial Sequence: Synthetic coding sequence
  source 1..2670: mol_type = other DNA
atgcgcctatccgacgagaccctgttggagatctctaagcgcttccgcaaagagatggaaaaaggcctgggtgctacaacccatccaactgccgccgttaagatgctgcctacattcgtcagaagcactcctgacggcacagagcatggggaattccttgctcttgatctcggagggacaaattttagagtgctttgggtcaaggtaaccgacaatggcctgcagaaggtggaaatggagaaccagatctacgctattcctgaagatatcatgcgtggtagcggcactcagctcttcgatcatattgcagagtgcctcgctaactttatggataaattacagattaaagacaaaaagctgcctctgggtttcacattttccttcccatgccaccagacaaagttggacgaaagctttctggtcagttggacaaagggattcaaatcatcaggcgttgaggggagggacgttgtcgcattgatccgaaaggctatccagcgacgtggcgatttcgatattgatatagtcgccgtagtgaacgacactgtgggtacaatgatgacctgcggctacgatgaccacaactgcgagataggactgattgtgggaactggcagcaatgcctgttacatggaggaaatgcggcatatcgacatggtagaaggagacgaaggacgaatgtgtattaatatggagtggggagccttcggggatgacggatccttgaatgacattcgcacagagtttgaccaggagatcgatatgggcagtctcaatcccggaaaacagctgtttgagaagatgatttctggcatgtacatgggggagttggtacgactcatccttgtaaaaatggcaaaagaagaacttctttttggtggtaaactcagccctgagcttctaaataccgggcggttcgagaccaaggatatctctgacattgaaggcgaaaaagacggaattaggaaggctcgagaagtgctcatgaggctgggcctggatcccactcaggaggattgtgtagccacacaccggatttgccaaattgtgtcaacgaggtccgccagtctctgtgctgcgacattggctgcggttctgcagagaattaaggaaaataagggggaggagaggctgagaagtacgatcggagttgatgggtccgtctacaaaaagcatcctcattttgctaaacgactccataagactgtacgcaggctggtgccaggttgcgacgtgcgatttttgagatctgaggatgggagcggcaaaggagccgcgatggtaacagcagtcgcctaccggctggcagaccagcatcgcgctcgccagaaaacactcgagcacctgcagctgtcccatgaccagctgctggaagttaagcggcgaatgaaggtggagatggaaagaggcctgtcgaaagagacccatgcctcagcgccagtgaaaatgctgccaacctacgtgtgtgcaactcctgacggcaccgagaagggagactttttagcactcgacctcgggggcaccaatttccgcgtgctgttggtgcgcgtgaggaatgggaagtggggcggcgtcgagatgcataacaaaatatacgcgattccgcaggaagtgatgcacggaacgggagacgaactgtttgaccacatcgtgcagtgtatagctgatttcttggaatatatgggcatgaagggggtgtcgcttcctctaggcttcaccttcagctttccttgtcaacagaattctctggatgagagtattctcttgaaatggactaagggcttcaaggcctctggatgcgagggcgaagacgtcgttactctgctgaaagaagccattcacaggcgcgaggagttcgacctagatgttgtggcagtagtgaatgacactgttggcactatgatgacatgtggtttcgaagacccacactgcgaggtaggtctgatcgtcggcaccgggtcaaacgcctgctatatggaggagatgcgcaacgttgaactggtggagggcgaggagggccgaatgtgcgtgaatatggagtggggtgccttcggagataacggttgtctcgatgacttccgcactgagtttgatgtcgctgtggatgaattgtctctaaacccaggcaaacaacggtttgaaaagatgatttccggaatgtatctgggagagatcgttcgcaatattcttatcgattttaccaagagagggctactgttccgcgggaggatttctgagagactcaaaacccgagggatttttgagacaaaattcctgtctcagatcgagagtgattgcctggcactgttgcaggtccgagccattctacagcacttgggcctggagtccacttgtgatgactctatcatagtgaaagaggtttgtactgttgtggcgcgccgcgccgcacagctgtgcggcgcaggaatggcggccgtcgtcgaccgcatccgtgagaatcggggcctggatgcactgaaggttacggtcggcgtggacggcaccctgtacaaactccacccccattttgctaaagtgatgcacgagactgtaaaggacctagcgcctaagtgcgacgtatcttttctccagtccgaagacggatccggtaagggggctgctctcatcactgcagtagcctgccgtattagggaggcaggccagagatag

SEQ ID NO: 119821 - DNA, 2754 bp, synthetic construct
  misc_feature 1..2754: note = Description of Artificial Sequence: Synthetic coding sequence
  source 1..2754: mol_type = other DNA
atgattgcaagccacttgcttgcctacttctttaccgagctgaaccatgaccaagtccaaaaagtggaccagtacttatatcatatgagactcagcgatgagacgctgcttgaaataagcaaacggtttcgaaaggagatggagaagggcctaggggcaacaacccaccctaccgctgctgtgaaaatgcttcccacttttgtgcgctctacccccgacgggacagagcatggtgagttccttgcgctcgatcttggcggaaccaacttcagggtgttatgggttaaagtgaccgataacgggctgcagaaagtagagatggagaaccaaatatacgccatccccgaagatataatgcgcggatccggcacccagctcttcgaccacatcgccgagtgcctggcaaacttcatggataagttgcagattaaagataagaagctgccactggggtttacattctccttcccctgccatcagaccaagttggatgagagtttcctggtgtcatggacaaaagggttcaaaagcagtggcgtggaggggagggatgtggtcgccctgatcaggaaggccatccaacgcaggggtgatttcgatatagatatagtggcagttgtgaatgatactgtgggtaccatgatgacgtgcggctacgatgatcacaactgtgagatcggactgattgtaggtacaggtagcaatgcttgctacatggaggagatgcgccatatcgacatggtcgaaggagatgaagggcgcatgtgtatcaatatggagtggggcgcttttggcgacgacggttctttgaacgacattaggactgaattcgaccaagaaatcgatatgggtagcctgaatccagggaagcaactgtttgaaaaaatgatttccggcatgtatatgggtgaactcgttcggctgatcctcgtcaagatggccaaagaggaactgctgtttggcggaaagttaagtcctgagttactgaacaccggccggttcgaaacaaaagacatctctgatatagagggggagaaggacggcattcgaaaggcccgagaagtgctcatgagactcggtttggatcctactcaggaggactgtgtcgcgacgcatagaatttgtcaaattgtgtccactcgctctgcttcgctgtgtgccgccactctcgctgccgtcctgcaacggataaaggagaataagggagaggaaaggctacggtccactataggtgtggatggctccgtctataagaagcatccccactttgcaaagcgattgcataagaccgtgcgccgcctggtgccgggttgtgatgtacgttttttgaggtcagaggacggctcaggtaaaggtgcggctatggtgaccgctgtcgcctataggctagccgaccaacacagagcgcgccaaaaaacgctggagcacctgcagctgagtcacgaccagctgctggaagtcaagcggcgcatgaaagtggagatggagaggggcttgagcaaagaaactcacgcctccgcccccgtcaagatgctgcctacctatgtctgtgctacaccagacggaaccgagaagggggatttcctcgcccttgacctgggtggaacgaacttccgtgtgctcctggtgcgagtccgaaacggtaagtggggaggggtggaaatgcataacaaaatatacgcaatcccccaggaagtgatgcacggtaccggcgatgagctgttcgaccatattgtccagtgcatcgcagatttcctagagtatatgggcatgaagggagtcagtctgcctctgggatttacgtttagtttcccctgccagcagaactcactcgatgaatctatcttattgaaatggaccaaaggattcaaggctagtgggtgtgaaggagaggatgttgtgaccctccttaaagaggcaatccaccgaagagaggaattcgacttggatgtggtggccgttgtgaacgataccgtgggaaccatgatgacctgtggattcgaggacccccactgcgaggtgggacttattgttggtactggatctaacgcctgctacatggaggaaatgcgaaatgttgagttagttgaaggcgaagaaggtaggatgtgcgtgaatatggagtggggagcgttcggtgacaatgggtgtctggatgacttccgtacggagtttgatgtggccgtggacgagctctcactgaaccctggaaaacagcgatttgaaaagatgattagcggtatgtacttgggcgagattgttaggaacattttgattgatttcacgaaaaggggacttcttttccgcggccggatcagcgagcgattgaaaactcggggcatcttcgaaacaaagtttctctcgcagattgagtccgattgcctcgcccttctgcaagtgagggcgatcctccaacaccttggactcgagagtacctgcgacgactcaattatcgtcaaagaggtatgcaccgtggtagcaagaagggccgcccagttgtgcggggctggcatggccgccgtcgttgacaggatccgggagaatcgcgggttggacgctctgaaggtgacagtgggggtggatggaaccctgtataagctgcaccctcattttgccaaggtgatgcacgaaaccgtgaaagatctggcccctaagtgcgatgtgtccttcttgcagtctgaagatggttccgggaagggagcagcgttaattactgctgtcgcctgcagaatacgcgaggccggacagcggtag

SEQ ID NO: 119822 - DNA, 2772 bp, synthetic construct
  misc_feature 1..2772: note = Description of Artificial Sequence: Synthetic coding sequence
  source 1..2772: mol_type = other DNA
atggactccattggaagctccggacttaggcagggggaagagacactgtcctgctcggaagaaggtttgcccggccccagcgattcctctgagctggtgcaggaatgcctccagcagttcaaggtgacacgggctcaattgcagcagattcaggcttcactgctgggaagcatggagcaagccttaagaggacaggcttcgccggcccctgccgttcgcatgctacccacgtacgttggaagcaccccacacgggaccgagcaaggggattttgtcgtgttagagctcggcgctacaggagccagcctgcgggtcctgtgggtgacgcttacagggatcgaggggcatcgcgtcgagcctaggtcccaggaattcgtaatcccccaggaggtaatgctcggcgcgggccaacagctgttcgatttcgccgcccattgtttgtctgaattcctagacgcccagccagtcaacaaacagggtcttcagctcgggttctcttttagttttccatgtcaccagacagggttggacagatcgaccctgatctcatggactaaagggttccggtgtagtggcgtggaagggcaggatgtggttcaactgctcagagatgccattcggcgccagggggcttacaatatcgacgtggtcgcagtcgttaatgataccgtcgggacaatgatgggctgtgagcccggggtgaggccctgtgaggtaggacttgtggtggatacaggtacgaacgcatgctacatggaggaagctcgccacgttgcagtcctggacgaggaccgggggagggtgtgtgtgtccgtggagtggggatcctttagcgacgatggggcactgggccctgtcctgaccacttttgaccacactctcgaccacgaaagcctcaaccctggagctcagagattcgaaaagatgatcggtggactgtatttgggagaattggtgcgcctggtgttggctcatctcgccagatgtggcgtcctcttcggaggctgcactagccctgcactcctgtctcagggctctatactgctcgagcacgtggccgagatggaagatccttccacaggagccgctagagtccacgcaattctacaggaccttggtctatcccctggcgcttccgacgttgaattagtacaacatgtatgtgctgctgtgtgcacccgcgccgcacagctgtgtgccgctgctcttgctgctgtcctcagttgtcttcagcactcccgagaacagcagacactccaggtggccgtagccacaggtggtcgtgtttgcgaacgccaccctcgcttttgttctgtgctacaaggcaccgtgatgctgctggccccagagtgtgacgtgagtcttataccgtcggtggacggcgggggcaggggagttgccatggtgaccgccgtagctgctaggctggcagcccaccggagactcctcgaggagaccttagcccccttccgcttgaaccacgaccagctggccgctgtgcaggcccagatgagaaaagccatggccaagggcctgcggggcgaggcctctagtttacgcatgctgcctaccttcgttagagctacacccgacggaagcgagcggggtgatttcttggccctcgacctgggcggaacaaacttccgggtgttgctggtgagagtaaccaccggggtgcagatcacctcagagatatatagcatccccgagacggtggcgcaggggagcggccagcagttgtttgatcacatagtcgactgtatcgtggactttcagcagaagcagggactcagcggtcaatccctgcctttaggcttcaccttttcgtttccctgccgccagctgggccttgatcaagggatcctcttgaactggaccaagggattcaaggcctcagactgtgagggacaggacgttgtttccttgctacgcgaagctattaccaggagacaggcagtcgagctgaacgtcgttgccatcgtgaatgatactgtgggaaccatgatgtcctgcggctatgaggacccaagatgcgaaataggcctcattgttggtacggggactaacgcgtgctacatggaggaactcagaaacgttgccggagttccaggggattctggacgtatgtgtattaacatggaatggggggcatttggcgacgatgggtctctggctatgctgtcgactagatttgatgcgtcggttgatcaggcatctatcaaccccggaaagcagcgatttgagaagatgatctcagggatgtatctcggcgaaatagttcggcatattctgttgcacctgacgtctctcggcgtgctcttcagaggccagcaaatccaaagactccagactcgggatatcttcaagaccaagtttctttccgaaattgagtccgactctttagctcttaggcaagttcgggccatcctggaagatctcgggctgcctctgactagcgacgacgcccttatggtgttagaagtgtgccaggccgtctctcagcgtgctgcccagctctgcggtgctggagttgccgccgtggtcgaaaaaataagggagaacagggggttggaagagcttgccgtttccgtgggggtcgatggcaccttgtataaactccatcctcggttcagcagtctagtggcagccaccgtgagggagctcgcgccacgctgcgtcgtgaccttcctacagtcagaagacggtagtggaaagggcgccgcattggtgaccgccgtcgcctgccgtctcgcccagcttacaagagtctag

SEQ ID NO: 119823 - DNA, 1590 bp, synthetic construct
  misc_feature 1..1590: note = Description of Artificial Sequence: Synthetic coding sequence
  source 1..1590: mol_type = other DNA
atgacttctagtaggctctggttttcactcctactggctgccgcctttgcgggcagagccactgcgctgtggccctggccacagaatttccagactagcgaccaacgctatgttctgtatcccaacaactttcaatttcagtatgacgtcagcagcgcggcccaacccggctgcagcgtgctggatgaagccttccagcggtaccgggatttgttgtttggttcaggttcctggcctagaccctatctgaccggtaagaggcacacactggaaaagaatgttctggttgttagcgtagtgaccccaggttgtaatcagctgccaaccttggaatccgttgaaaattatacccttactatcaacgacgatcaatgccttctgttgtcagaaacagtctggggcgccctcaggggattagaaactttctctcaactcgtatggaaatcggccgagggcacctttttcatcaataaaacagaaattgaggattttccgcgcttcccccacagaggactgctgctggatacgtccagacactatctgcctctgtcctcaatattagataccctcgacgtaatggcttataacaaactgaacgtgttccattggcatttagtggacgacccatcatttccatacgagtcgttcacatttcccgagcttatgaggaagggaagttacaatccagtaacacacatctacacggctcaggatgtgaaggaagttattgaatatgcgaggctgaggggaatccgagtactggctgaatttgacaccccaggccacacactgagctggggtcctggcatacccgggttactgactccatgttattccggctctgaaccttccgggaccttcggaccagttaacccttcccttaataatacttacgagtttatgagtacatttttcttggaggtatccagcgtctttcccgacttctatctgcacctgggaggagatgaagtagactttacatgctggaagagcaaccccgagatccaggacttcatgagaaaaaaagggtttggtgaggacttcaaacagctggaatccttctacatacagactctcctggacattgtgagcagctatgggaagggatacgttgtctggcaggaggtatttgacaataaggtgaagatacagccggacacaattatacaggtttggcgggaggatatccccgtgaactacatgaaagaattggaactggtcaccaaggctggcttccgtgccctgctgtccgcaccttggtacctcaaccgcatatcttacgggcctgattggaaagatttctacatcgttgagcctctggcattcgagggcaccccagagcagaaagcccttgttatcggtggtgaggcctgtatgtggggcgagtatgtggacaatacgaacctcgtgccgaggctttggccacgggccggagctgtcgctgaaagactgtggagcaataagcttacctccgatctgacctttgcatacgaacggctttcccattttcggtgcgagctcctgcgtaggggtgtccaggcacagccgctcaacgtaggcttttgcgagcaagagtttgaacagacttag

SEQ ID NO: 119824 - DNA, 906 bp, synthetic construct
  misc_feature 1..906: note = Description of Artificial Sequence: Synthetic coding sequence
  source 1..906: mol_type = other DNA
atgatgacgtctgtctacagcagtttaagactctcaggagaactgagcgaagacgtcatggcatacaataagctcaacgtattccattggcatcttgtggatgatccaagtttcccctatgagtcttttacctttcctgagttaatgcgcaaaggctcttacaatcccgtgacccacatctataccgcacaggacgtgaaggaggtgattgagtatgcacgcctgaggggaatccgcgttcttgcagagttcgataccccaggccataccctgagttggggtccgggtatccccggtctgctgaccccctgttacagcggcagtgagccttccggcacatttgggcccgttaatccttccctaaacaacacctacgaattcatgtcaacattttttttggaggtgtcaagcgtcttccctgatttttacctacacctgggcggggatgaggtcgatttcacatgctggaagtctaatcctgagatacaggactttatgagaaaaaaaggattcggcgaagattttaaacagcttgaatcgttttatatccagacattactcgatatcgtgagttcttatggcaagggatatgtggtctggcaagaggtgttcgacaataaagtcaaaatccagcctgatactatcatccaagtgtggcgagaggacattccggtgaactacatgaaagagctggaactggtgacgaaagccggcttccgcgcactgctgtccgccccttggtacctgaacagaatttcctatggaccggattggaaagacttttacatcgtcgagcccctggcctttgagggaactccagaacagaaagccctggtaattgggggcgaggcttgcatgtggggtgaatacgtggataatactaatcttgtgcccagactatggtag

SEQ ID NO: 119825 - DNA, 507 bp, synthetic construct
  misc_feature 1..507: note = Description of Artificial Sequence: Synthetic coding sequence
  source 1..507: mol_type = other DNA
atggcctacaacaagcttaacgtttttcattggcacctcgttgatgatccaagtttcccttacgagtcatttaccttccctgagctcatgcggaagggttcgtacaacccagtgacacatatttatacagcacaagacgttaaggaggtgatcgaatatgcccgcctccgagggatcagggtcctagctgaattcgataccccaggacatacactatcctggggaccaggaatcccaggcctcctcactccctgctattctggctcagagccttcagggaccttcggacctgtcaatccctcactgaacaatacgtacgagttcatgagcacgttttttttggaagtgtcttcagtgttccccgacttctacttacaccttgggggagatgaggtcgacttcacttgttggaaaagtaacccagaaattcaagattttatgcgtaaaaaaggctttggggaagacttcaaacagctggaaagcttctacattcagacctatccttag

SEQ ID NO: 119826 - DNA, 1671 bp, synthetic construct
  misc_feature 1..1671: note = Description of Artificial Sequence: Synthetic coding sequence
  source 1..1671: mol_type = other DNA
atggagctctgcgggctcggcctccctaggccaccaatgttgctggcactactgctcgccactctgttagcggcgatgcttgctctgctgacacaagtggccctggtggtccaggtggccgaggccgcccgcgcgccaagcgtgtcagctaaacccggccctgccctgtggcctctgccactactcgttaaaatgacacccaacctgctgcacctggccccggagaatttttatatttcccactccccaaatagtaccgcaggcccgagctgtaccctgctagaagaggccttcagaagatatcacggctatattttcggattctacaagtggcaccacgagccagctgagttccaggccaagacacaggtccaacagctgttagtgagcattacactgcagagcgagtgtgatgcattccctaatatatcaagtgacgagtcctacactctgctggtcaaagagccggttgctgtgcttaaggctaatcgtgtgtggggagctctacgcggtctagaaacattctcccaactggtgtaccaggactcctatgggaccttcacaattaacgaaagcacaatcatcgattcaccccggttctctcaccgcggaatacttatcgatacctccaggcattatctccctgtgaagattatcttaaaaactctggacgccatggccttcaacaagttcaacgtcctgcactggcacattgtggacgatcaaagtttcccatatcaatcaatcacgtttccagagctgagcaacaaggggagctactccctcagccacgtttacacccctaacgatgtcaggatggtgatcgaatacgcgagactgcgagggataagggtcctcccagagtttgacacccccgggcacactctatcttggggaaagggccagaaagacctgctcaccccgtgttacagcaggcaaaacaagctcgacagtttcggacctataaaccctacattgaataccacgtacagctttctgacaaccttttttaaggagataagcgaggtcttcccggatcagtttatccatttaggtggagatgaagtggaatttaagtgctgggagagcaaccccaaaatccaggattttatgcgccaaaaaggattcggcacagacttcaaaaaattggagagcttttacatccagaaggtgctcgacataattgcaacaattaataaaggctccatagtctggcaggaggtcttcgacgacaaggccaagctcgcccccgggaccatagtcgaggtatggaaagactctgcgtaccctgaggagctctcacgggtcacagccagtggatttcccgtgatcttgtccgctccgtggtacttagatcttatcagttatggccaggactggaggaaatactataaagtggaacctctggatttcggtggcactcagaagcaaaagcagttgtttattggcggagaggcctgtctgtggggggaatacgtggatgctacgaacctgaccccccgtctctggccgagagcctccgctgtgggcgagcgattatggtcttctaaagacgtgcgtgatatggatgatgcctacgatcgccttaccaggcacagatgtcggatggtcgagcgcggcatcgccgcccaaccgttatatgcagggtattgcaatcatgaaaatatgtag

SEQ ID NO: 119827 - DNA, 996 bp, synthetic construct
  misc_feature 1..996: note = Description of Artificial Sequence: Synthetic coding sequence
  source 1..996: mol_type = other DNA
atggcatttaataagtttaacgttctgcattggcatatagttgacgaccaaagtttcccttaccagagcattacttttccggaactgtccaacaagggctcatatagtctcagccacgtctacactcccaatgacgtgagaatggtcatagaatacgccagactgcgggggattagagtgctgcccgagttcgacactcccggccacaccctctcgtggggaaagggacagaaagatctactgaccccctgttatagtcgacagaataaattagattccttcgggcccataaaccccactctgaacacaacgtacagtttcttaactacattctttaaagagatttccgaggttttcccagatcaattcattcatctgggcggagacgaggtcgaatttaagtgctgggaaagcaaccctaagatacaggactttatgcgacagaaaggctttggcactgacttcaaaaaactggaatccttttatatccagaaagtcctggacatcatcgctacgataaataaaggatcaattgtttggcaggaggtattcgatgataaagcaaagcttgccccagggactatcgttgaagtttggaaggacagcgcctaccccgaagagttgagcagagtaaccgcttcaggattccccgttattctgagcgccccgtggtacctcgacctgatctcctacggacaggactggcgaaaatactacaaggtggaacccctggactttggcgggactcagaagcaaaagcaactgttcatcggcggagaggcctgtctgtggggtgagtacgtggacgctaccaacctgactcccaggctatggccaagagcctctgctgtgggggaacgattgtggagctcaaaagatgtgagggatatggacgatgcgtacgacagactgacaaggcaccgctgcaggatggtggagagagggattgcagcccagcccctgtatgcaggatattgtaaccacgagaacatgtag

SEQ ID NO: 119828 - DNA, 2376 bp, synthetic construct
  misc_feature 1..2376: note = Description of Artificial Sequence: Synthetic coding sequence
  source 1..2376: mol_type = other DNA
atgtggaacatgctgattgtcgcaatgtgtctcgctttactgggctgcctgcaggcccaagaactccaggggcacgtgagcattatcctgcttggagcaacaggcgacctggcgaaaaagtatttgtggcaaggcttgtttcagttatatctggacgaagccggcagggggcactctttttctttccacggtgctgccctgaccgcgcctaaacagggacaggagctgatggctaaggcactggagtcactgtcctgccctaaggacatggccccttcgcactgcgccgagcacaaagaccagttcctgcagctgagtcagtaccggcaactgaagaccgcagaagattatcaggccttaaacaaggatatcgaggcccagctgcagcacgcggggttaagagaagccggccggatcttttatttttcggtgcctcctttcgcgtatgaggacatcgcaagaaacatcaatagctcctgccggccaggcccaggagcttggcttagggtcgtcctggagaaaccttttggccacgatcacttctctgcccaacaacttgctaccgaactgggaactttctttcaagaagaagagatgtatcgggtcgaccattatctgggcaaacaggccgtggcccagattctcccttttcgcgaccagaatcgaaaggccttagatggactgtggaatagacaccatgtggaaagagtggagatcatcatgaaagaaacggtcgatgccgagggaaggacaagtttctatgaggaatacggcgtgattcgagatgtgctccagaaccatctaacagaagtactgacgctggtggccatggagctgccccacaatgtgtcctccgcagaagctgtgctgcgccacaaactgcaggtgttccaggcgctgcgggggttgcagcgaggctccgccgtcgtgggccagtaccaatcatactccgagcaagtgagacgggagctccaaaaaccagattccttccattccctgactccaacgtttgccgcagtgctcgtgcacatcgacaatcttcgctgggagggggtccctttcatcctgatgagtggtaaggccctggacgagcgggtgggttatgccagaatcctattcaagaaccaggcctgttgtgtgcagtccgaaaagcattgggcagccgcccaaagtcagtgcctccctcgccagctcgtgttccacataggccacggcgacctgggttcccccgctgttttagtgtctcgcaacctcttccgtccgtcactgcccagctcttggaaggaaatggagggaccacctgggctccgtctctttggctccccactcagcgactactacgcctatagccccgtaagagagagagatgctcatagcgtccttctgtctcacatctttcacggccgaaagaacttctttatcacaaccgagaaccttctcgcctcctggaacttttggaccccccttctggaatccctagcccacaaggcaccccgactgtacccgggaggagcagaaaatggacggctactggactttgagtttagcagcggccgcctgtttttttcgcagcagcaacccgagcagctggtgcctgggccgggaccagcacctatgccttcggacttccaggtactgcgagctaaataccgggagagtcccctggtgtccgcatggtccgaggagttgatcagcaaattagccaatgatatcgaggctactgccgtgcgggccgtaaggcgattcgggcagtttcacctggccctatctggggggagttctccagtggctcttttccagcagctcgccaccgcccactacggtttcccatgggcccacactcacctgtggctggtggatgaaaggtgtgtgccactgagcgatcctgaaagcaatttccagggcttgcaagcacacctactccagcatgtgcggattccttactacaacatccaccccatgccagttcatctccagcaacgtctgtgcgcagaggaggatcagggggcccagatctacgccagagagatctccgcactggtcgccaactctagctttgacctggtgctgcttggcatgggagccgatggccacaccgcctcactgtttcctcaaagccccactggcctagatggagagcaactcgtcgtcttgacaacctccccaagccaacctcacagacgcatgagtctgtctctcccgctgatcaacagagccaagaaggttgctgttctggttatggggcgcatgaaaagagaaatcacaacactggttagtagagtgggtcacgagccgaagaaatggcctattagcggcgtgctaccccacagcggtcagctggtctggtatatggactatgatgcttttctgggctag

SEQ ID NO: 119829 - DNA, 1968 bp, synthetic construct
  misc_feature 1..1968: note = Description of Artificial Sequence: Synthetic coding sequence
  source 1..1968: mol_type = other DNA
atgggcagatgggcctgggtccccagcccatggccccctcccgggttaggtccttttctccttctactgttgctactcttgctcctcccacgagggtttcaacctcagcccggcggcaatagaaccgaatctcctgagcccaacgcgacagcgaccccggccatacccacgattctagtcacaagcgttacatccgagacccccgcaaccagcgcccccgaggccgagggtcctcagagcggcggcctccccccaccgcccagagcagttcctagcagttcgtccccacaggcgcaggcactgacagaagatggtcggccatgccggttcccattccggtacggagggcggatgctacacgcgtgtaccagcgaaggctccgctcatcgtaagtggtgtgcgaccactcataactatgatcgcgatcgcgcatgggggtattgtgtcgaggcaactcccccgcccggcggcccagccgcacttgacccctgcgcctctgggccatgtcttaatggagggtcttgctcaaatacacaggatccccagagctatcattgctcttgccctagggcgtttactgggaaagactgtggcaccgagaaatgcttcgacgagaccaggtacgagtatttggaaggtggcgaccgctgggcacgcgtgcgccaaggacacgtagagcagtgcgagtgttttggcggtcgtacctggtgcgagggaaccagacatacagcctgtctctcatcgccttgcctgaatggtggcacctgccacctgatcgtcgctacaggaacaacggtgtgtgcatgtccacctgggttcgctggtcgactctgtaacattgagccagacgaacgctgctttttgggaaatggaacaggatatagaggagttgcgtcgactagtgccagcggcctgtcttgtctggcctggaattcagatctgttgtatcaggagctgcatgtcgactctgtaggcgccgctgccttgctggggctggggccacatgcttattgtcgcaacccagacaacgatgagagaccttggtgttatgttgtgaaagacagtgcactgagttgggagtactgccggttggaggcctgcgagagcctgacaagggtgcagctctctcccgacttgctggccactctgccagaacccgctagtcctggcagacaggcctgcgggcggcggcacaagaagcgcacctttctgagaccccgaatcatcggcggaagcagctcccttcccggctcccacccctggctggccgcaatctacatcggggattctttttgcgcgggaagtctggtacatacatgctgggttgttagtgccgcccactgcttttcccactcccctccaagagattccgtgtctgtcgtattggggcaacatttcttcaatcgaaccacagacgtgacacagacattcggcattgagaaatatattccttatactctctattccgtctttaatccaagtgatcacgatctggtgttgatccgcctgaaaaaaaaaggcgaccggtgtgcaactaggagccaattcgttcagcccatatgtttgcccgaaccagggtctacatttcctgcggggcacaaatgtcaaattgcaggatggggacacctcgatgaaaacgtgagcggatacagtagcagtctccgcgaagccctagttcctttggttgccgatcacaaatgcagcagtcccgaagtgtacggagcggacataagcccaaacatgttgtgcgccggatacttcgattgcaaaagcgacgcctgccagggtgatagtggtggaccactggcatgcgagaaaaatggcgtggcctatctgtacggcattatctcttggggcgatgggtgtgggaggctccataagcccggagtttataccagggtcgctaactatgttgactggatcaacgatcggattagacccccgaggcggctcgtagccccaagctag

SEQ ID NO: 119830 - DNA, 3807 bp, synthetic construct
  misc_feature 1..3807: note = Description of Artificial Sequence: Synthetic coding sequence
  source 1..3807: mol_type = other DNA
atgtcttccgtagccgtgcttacccaggaatctttcgctgaacatcgcagcgggctcgttccacaacagattaaggtggcaaccctcaactccgaagaagaaagtgaccctcctacatataaagatgccttccctccgttgcccgaaaaggcagcctgtctggagtctgctcaggaaccttctggcgcctggggaaacaaaatccgcccgataaaggcgtcagttattacccaggtttttcatgtccctcttgaggagaggaagtataaggatatgaatcagttcggggagggggaacaagctaagatctgccttgaaattatgcaaaggacaggcgctcacctcgagctttctctggccaaggaccagggcctgtccattatggtgagcgggaagttggacgccgtgatgaaagcacgaaaggacatcgttgcccgccttcaaacccaggcatcagcgacagtcgcaattccaaaagagcatcatagatttgtaatcggtaagaacggggagaaactgcaggacctggagttgaaaacagccacaaagatccagatcccacgtcccgacgatccttctaatcaaattaaaatcaccggaacaaaggagggcatagagaaagctcggcacgaggtactgctgatttctgctgagcaggacaaacgcgccgtagagcggttagaggtggaaaaggcttttcacccttttattgcagggccttacaaccgcttagtgggcgagatcatgcaggagaccgggacccgcattaacatcccaccccctagtgtgaatcgcacagaaatagttttcaccggtgagaaagagcagctcgcacaggccgtggccaggataaaaaaaatctacgaagagaaaaaaaaaaagaccactaccatcgcagtggaagtaaagaagtcccagcataagtacgtgattggacctaagggtaattctctgcaggagatacttgaacgaaccggggtgtctgtagaaattccccctagcgacagcatttctgaaaccgtcattttgcgaggcgaaccagagaagttgggccaggctctgacagaggtatacgctaaggctaattcattcactgtttctagtgtggcagcaccgtcttggttgcataggttcattatcgggaaaaaaggccagaacctcgccaagatcacacagcagatgccaaaagtacatatagagttcacagagggtgaagacaaaatcacactggagggccctaccgaggatgtgaacgtcgcccaagaacagattgaagggatggttaaggaccttatcaaccgtatggattacgttgagatcaacatcgatcataaattccaccgccaccttatcgggaagagtggagccaacattaatagaattaaggatcaatataaggtttccgtgcgcatccctcccgattctgagaagagtaatttgattcgtatcgaaggggacccccaaggagtccagcaggccaagcgcgagctcctagagctagcctcccgcatggagaatgagcgaacgaaggacctgattattgaacagcggtttcatcgcacaataataggtcagaagggagaaagaatccgggagatccgtgacaagtttcccgaagtgatcattaacttcccggatcccgcccagaaatccgacatagtccagctccgggggcctaagaatgaggtcgaaaaatgtaccaagtatatgcagaaaatggtcgccgatctggtagagaactcttactccatcagcgtcccaatctttaagcagttccacaagaatatcatcggaaaaggtggggctaatataaagaagatcagagaagaatctaacaccaagatcgacctgcccgcggagaactcaaatagcgaaactatcatcattaccgggaaaagagccaactgtgaagcagccaggtcccgcatcctgtctattcagaaggatctcgcgaatatcgcagaggtcgaggtgagcataccagctaaactccataacagcctcattggaacaaaaggccgcctgattagaagcataatggaagagtgcggcggtgtacacatccattttccagtggaaggttcaggcagcgacacagtggttatccgaggcccctcatccgacgtggagaaggccaagaagcagctgctccatctggctgaggagaaacagaccaagagtttcacggtcgatatcagagctaagcctgaatatcacaagtttttgatagggaaaggcgggggaaaaatcagaaaagtgagggactcaaccggtgctagggtcattttccctgccgcagaagacaaggatcaagacctaataactattatcgggaaggaagatgccgtgagggaagctcagaaggagctcgaagccctgatacagaacctcgataatgtcgtagaggactccatgctcgtcgatcccaaacaccaccgccatttcgtaattcggagaggtcaggtgctgcgcgaaatcgccgaagagtacggaggcgttatggtgagttttccgcggagcggcacacagtccgacaaagttacgctgaagggagctaaagactgcgtggaagccgctaagaagcgaatacaggaaatcattgaggatctggaggcacaggtgactctggaatgcgcaatcccccagaagtttcaccggtctgtaatggggcccaagggatctaggattcagcagatcacgagggattttagtgttcagatcaagttccctgaccgcgaagagaacgctgtccatagcactgagccggtggttcaagagaacggcgatgaggccggcgaaggaagggaggctaaagactgtgatcctggctccccacgccgctgcgacattatcattatctccgggaggaaggagaagtgtgaggccgccaaggaggccctggaagcccttgttccagtcactatagaggtggaggtcccatttgacttgcatcgatatgtaattggacaaaagggaagtggaatcaggaagatgatggatgagttcgaagtcaacatccacgttccggctccagaattacagtcagatattattgccattaccgggctggctgctaatctggaccgcgctaaagcaggattgcttgaacgggtgaaggagttacaggccgagcaagaagaccgtgctcttcgctcctttaagctctccgtgaccgtagaccccaagtatcatccaaaaatcatcggacgtaagggagccgtcataacccagatccgactggaacacgacgtgaatatccagttcccagataaggatgatggaaaccagcctcaagatcagatcactatcacgggatatgagaagaacaccgaggccgcccgtgacgccatactgcgcatcgtgggcgagctcgagcaaatggttagcgaggacgtaccactggaccaccgagtacatgcccgcatcattggagcccgggggaaggcgatccgcaaaattatggacgagtttaaggtagatatccgctttcctcagtcaggcgcgccagatccaaattgcgttactgtcaccggactccctgagaacgtcgaagaggccattgaccacatcctgaatttagaggaagaatatttggctgatgtcgttgacagtgaagccctgcaagtgtatatgaagccacccgcccacgaagaagcgaaagcaccttctcggggttttgtggtgagagacgcaccttggactgcttcctctagtgagaaggctccggacatgtccagctccgaggagttccctagctttggcgcacaggtcgcccccaaaactctgccctggggaccgaaaaggtag

SEQ ID NO: 119831 - DNA, 3807 bp, synthetic construct
  misc_feature 1..3807: note = Description of Artificial Sequence: Synthetic coding sequence
  source 1..3807: mol_type = other DNA
atgagctccgtggccgtcctgacccaggaaagcttcgccgaacaccgtagtgggttggttcctcagcagattaaagtcgccactctgaactcggaggaagaaagcgacccccctacttataaggatgccttccccccccttccggaaaaagctgcatgcctggaatcggctcaggaaccaagtggagcctggggaaacaaaatcaggcctattaaagcatctgtcatcacccaggtttttcatgtccccctagaagagcggaaatacaaggacatgaatcagtttggagagggagagcaggctaaaatctgcttagaaattatgcagcggacgggagctcatctagagctctccttagcaaaagaccaagggctgtccatcatggtaagcgggaaattggacgccgtcatgaaggctcggaaggacattgtggcccggctgcagacacaggctagcgcgactgtcgctatcccaaaggaacaccatcgctttgtgattggtaagaatggtgagaagctacaggaccttgaactgaaaactgctaccaagattcagatccccaggcctgatgatccgagcaaccagatcaagataactggaacgaaggaagggattgaaaaggcaagacacgaagttcttctaatttccgccgagcaagacaaacgagcggtggagcggttggaagtggaaaaggccttccatcctttcatcgccggcccttataaccgcctcgtgggagaaatcatgcaagaaacaggcacccggataaatatacctcctccttccgtcaacaggaccgagatcgtctttacaggcgaaaaggagcagttggcccaggcggttgcaaggattaaaaagatttatgaagagaaaaaaaaaaagacaactaccattgccgtggaagtcaagaagtctcaacacaaatatgtaatcggcccaaagggcaactcattgcaggaaatcctggaacggacgggcgtatccgtggaaattccaccctctgacagcatttctgagactgtaatcttgcgcggggagcctgaaaagctcggacaagctctgacagaagtttacgcaaaagcgaatagcttcacagtgagctccgtggccgccccctcatggctgcaccgatttattataggcaaaaagggacagaacctggcgaagatcacgcagcagatgccaaaggtgcacatagagttcacggagggggaggataaaatcacgctggaggggcccacagaggacgttaatgtggcccaggagcaaattgaagggatggttaaggacttgattaacagaatggattacgtggagataaacatcgaccacaagttccacagacacttaattggaaagtcaggcgcgaatattaaccggatcaaagaccagtataaggtcagcgtcagaattcctcctgacagtgagaagagcaacctgattagaatagaaggggacccccagggggtacaacaggccaagcgtgagctcctggaactggccagcagaatggaaaatgagcgcaccaaggatctcatcatagagcaacggttccacaggaccattatcggtcaaaaaggagaacggatccgggagatacgagacaagttccccgaagtaataatcaatttcccggacccggcccaaaaatctgatattgtacaactccgcgggccgaagaacgaggtggagaagtgcactaaatacatgcaaaaaatggtagctgatctcgtggaaaattcatactctatctctgtcccgatctttaaacagttccacaagaacataataggtaagggcggcgctaacataaaaaagattcgggaggagagcaatacaaaaatcgacctgcccgccgagaactccaatagcgaaaccatcatcataaccggcaagcgcgcaaactgtgaggccgcaagatcacgcatcctgagcatccagaaagacctcgctaacatcgctgaggtcgaagtgagcatccccgctaagttgcataatagtttaattggcactaaagggaggctcattcgctctataatggaagaatgcggcggtgtccacattcattttcctgttgagggttccggaagtgataccgtcgtgattcgtggtccctcctctgatgtcgaaaaagccaagaagcagctgctccaccttgctgaggaaaagcagactaagagctttactgtggacatcagagcaaagcccgagtatcataaatttcttatcggcaaggggggagggaagataagaaaagtgagagactccactggagcccgcgtgatatttccagctgccgaggacaaggatcaggacctgatcactatcattggcaaggaagatgcagtgcgcgaagcccagaaggagctagaggccctcatacagaatctggataatgtggtggaagattcgatgctggtggatcccaagcatcaccgccatttcgttattcgacgaggccaagtcttgcgagagatagctgaggaatatggcggcgtcatggtgtcgttccctaggagtgggacacagtccgataaagtaacgctgaaaggcgccaaggactgtgtggaggccgccaaaaaacggatacaagagatcattgaggatctggaagcgcaggtcactctggagtgcgccatcccccaaaaatttcaccgttctgtaatgggccccaagggatccaggattcaacagatcacacgcgacttcagcgttcagattaaattccctgatcgcgaagaaaacgccgtacacagcacggagcccgtagtgcaggagaatggggacgaggccggagaaggcagggaagctaaagattgcgatcccggaagcccacgaaggtgtgacattattattatatctggcagaaaagaaaagtgcgaagccgccaaagaggccctcgaggctctcgtccccgtcactatcgaagttgaagtaccttttgatctccaccggtacgttattggacagaaaggcagtgggattcgtaagatgatggatgagttcgaggtaaatatacacgtccctgcccctgagctgcaaagtgatataatcgcaataacaggcctggcggctaatctggatcgtgctaaagccggcctgctggaacgagtgaaggagctgcaggccgaacaggaagaccgggctctccggtcttttaagctttctgtgactgtggatcccaagtatcaccctaaaattatcggccggaagggggcagtgatcacacagatcagactcgagcacgacgtgaatatccaatttcctgacaaggatgacgggaaccagccccaggaccagataacaattacaggatacgaaaaaaatacagaagcggccagagatgcaattctaaggattgtgggcgaactggagcagatggtctcagaagatgtacctttggaccaccgggtgcatgcccgaattattggcgcgagggggaaagccattcgcaaaatcatggatgaattcaaggtggacatcaggtttccgcagtctggagcgccggaccccaattgcgttacagtaactggattacctgaaaatgtggaggaagctattgaccacatcttgaacctcgaggaggagtacttggccgacgttgtggacagtgaggccctccaggtctatatgaagccacctgcccatgaggaagccaaagcaccctccagagggttcgtcgtccgcgatgcaccctggacagcgtcaagcagtgagaaagcaccagatatgtcttctagtgaagaattcccatcttttggggcacaggtcgctcccaagaccctgccatggggacctaagaggtag

SEQ ID NO: 119832 - DNA, 3807 bp, synthetic construct
  misc_feature 1..3807: note = Description of Artificial Sequence: Synthetic coding sequence
  source 1..3807: mol_type = other DNA
atgtctagcgttgccgttctgactcaagagtcctttgcagagcacaggtccgggctcgtgccccagcaaattaaggtggcaaccctgaacagcgaggaggaatctgaccctcccacctataaagatgcatttcccccccttcccgagaaggctgcatgtctggaaagtgcccaggaaccttctggtgcttggggaaacaaaatcagaccaattaaggcgagcgttataacacaggtgtttcacgttcctctcgaggagcggaagtacaaagatatgaaccagtttggggagggcgaacaggcaaaaatctgcctggagattatgcagcgcacgggcgcccacctcgaactgtcactggcaaaagatcagggcctgtcgataatggtgagcggtaagttagacgccgtgatgaaagctcggaaggacatcgtggcccggttgcagacccaggcttcagccactgtcgctatcccaaaagaacaccacagatttgtcataggaaaaaatggcgagaagttacaggatctcgaactcaagacagcgacaaagatccaaattccccggccagatgatccgtccaaccaaattaaaataactggcaccaaggaagggatcgagaaagcacggcacgaagtgctgctgatatcggctgagcaggataaacgcgcagtggagaggcttgaagtggagaaggcctttcaccctttcatagccggaccatacaatcggctagtcggagaaatcatgcaggagaccggaacgcggattaacatcccccctcccagtgtcaacagaactgagatcgtctttaccggggaaaaggagcagctcgcacaggctgtggctaggataaaaaagatatatgaggagaaaaaaaagaagaccacgacaattgccgtggaagtgaagaagagccagcacaagtatgtcatcggtcctaaaggaaatagcctccaggagattctcgagcgcacaggggtctcagtggaaatcccacctagtgactctataagcgaaacagtgattctgcggggagaacccgaaaaattgggtcaggcactgaccgaggtctatgccaaagcaaacagcttcacagtttcttctgtggctgcccccagttggctccacaggttcattatagggaagaaaggccagaatctcgccaagattacacaacagatgccaaaagtgcacatagagttcactgaaggcgaagacaagatcactctggagggaccaacagaagacgtaaacgttgcgcaggagcagatcgagggcatggtcaaagatctgatcaatcggatggactacgtcgagattaatatcgatcacaagtttcaccgccacctgataggcaaatcaggcgcaaacatcaaccgtattaaagaccagtacaaggtgtcagtgcggatacctccggactcagagaagagtaatctcatccggatagaaggagacccgcagggcgtgcagcaggccaaacgagagctcctggaattagcctcgagaatggagaatgaacgaacgaaggacctgattatcgagcagcggttccaccgaaccataatcggacaaaagggcgagagaatcagggagattagggataaatttccagaggtgatcataaacttccccgatcccgctcagaagagcgatattgtccagctgcgaggccctaaaaatgaagtggaaaagtgcactaagtacatgcagaagatggtggccgacctagtcgagaactcttattctatctctgtgccaattttcaaacagttccacaagaatatcattgggaaggggggagccaacatcaaaaagatacgcgaagagagtaacaccaagatagaccttcccgccgaaaatagcaacagtgaaacgataatcattacggggaagagagccaactgtgaagccgcccggtcccggattctatccatccagaaggatcttgcaaatatcgccgaagtggaagtctctatcccagctaagctccataactcgctgataggaacgaaaggccggcttattcgcagtattatggaggaatgcgggggcgtccatatccacttccctgttgagggaagtggctccgacaccgttgttatccgagggccaagttcagacgtcgagaaggccaagaagcagcttctccacctggcagaggagaagcaaaccaagtcatttacagtggacattcgagccaaaccggaatatcacaaatttctcatcggaaagggcggtggaaagatccgaaaggtgagggattccactggcgcccgggttatcttcccagcagctgaggacaaagatcaggatctgattactatcattggtaaagaggatgcagtgagagaagcccagaaggagcttgaagctttaatccagaatctggataacgtggtggaggattcaatgctcgtggaccccaaacatcacagacactttgtaataagaagaggccaggtgctgcgcgagattgctgaagagtacggcggagtgatggtttcttttcctaggtctggaacgcaatccgataaagtgactttgaagggcgcgaaagattgcgttgaggccgctaagaagagaatacaagagatcatagaggacctcgaggcacaggtgactctggaatgcgcaatcccacagaaattccatcgaagtgttatgggtcccaaaggatcgaggatccaacagatcactcgggactttagcgtccagattaagttcccagatcgcgaagagaatgcagtacactcaactgaaccagtggtgcaggagaacggagacgaggcgggtgaggggcgcgaagcaaaggattgcgacccagggtctcctcgccgatgtgatataattatcatcagcgggagaaaggaaaaatgtgaggctgctaaggaggctctggaggcactggtgcctgtgacaattgaagtagaagttccattcgatctgcacaggtacgtcataggacaaaaagggtctggaatcagaaaaatgatggatgagttcgaagtcaatattcatgtccctgctccagagctgcagtcggacatcattgccattactggcctcgccgcaaacttggatcgtgccaaggccggacttctggagcgggtcaaggagcttcaggccgaacaggaggaccgggccctgagatccttcaagctatccgtgaccgtcgacccaaagtatcacccaaagataataggtcgaaagggggccgtgattacacagattcgcctcgagcacgacgtgaacatccagtttcctgacaaggacgatggtaaccagccccaggatcagatcactatcactggttatgagaaaaacaccgaggcagcacgggacgcaatactacggattgtgggcgagctggagcaaatggtctcagaagacgtccccttagaccacagggtgcacgcgcgcatcattggagctcgaggaaaggccatcaggaaaattatggatgaatttaaagtagatattcggttcccccagagcggtgctccggacccgaactgtgtcaccgttaccgggctgcctgagaacgtggaagaggccatagaccacatcttgaacctggaagaagaataccttgccgacgttgtggattcagaggcactgcaggtatatatgaaacctcccgctcacgaagaggctaaggccccgtctcgcggattcgtggtccgcgacgcaccctggaccgccagctcctctgaaaaagccccagacatgtcttccagcgaggagttcccatcattcggcgcccaggtcgctccgaaaaccctcccctggggtccgaagaggtag

SEQ ID NO: 119833 - DNA, 249 bp, synthetic construct
  misc_feature 1..249: note = Description of Artificial Sequence: Synthetic coding sequence
  source 1..249: mol_type = other DNA
atgagttctgtggctgtgttgactcaagagtcatttgccgaacacagaagcggactggtgccccagcagatcaaagtagctactttaaattccgaagaggaaagtgacccaccaacctacaaggatgccttcccccctttgcccgagaaggccgcctgcctggagtctgcgcaggaaccttctggcgcctggggaaataagattcggccgataaaggcaagcgtaatcacccaggtcttccatgtttag

SEQ ID NO: 119834 - DNA, 45 bp, synthetic construct
  misc_feature 1..45: note = Description of Artificial Sequence: Synthetic coding sequence
  source 1..45: mol_type = other DNA
atgtcctcagtggctgttctcacccaggagtccttcgccgaatag

SEQ ID NO: 119835 - DNA, 210 bp, synthetic construct
  misc_feature 1..210: note = Description of Artificial Sequence: Synthetic coding sequence
  source 1..210: mol_type = other DNA
atgagcagcgttgcggtcttaacccaggagtcatttgctgagcaccgttctggcctggtgccccagcaaatcaaggtagcaacactcaatagtgaagaagaaagtgaccctccaacatacaaggatgcctttccccctctgccggaaaaagctgcatgcctggagtcagcacaagagccctcaggcgcatggggaaataagatcagatag

SEQ ID NO: 119836 - DNA, 165 bp, synthetic construct
  misc_feature 1..165: note = Description of Artificial Sequence: Synthetic coding sequence
  source 1..165: mol_type = other DNA
atgagttctgtcgcggtgctcactcaggagtcttttgccgagcataggtcaggactggtgcctcagcagattaaggtggcaaccctgaacagcgaggaagagagtgaccctcctacttataaggatgcattcccgccgcttcccgagaaggcggcgtgcttgtag

SEQ ID NO: 119837 - DNA, 675 bp, synthetic construct
  misc_feature 1..675: note = Description of Artificial Sequence: Synthetic coding sequence
  source 1..675: mol_type = other DNA
atgagcagtgtggctgtactgacgcaggagagcttcgccgaacaccgcagcggtcttgttccccagcagatcaaggtggctaccctcaatagcgaggaggaatcagacccccctacgtacaaggacgcattccctcccctgcctgagaaggccgcctgcctggaaagcgcccaggagccaagcggagcctggggcaacaagatcaggcctattaaggctagcgtcatcacacaagtatttcatgtcccactggaagaacggaaatacaaagatatgaaccagttcggagagggggaacaggctaagatttgtctggagatcatgcagcgaactggagcccatctcgaactgagcctggcaaaagatcagggactctctatcatggtgtccggaaagctggatgctgttatgaaagccagaaaagacatcgttgctagattacaaacacaagcgtccgcgactgtagcaatcccgaaagaacaccaccgatttgtaatcgggaagaacggagaaaaattgcaggacctagaattgaagactgctaccaagatacagatccctcgcccggatgacccatcaaatcagatcaagataactggcaccaaagaaggcatcgagaaagcgcgccacgaggtccttctcattagtgcagagcaagacaaacgcgccgtttag

SEQ ID NO: 119838 - DNA, 246 bp, synthetic construct
  misc_feature 1..246: note = Description of Artificial Sequence: Synthetic coding sequence
  source 1..246: mol_type = other DNA
atgagctctgtggcggtgctgacccaggagagcttcgccgaacacagatccggtttagtgccgcagcagatcaaagtggcaacactgaattcggaggaagagtcagatccccctacctacaaagacgcctttccgccactgccggagaaagcagcatgcttggagagcgcccaagagccatcgggcgcttggggcaacaaaataaggcctattaaggcctccgtgataactcaggtctttcattag

SEQ ID NO: 119839 - DNA, 240 bp, synthetic construct
  misc_feature 1..240: note = Description of Artificial Sequence: Synthetic coding sequence
  source 1..240: mol_type = other DNA
atgagttcagttgccgtcctcactcaggaaagcttcgcagaacatagatccggtctggtacctcagcaaatcaaggtcgccacccttaattccgaagaagagtccgacccccccacttacaaggacgccttcccacctttgcctgaaaaagcggcatgtctggagagcgcccaagagcccagcggggcttggggaaataaaatccgaccaatcaaggcttccgtcatcacacaggtctag

SEQ ID NO: 119840 - DNA, 291 bp, synthetic construct
  misc_feature 1..291: note = Description of Artificial Sequence: Synthetic coding sequence
  source 1..291: mol_type = other DNA
atgtcgtcagttgcggtgctgacacaagaaagtttcgctgagcatagatccgggctggtcccacagcagatcaaagtggcaaccctcaacagcgaggaagaatccgaccctcccacctataaagatgcctttcctccgctaccagagaaggctgcatgtctcgaatccgctcaggagccgagcggggcctggggcaacaaaatcaggccaatcaaagcttccgtgatcacacaggtcttccatgtccccctcgaggagcggaaatacaaggacatgaaccagttcggttag

SEQ ID NO: 119841 - DNA, 60 bp, synthetic construct
  misc_feature 1..60: note = Description of Artificial Sequence: Synthetic coding sequence
  source 1..60: mol_type = other DNA
atgagctctgtcgcagtcctgacacaagaatcctttgccgagcaccgctctgggttatag

SEQ ID NO: 119842 - DNA, 3708 bp, synthetic construct
  misc_feature 1..3708: note = Description of Artificial Sequence: Synthetic coding sequence
  source 1..3708: mol_type = other DNA
atgcacttagctgagagggatcggtggttgttcgtggctacagtgatgatgcacttcgtgagcatcaagagcggttttccagggctctgcgtgggcgttcgcagcacaatgagttccgtggcagtgttgacccaggagtcctttgccgaacataggtccggtctagttccccagcagattaaagttgcaacgctgaattccgaagaagagtcagatccccccacatacaaggacgccttcccaccattgcccgagaaggcagcatgcctggagtcagctcaggaaccatcaggagcatggggtaacaagatccgtcctattaaagcctctgtgatcacgcaagtatttcatgtgccgctcgaagagaggaagtacaaggacatgaaccagtttggggagggcgagcaggccaagatctgtctggaaattatgcagagaacaggagcgcatctggaattgagtctggccaaggatcaggggctctccattatggtgagtggcaaactcgacgccgtcatgaaggcacggaaggacattgttgctcgccttcaaacccaggcctccgccacggtggcgatccctaaggagcaccaccgcttcgtgattggcaagaatggagaaaagcttcaggacttggaacttaagacggctacgaagattcagatcccaaggcctgacgacccatccaatcaaatcaagatcaccggaacaaaggagggcatcgagaaagctcgtcatgaggtactattgatcagcgcggagcaggacaagcgcgccgtagagagactcgaggtggaaaaggctttccatcccttcattgcgggaccctataaccgtttggtcggtgagattatgcaggaaactgggacgcggatcaacattccccctccatccgtgaaccgcaccgagattgtgtttaccggagagaaggagcaactggctcaggccgttgcacgtattaagaaaatatacgaagagaaggccaattcgttcacagtatccagcgtcgcagctccctcttggctccacaggttcattattgggaaaaaaggccagaacctcgcgaagatcacacagcagatgccgaaggtgcacatcgaatttactgaaggcgaggacaaaattacgctggagggtccaactgaggatgttaacgtagcccaagaacagattgaagggatggtgaaggatctgattaatagaatggattatgtcgagatcaatattgaccacaagttccaccggcacctgataggcaaaagcggggcaaatataaataggattaaagaccagtataaggttagcgttagaatccccccagactccgaaaagtccaacttaataagaatcgaaggggacccccagggagtgcaacaggctaagcgcgaactgctagagctggcctcccggatggagaatgaaaggaccaaagacctaatcattgagcagaggttccaccgaacgatcattggacagaaaggagagcgtatcagggaaatacgagataaattccccgaggtgattataaattttccggaccccgcacagaagagtgatattgtgcagctgaggggcccgaagaacgaagtcgagaaatgtacgaaatacatgcaaaagatggtggctgatttggtggaaaactcgtattccatcagcgtgcctatcttcaagcagttccataaaaatatcattgggaaggggggagccaatattaagaagattcgcgaggaaagtaacacaaagattgacttaccagccgaaaactctaattcagagaccatcattattaccggcaaaagggccaattgtgaagccgcccgcagcagaatactctccatccagaaggacctagctaatatcgcagaggtagaagtaagtattccagcaaaactccacaattcgctgatcggaactaaggggcgcctgattagatccattatggaggagtgtggtggagtgcacattcattttcctgtcgagggatctggaagcgatacagtggtgatccggggtccctcttcagacgttgagaaggctaaaaagcagctccttcacttagctgaggagaagcagacaaaatccttcactgttgacatccgggcaaagccagaatatcataagttcctcatcggcaaaggcggaggaaaaataagaaaggtgcgtgacagcactggcgccagggtgatctttcctgccgctgaggacaaagaccaggacctgattaccatcatcggtaaggaggacgcagtccgggaggcccagaaagaattggaagccctaatacagaacctcgacaatgttgtcgaggattccatgctggtagacccgaagcaccatcgccattttgtcattcgtcggggacaagtgttgagggagatcgccgaggagtatggcggagtgatggttagtttcccccgcagcggcactcagagcgataaggtcacactgaaaggggctaaggattgcgtggaagccgctaagaaaagaatacaggaaataattgaagatttggaggctcaagtgaccctggagtgcgcaattccccaaaagtttcataggtccgtgatgggccccaagggtagtaggatacagcagattactcgggacttctccgtccagatcaagttccctgaccgggaagagaatgcggtgcactctactgagccggttgtccaggagaacggcgatgaggcaggcgagggccgcgaagccaaagattgcgaccctggcagccctcgacggtgtgacataattataataagcggcaggaaggagaaatgtgaggctgcaaaggaggctctcgaggcacttgtacccgtgaccattgaggtggaggtgcccttcgatctgcacagatacgtgattggccagaagggcagcgggataagaaaaatgatggatgagttcgaggtgaatattcacgtccctgcgccggagctacagtccgatatcatcgccatcactggactggcagccaacctggatagagcaaaggccgggctgctcgaacgagtgaaagagttgcaagcagagcaggaggaccgggctctccggtcatttaaactttccgtgaccgtcgacccaaaataccatcctaaaataataggccggaaaggcgctgtgatcacccagattaggctcgagcatgatgtcaatatccagtttcccgataaggatgatggaaaccagcctcaggatcaaattactattaccggctacgaaaagaacacggaagcggcaagagatgcgattcttaggatagtgggggagctggagcagatggtgagcgaggacgtcccactggaccacagagtgcacgcccgcatcatcggtgccaggggaaaagctattcgtaagatcatggatgaatttaaggtggatattaggttcccccaatctggcgcgccagatcccaattgtgtgacagtgaccggtctgcctgagaatgtggaagaagccattgaccacattctcaatctcgaggaagagtacctcgctgatgtagtcgactcagaggcacttcaggtctacatgaaacccccagcacacgaggaggccaaggccccatcacgtggattcgtagtgcgggatgccccctggactgcgagtagcagtgagaaggcgcccgatatgagtagttcagaggagttcccttcttttggcgcccaggtggcccccaagacactgccttggggaccaaagcgctag

SEQ ID NO: 119843 - DNA, 666 bp, synthetic construct
  misc_feature 1..666: note = Description of Artificial Sequence: Synthetic coding sequence
  source 1..666: mol_type = other DNA
atgagtagtgtagctgtgctgactcaggagagctttgctgaacacagaagcggattggtgcctcaacagatcaaagtcgcaactctaaattccgaggaagagtccgacccccctacctataaggatgcattcccgccactcccagaaaaggctgcttgcctggagtccgcccaggagcctagcggcgcttgggggaacaaaattagaccgatcaaagccagcgtgatcactcaggtttttcatgttcctcttgaggagcgcaagtacaaagatatgaaccagttcggggaaggggagcaagccaaaatatgcttggagattatgcagcggacaggagctcatttggaattaagtctcgctaaagaccagggcctctccattatggttagtggcaaactcgacgcggtcatgaaagcacgcaaggatatcgtcgcccggctgcaaactcaggctagcgccactgtggccattcccaaagagcaccacaggtttgtcatcgggaagaacggcgagaagctgcaggatctggagctgaaaactgcaacaaagatccagatccctcgacctgatgatccaagtaaccagatcaaaatcacaggaactaaagagggcattgagaaggcccgccacgaagtcctcttgatcagtgcagaacaagacaaatag

SEQ ID NO: 119844 - DNA, 426 bp, synthetic construct
  misc_feature 1..426: note = Description of Artificial Sequence: Synthetic coding sequence
  source 1..426: mol_type = other DNA
atgtcttcggtcgctgtcctgacacaggagtcatttgcagaacacagaagcggactggtgccccaacagattaaagtcgctacacttaactctgaagaagaatctgatcctcccacctacaaagacgcatttcctcccctgccagaaaaggctgcttgcctggagtctgctcaggaacccagtggggcgtggggcaacaaaattaggcccattaaggcttctgtgatcacacaggttttccacgtgcccttggaggagcgcaaatacaaggacatgaatcagtttggcgaaggggaacaggccaagatatgtctggaaatcatgcaaaggacaggtgcccatcttgagctgtccctggcaaaagaccagggcctctcgattatggtgtctggtaaattggatgcggttatgaaggcaaggaagtag

SEQ ID NO: 119845 - DNA, 381 bp, synthetic construct
  misc_feature 1..381: note = Description of Artificial Sequence: Synthetic coding sequence
  source 1..381: mol_type = other DNA
atgagttctgtggctgtcctcacacaggaatccttcgcagagcaccgatctggactggttcctcagcagattaaagtcgctacgctgaactcagaagaggaaagcgaccctcctacatataaggatgcattccccccgcttccagaaaaagccgcgtgcttagagtcagctcaagaaccctcgggcgcctggggcaataagatccgaccaatcaaggcaagtgtcatcacacaggtgttccacgtgcccctcgaggagagaaagtacaaagacatgaatcagtttggcgagggagagcaggcaaaaatctgtctggaaatcatgcagcgaaccggagcccacctcgaactgagcctggccaaggatcagggcctgagctag

SEQ ID NO: 119846 - DNA, 444 bp, synthetic construct
  misc_feature 1..444: note = Description of Artificial Sequence: Synthetic coding sequence
  source 1..444: mol_type = other DNA
atgtcatcggtggccgtgttgacgcaagaaagctttgccgaacacaggtccgggctggtccctcagcaaatcaaagtggccaccctgaatagtgaggaggagtctgatccccctacctataaagatgcgttccctccactccccgagaaggccgcgtgtttagaatccgcccaggagccttcaggggcatggggaaacaaaatccggcccattaaggcctcagtcattacgcaggtgttccacgtgcccctggaggaacgaaaatacaaggacatgaaccagtttggggagggggagcaagccaaaatatgcctcgagatcatgcaaagaactggcgcacatctggaattgtccctcgctaaggatcaaggactgtcgatcatggtgtccgggaagctggatgccgttatgaaagctcggaaggatatcgtcgctaggctgtag

SEQ ID NO: 119847 - DNA, 54 bp, synthetic construct
  misc_feature 1..54: note = Description of Artificial Sequence: Synthetic coding sequence
  source 1..54: mol_type = other DNA
atgtccagcgtggctgtcctgacccaggagtctttcgccgaacacagatcctag

SEQ ID NO: 119848 - DNA, 495 bp, synthetic construct
  misc_feature 1..495: note = Description of Artificial Sequence: Synthetic coding sequence
  source 1..495: mol_type = other DNA
atgagctcagttgcagtgttaactcaggagtcctttgccgaacatcgctcaggtctagtgcctcagcaaattaaggtggccactctgaactctgaggaggagtccgatcctcccacgtacaaagatgcatttccccccctgccggagaaagccgcttgcctcgagtctgcccaggaaccgagcggggcctggggaaataagattcgccctataaaagcgtctgtgatcacgcaggttttccatgtccctctggaggagcgcaagtacaaagatatgaaccagtttggagaaggagagcaggccaaaatatgtctcgaaatcatgcagcggactggagctcacctcgaactttctctggctaaggatcagggcctgagcatcatggtgtcagggaagctggacgcagttatgaaggcaagaaaagatatcgttgccaggctgcagacacaggcgtctgcaactgtagcaatcccaaaagagcaccatcggttttag

SEQ ID NO: 119849 - DNA, 144 bp, synthetic construct
  misc_feature 1..144: note = Description of Artificial Sequence: Synthetic coding sequence
  source 1..144: mol_type = other DNA
atgtcttcggttgctgtgctcacccaggaaagtttcgccgagcatcggtctggtctggtcccccagcagattaaagtcgctacactcaattccgaagaggagtctgatccccccacctataaggatgcctttcccccactatag

SEQ ID NO: 119850 - DNA, 1044 bp, synthetic construct
  misc_feature 1..1044: note = Description of Artificial Sequence: Synthetic coding sequence
  source 1..1044: mol_type = other DNA
atggagaatctgatgactagtagcacactgccgccgctgtttgcagacgaggacgggtccaaagagtctaatgacctcgccaccaccggactgaaccaccctgaagttccttacagttccggcgctacgtcgtccacaaacaatccagagttcgtagaggacctgtctcaggggcagctgctgcaatccgaaagttcgaacgcggctgagggaaacgagcagcgccatgaagacgagcagcgttcaaagaggggcggatggtccaaaggacggaaacggaagaaacctctccgagacagcaatgctcctaagagcccattgaccgggtacgtacgcttcatgaatgagcgtagggaacagctcagagctaagcgcccggaggtgcctttccccgagatcactcggatgttagggaatgagtggagcaaattacctcctgaagaaaaacagaggtaccttgacgaggctgacagggataaggagaggtacatgaaggaattggaacagtaccagaaaactgaggcctataaagtctttagtcgaaaaacacaagatcgtcagaaagggaagagccacaggcaagacgctgctcgccaggcgactcatgaccacgagaaggagaccgaggtaaaagagcggtccgtgttcgacatccccatctttaccgaggaatttctgaaccatagcaaagcaagggaggcggagctcaggcagctgagaaaaagcaatatggagttcgaggaaaggaacgccgctctacagaagcacgtagaatccatgcgcacagccgttgagaagctagaggtcgacgtcatacaagagcggtctagaaacacggtgctgcaacagcaccttgagactctccgacaagtccttacctcatcctttgcatccatgcccctccctgggagcggggagacccctacggtagatactatcgactcctacatgaacaggctgcactcaatcatcctcgccaatccacaggacaatgaaaacttcatcgccacagtcagagaagtggtgaatcgtctcgatcgctag

SEQ ID NO: 119851 - DNA, 1044 bp, synthetic construct
  misc_feature 1..1044: note = Description of Artificial Sequence: Synthetic coding sequence
  source 1..1044: mol_type = other DNA
atggagaatctgatgactagttctaccctcccccctctgtttgcagacgaggatggctccaaagagagcaatgacttagccaccactgggctcaaccaccccgaagtgccatacagttcaggagctacatcctctacgaataaccctgagttcgttgaagatttgagccagggccagctgctgcagagcgagagtagtaacgccgcagaaggaaatgagcagcgacacgaagatgagcagaggtccaagagaggaggctggtcaaaagggcgcaagcgaaaaaagcccctgagggatagtaacgctccaaagtcacctctgacaggttacgtgaggttcatgaatgagagaagggagcagctccgagctaaacgtcccgaggttccatttccggaaattacaaggatgctcggtaatgaatggtcaaagctaccacccgaggagaaacagaggtacttagatgaagccgatagggacaaggaacgctacatgaaagaactcgagcagtaccagaagaccgaagcctataaggtgttctcgcgcaagactcaggacaggcagaaagggaagtcccatagacaagacgccgccagacaggctacgcacgaccatgagaaggagactgaggtgaaggagcgtagcgtttttgatatcccgatcttcacagaagaatttctcaaccatagcaaagctagagaggccgaactccgacaactgagaaagtctaacatggagttcgaggaacgcaatgccgcactgcaaaagcacgttgaaagcatgcgaaccgctgtagaaaagttagaggtagacgtcatccaggagcgctctcggaacaccgtgctgcagcaacacctcgaaaccctgcgacaagtcctcacatccagtttcgccagcatgcccctaccaggttcaggggagacacccacggtcgacactattgattcctatatgaatagactgcattctataatcctggctaacccacaggataatgaaaactttatcgcgacggtacgagaggtggtgaacagacttgacaggtag

SEQ ID NO: 119852 - DNA, 471 bp, synthetic construct
  misc_feature 1..471: note = Description of Artificial Sequence: Synthetic coding sequence
  source 1..471: mol_type = other DNA
atggagaatctgatgacaagttcaaccctgcctccgctgttcgctgatgaagacggatctaaagaatctaacgacctcgcgactacaggcctcaaccacccggaggtgccttacagtagtggagccacctcctctaccaacaaccctgaatttgtggaggacctgagtcagggccagctgctccagtccgagtcttccaatgctgcagaaggtaacgaacagcggcacgaagatgagcagaggtcaaaacgaggcggatggtcaaaaggccgcaaaaggaaaaagccactgcgtgatagcaatgcccctaagagcccgctcacgggttatgtgaggtttatgaacgagcggcgagagcagctccgggccaagagacctgaagtcccatttccagaaataaccagaatgctgggaaacgagtggagtaagctgccgcccgaagagaaacagaggtaccttgacgaagcgtag

SEQ ID NO: 119853 - DNA, 303 bp, synthetic construct
  misc_feature 1..303: note = Description of Artificial Sequence: Synthetic coding sequence
  source 1..303: mol_type = other DNA
atggagaacctgatgacctctagtaccctgccccccttattcgctgacgaggacgggtccaaagagagcaatgatctggccaccactggcttgaaccatcctgaggtcccctactctagcggtgccacaagctccaccaataaccctgaattcgtggaagacctatcccaaggccagctgctacagtcggagtccagcaatgccgctgaggggaacgaacagcggcacgaggatgagcaaagatcaaaacgtggaggctggtccaaagggagaaaacggaagaagccccttagagacagctag

SEQ ID NO: 119854 - DNA, 489 bp, synthetic construct
  misc_feature 1..489: note = Description of Artificial Sequence: Synthetic coding sequence
  source 1..489: mol_type = other DNA
atggagaacctgatgacatcgtccactctcccacctttatttgccgacgaagacggcagtaaagagtccaacgacttggctaccacagggctcaatcaccctgaagtgccatacagtagcggtgctacaagttctaccaacaacccagaattcgtcgaggatcttagccagggccaactgctgcagagcgagagctcaaatgccgcagaaggcaacgaacagcggcacgaagatgagcagcggagcaaacgcggtggttggtcgaaagggagaaagcgcaagaaacctctgcgtgactctaatgcaccaaagtcccctctaaccgggtatgtgcgattcatgaacgagaggagggagcagttgagggccaagagacccgaggtccctttccccgagataactcgcatgttgggaaacgagtggtctaaattgccacctgaagagaaacagcgctatcttgatgaagcagacagggacaaggaaaggtag

SEQ ID NO: 119855 - DNA, 954 bp, synthetic construct
  misc_feature 1..954: note = Description of Artificial Sequence: Synthetic coding sequence
  source 1..954: mol_type = other DNA
atgagtcacggtcctaaacagcccggtgccgcggccgctccggcaggagggaaggctccggggcagcacggcggcttcgttgtcacagtaaagcaagaaagaggtgaagggcccagagccggggaaaagggtagccatgaagaagaacctgtgaagaagagggggtggcccaaaggaaagaagaggaaaaagatcctccctaatggcccaaaggcaccagttaccggatatgttcgattcctgaacgagcggcgcgaacaaatccgcaccaggcacccagatctcccatttccagagataactaaaatgctcggcgccgagtggagtaaactgcagcccacagagaaacagaggtacctcgatgaagccgaacgcgaaaaacaacagtatatgaaggaactgcgtgcctaccagcaatcagaggcctacaagatgtgcactgagaagatccaggaaaagaaaattaagaaagaagattcttcttccgggttgatgaatactcttcttaatggacataagggtggcgactgcgacggtttcagcacatttgatgtgcccattttcacagaggagtttctggaccaaaacaaggctagggaggcagaactgaggaggctgcgaaaaatgaatgtcgccttcgaggagcagaacgccgtcctgcagagacatacccagtccatgagctccgccagagagaggctcgagcaagagctggccctcgaggagcgccggacactggcattgcagcagcagctccaagcagttaggcaggctttgacagcgagtttcgcaagtttgccggttcctggcacaggagagacacccacactcggcaccctggatttttatatggcaagactgcacggcgccatcgaaagagatcctgctcaacacgagaaactgatcgtgcgtataaaagagatcctcgcccaagtcgcatcagagcatttgtag

SEQ ID NO: 119856 - DNA, 807 bp, synthetic construct
  misc_feature 1..807: note = Description of Artificial Sequence: Synthetic coding sequence
  source 1..807: mol_type = other DNA
atggacactcgcgtgggcacagcaatggctagcccccctagtatgttccctagtagcctcaagtcttcatggaccaaaacaaagagggtgagacgctcatttggggccgaagacgagtgcggcctccgcggtgctgaacggggcacagcggaggcacatgcagagcacgagcagcgcgccagggcatcaggcgctggagccggcgctggcggcgctgaggatgcaggcgcagcagccgcggcccccgggcgcgctccaggtgcacaccgccagttacgtcttactgccggcgccggccacggcagaaacgcgcacgccggacactctggcctcctacacggccctgcgtctcgctctcatagggctcgacctcggccagccagagaagctcaccgaccccaccagggtaaccctggacccggtaggcagcgggctccagtgaggtctggacgtgcccatgacgctgaagaaaaactctgggcacgaccatgtcacactccgcctagaggaagagaagccggcggcccacctgggccagggccaatcttacacctgggcggatcaagtccacctaagattaaattcctgcagcacccctttagttttcaaagcccacaaccgcctgaacccgggaagtctacacgtgacactccacggcgtacatcacaaccgcgagtacctcttctgggtggccaaactaggtacaccggttctcccggtcacccccaggataccggccagacgaaaccaaccccatctactagacaagatccacccaactactcactgcgaggagcagttccctag

SEQ ID NO: 119857 - DNA, 648 bp, synthetic construct
  misc_feature 1..648: note = Description of Artificial Sequence: Synthetic coding sequence
  source 1..648: mol_type = other DNA
atgtcccatggccccaaacaacccggcgcggccgccgcacctgcaggaggcaaagctcccggccagcacggtggatttgttgttacggtgaagcaggagagaggagagggcccgcgagctggagagaagggttcacacgaagaggaacctgtcaaaaagcgagggtggcctaagggaaaaaagagaaaaaaaattcttccaaacggacctaaggcaccggttacggggtacgtgcgattcctcaacgaaagacgagagcagatcaggacccgacatcccgatctgccctttccagaaatcacaaagatgttgggagccgagtggtctaaactccagcctactgagaagcagaggtacctggatgaagctgagagggaaaaacagcagtacatgaaggagctgcgcgcgtaccagcagtccgaggcatataagatgtgtacggagaagatacaagagaagaaaatcaaaaaagaagactcatcatctgggttgatgaataccctgctaaacggtcataagggcggtgactgcgacggcttcagcaccttcgacgtgcctatttttacagaggaattcttagaccaaaataaggcccgtgaggcggagcttagaaggctgaggaagatgaacgtggccttcgaagaatag

SEQ ID NO: 119858 - DNA, 429 bp, synthetic construct
  misc_feature 1..429: note = Description of Artificial Sequence: Synthetic coding sequence
  source 1..429: mol_type = other DNA
atgagtcacggaccaaaacagcctggggcggcagcagccccagcagggggaaaggcccctggccagcacggtggttttgtcgtcaccgttaaacaggagagaggcgaaggcccccgcgctggagagaagggctctcatgaagaggaacccgtgaagaagcgagggtggcctaaggggaagaagcgaaagaagatactgccgaatggacctaaagccccagtgaccggttacgtgcggtttttaaacgaaaggcgcgagcagatcagaactagacacccagacctgccattccccgaaatcaccaagatgttaggggctgaatggtcaaaactccagccgacagagaagcagagatacctagatgaagccgagagggaaaaacagcagtatatgaaggagcttcgcgcttatcagcagagtgaagcttag

SEQ ID NO: 119859 - DNA, 324 bp, synthetic construct
  misc_feature 1..324: note = Description of Artificial Sequence: Synthetic coding sequence
  source 1..324: mol_type = other DNA
atgagtgaatcatcctcaaaatcgtcacagcccctagcttcgaagcaggagaaagacggtactgaaaagcgtggtcgtggacgtcctcgcaagcaaccacccgtgagtcccggaaccgcccttgtcggatctcaaaaagagccatctgaggtacccacgccgaagaggccacggggaaggccaaaagggagcaaaaacaaaggggcagcaaaaactagaaagacgaccacaacccccgggaggaagccgcgcggtcgccccaaaaaactggaaaaagaggaggaggagggtatctcacaagaatctagcgaggaggagcagtag

SEQ ID NO: 119860 - DNA, 291 bp, synthetic construct
  misc_feature 1..291: note = Description of Artificial Sequence: Synthetic coding sequence
  source 1..291: mol_type = other DNA
atgagcgagagtagttctaaatcatcccaacctttggccagtaagcaagaaaaggatgggacagaaaagcgggggaggggccgccccagaaaacagccccctaaagagccttctgaggttcctacacctaaaaggccaagaggtcgcccgaaaggcagcaaaaataaaggggcagccaagacccggaagaccaccactacccccggacgcaagccaagaggtagacctaagaaattagaaaaagaggaggaagaaggaatttctcaggagagctcagaagaggagcagtag

SEQ ID NO: 119861 - DNA, 291 bp, synthetic construct
  misc_feature 1..291: note = Description of Artificial Sequence: Synthetic coding sequence
  source 1..291: mol_type = other DNA
atgtccgagagctcatcaaaaagttcacagcctctagcctccaaacaggaaaaagacggcactgaaaagcgcgggcgcggaagaccaagaaagcaacctccaaaagagccctcagaagtcccaacacctaaacggccaagaggcaggccaaagggatccaaaaataagggcgccgctaagaccaggaaaacaacaacaacacctggcaggaagcctcgcggccgccctaagaaactggagaaagaggaggaagagggcatctctcaggagtctagcgaggaggaacagtag

SEQ ID NO: 119862 - DNA, 324 bp, synthetic construct
  misc_feature 1..324: note = Description of Artificial Sequence: Synthetic coding sequence
  source 1..324: mol_type = other DNA
atgtccgagagttcttccaagtcgagccaaccactagctagtaaacaagagaaggatggaacagaaaagcgcggtcggggccggccccgaaaacagcccccagtatcccccggcactgcccttgtgggttctcagaaggagccttcagaggtcccaaccccaaaacgccctagggggaggccaaaagggagcaagaataagggtgcggccaaaacgcggaagaccaccaccactcccggcagaaagcctagaggacggcccaagaaactggaaaaggaagaggaagagggaatcagccaggagtctagtgaagaagaacaatag

SEQ ID NO: 119863 - DNA, 291 bp, synthetic construct
  misc_feature 1..291: note = Description of Artificial Sequence: Synthetic coding sequence
  source 1..291: mol_type = other DNA
atgtcagagtcaagcagtaaaagcagtcagccactcgcaagtaaacaggagaaagatggaacagaaaagcggggccgtgggcggcctcgcaaacagcctcctaaggagccaagtgaggtgcccacgccaaaacgacctcggggtcgacccaagggctcaaaaaacaagggcgcggccaagacccgcaagacaacaacgacccccggccgaaagccccgcggccgcccaaagaaactcgagaaggaggaagaggagggcatctcccaggagtcttctgaagaggaacagtag

SEQ ID NO: 119864 - DNA, 987 bp, synthetic construct
  misc_feature 1..987: note = Description of Artificial Sequence: Synthetic coding sequence
  source 1..987: mol_type = other DNA
atgagtgaatcctcctccaagtcctcgcagccactggcatctaagcaggaaaaagacggaactgaaaaaagaggccgggggagacccaggaagcagccaccagtctcacctgggacagcactcgtagggtcccagaaggagccttccgaagtgcctacaccgaagagacctcggggacgcccgaaaggaagtaaaaataaaggggagggtggtagggggggccatctggcgggagtccttggtggtggggcagttacgcacgcctgcaggctgttactgacgggcggtgcagcaagcttctgggactggaccgccctgttgagatcacatcggccgcaccccttccccagacccaccatcaccaccgcctcgggcagacacccacacctccctccagtacctagcccccctcactacactgctcatcagccactccaaggaagtcatggcctgtccggagaacagttctcccctggactgtctagtcaactgccgccccccactcacgcatacactcacgctctgctggataaagcgaacatcccactcagccgaacgctccacctcctacggcctcacagcctcggggggggcgatattgccttgtgggcgttcggccttggagcaccctccctccttcttcactgttccctgtggcttcccatcgtggggcctggtcgcgtaccactcgccctgaaaggagctcaggccccttcacatccgggtactccatatagcaccgcactggccgcagcgggtgtggccaacggcggcggttgttggcctcccggattcccacagcccaactgcctctgtcaccacgttggcctgaccttccatcccagtccaacctccctcgttcccgtgctcggttggaccgcgccctttggctaccgaaaggcgggtggagtcagtccgctgctcccactgcactgcgggcatagtccactggccctgcgcctcgggagcgaatacatactctggtag

SEQ ID NO: 119865 - DNA, 291 bp, synthetic construct
  misc_feature 1..291: note = Description of Artificial Sequence: Synthetic coding sequence
  source 1..291: mol_type = other DNA
atgtcagaatccagttctaaaagttctcagcctctggcgtctaagcaggaaaaagacggaaccgaaaagagggggagggggagacctcggaagcagccgcccaaggaacctagtgaggttcccactccaaagcgtcccaggggtcgacctaagggatccaaaaataaaggtgctgccaagactagaaagaccacaacaacccctggaagaaaacccagggggaggcccaaaaaacttgaaaaggaggaagaagagggaatctcacaggagtccagcgaggaagaacaatag

SEQ ID NO: 119866 - DNA, 324 bp, synthetic construct
  misc_feature 1..324: note = Description of Artificial Sequence: Synthetic coding sequence
  source 1..324: mol_type = other DNA
atgtcagagtcttcctccaagagctcccagcccctcgcgtccaagcaagaaaaagatggcacagaaaagcggggcaggggcagacctaggaaacaaccccccgtcagccccgggacagccttggtcggatcacagaaagaacccagcgaggtgcctacaccgaagcgcccacggggacggcccaaaggctctaagaacaagggggctgccaaaacacggaaaaccacaactactcccggacgcaagcccagaggtagaccaaagaaacttgaaaaagaggaggaggaggggattagccaggagagtagcgaggaagaacagtag

SEQ ID NO: 119867 - DNA, 321 bp, synthetic construct
  misc_feature 1..321: note = Description of Artificial Sequence: Synthetic coding sequence
  source 1..321: mol_type = other DNA
atgagcgccagaggggagggcgccggccagccgagtacaagcgcccagggccaaccagctgcccccgcaccccaaaaaaggggacgtggccgccctcgaaagcagcagcaagaacccaccggggagccttcaccgaagcgaccaaggggaagaccaaagggcagtaagaacaaatctccgagtaaggccgcacaaaaaaaagctgaagccaccggcgagaagaggccgcgcgggcgtcctcgaaagtgggataacctgttacctcgaaccagctcaaagaaaaaaaccagtcttggaaattccaccaaacggtcccattag

SEQ ID NO: 119868 - DNA, 357 bp, synthetic construct
  misc_feature 1..357: note = Description of Artificial Sequence: Synthetic coding sequence
  source 1..357: mol_type = other DNA
atgagcgctcggggagagggggctggacagccgtccacgtctgctcagggccagcccgcggctccagccccacaaaaacggggaagaggccggccccggaagcagcaacaagagcctactggggaacccagccccaaaaggccgcgtgggcgcccaaagggcagcaagaataagtctccctcaaaggccgcacaaaagaaagccgaggctacaggtgaaaagagaccccggggcagacccagaaaatggccccaacaagtggtgcagaagaaacctgctcaggtgaacgtggccctgccaggcaaagatcaccccggtaacctgatctatctgctgttctcaaagaacgccacatag

SEQ ID NO: 119869 - DNA, 273 bp, synthetic construct
  misc_feature 1..273: note = Description of Artificial Sequence: Synthetic coding sequence
  source 1..273: mol_type = other DNA
atgtcagcccgcggggagggggccggccagccgagcacttccgcccagggccagccagcggcacccgccccacagaagcgaggacgaggaagacctcggaagcaacaacaggagcccacgggagagccaagccctaagaggccgagagggaggcccaagggcagtaaaaacaagtcgccttctaaggccgcccagaaaaaagctgaagccaccggtgagaaacgaccacggggccgacctcgaaaatgggaggagttctacattgcggcctag

SEQ ID NO: 119870 - DNA, 330 bp, synthetic construct
  misc_feature 1..330: note = Description of Artificial Sequence: Synthetic coding sequence
  source 1..330: mol_type = other DNA
atgagtgccaggggcgagggagccggccagccttccaccagcgctcagggacagcctgctgcacctgccccacagaaacgcggacgaggacggccacgtaaacagcaacaggaaccaaccggcgagcctagccccaagcggccccgaggccggccaaaaggaagtaaaaataagtctcccagcaaggcagcccagaaaaaagcagaagcaacaggtgagaaaaggccacgcggaaggccgaggaaatggcctcagcaggtcgtgcaaaagaagccagcacaggaagagaccgaggagacctcctctcaggaatctgctgaagaagactag

SEQ ID NO: 119871 - DNA, 279 bp, synthetic construct
  misc_feature 1..279: note = Description of Artificial Sequence: Synthetic coding sequence
  source 1..279: mol_type = other DNA
atgtctgcgcgcggggagggtgcggggcagccttctacgtccgctcaaggacagcctgcagcccccgctccccaaaagcgaggccgtgggagacccagaaaacagcagcaagaacctactggtgaaccttctccgaagcgcccaagaggcaggcccaagggcagcaaaaacaagagcccatctaaagcggctcagaagaaggccgaagcgacaggcgaaaagaggcctagagggcgcccaagaaagtggtggttgctgatgaaaagtccctgctggtag

SEQ ID NO: 119872 - DNA, 312 bp, synthetic construct
  misc_feature 1..312: note = Description of Artificial Sequence: Synthetic coding sequence
  source 1..312: mol_type = other DNA
atgtccgcccgcggggagggcgcaggccagccttccaccagtgcgcaaggtcaacctgcggccccagccccccagaagcgcgggagaggcagacccaggaaacagcagcaggagcccaccggcgagccttctccgaaacgcccaaggggcagacctaagggctccaagaacaagtcccctagtaaagccgcccagaagaaggctgaagccaccggtgagaagcgtcccagagggaggccccgtaaatggttgagggcacaggccctagacagcgatggactgggcagcaattcgggccccagcctctcttag

SEQ ID NO: 119873 - DNA, 261 bp, synthetic construct
  misc_feature 1..261: note = Description of Artificial Sequence: Synthetic coding sequence
  source 1..261: mol_type = other DNA
atgagcgcccgcggcgaaggtgcaggccagccttccacctcagcccaagggcaacctgctgctccggccccccagaagcgtggtcgtgggaggccgcgcaagcaacagcaagagcccaccggggaaccatcccccaaaagacctcggggccgccctaaaggatccaagaataaatccccgagtaaggccgcacaaaagaaggctgaagccaccggcgaaaagagacccagaggacgacctcgaaagtggctccagaactag

SEQ ID NO: 119874 - DNA, 300 bp, synthetic construct
  misc_feature 1..300: note = Description of Artificial Sequence: Synthetic coding sequence
  source 1..300: mol_type = other DNA
atgtcagcacgtggggaaggcgcggggcagccctcaactagcgcacagggtcaacccgctgcccccgccccacaaaagcgcggtcgaggcagaccacgcaaacagcagcaggagcctaccggggagccatcgccaaaacggcccagaggaagacccaagggatcaaaaaataaatctccaagcaaagcagctcagaagaaagccgaggccactggcgagaaaagaccacgcgggcgtccccggaagtggccacagcaggtagtgcaaaagaaacctgctcaggtacgccatagtcattag

SEQ ID NO: 119875 - DNA, 477 bp, synthetic construct
  misc_feature 1..477: note = Description of Artificial Sequence: Synthetic coding sequence
  source 1..477: mol_type = other DNA
atggggaagggcgacccaaagaaacccagagggaaaatgagtagttacgcttttttcgtgcagacctgccgcgaggagcacaaaaagaagcacccagatgctagcgtcaatttctcagagttctcaaagaagtgcagcgagcggtggaaaaccatgtctgcaaaggaaaagggcaaattcgaggatatggccaaagctgataaggctcggtacgaacgagaaatgaaaacatacattccccctaaaggagagaccaagaagaagtttaaggatcccaacgctccaaagaggccaccctccgcgttcttcttgttctgttctgagtatagaccaaagatcaagggtgagcatcccggattgtccatcggggacgtagccaagaaattgggtgagatgtggaacaacaccgcagcagatgataaacagccctacgagaagaaagccgctaagctgaaggaaaaatacgaaaagttttag

SEQ ID NO: 119876 - DNA, 648 bp, synthetic construct
  misc_feature 1..648: note = Description of Artificial Sequence: Synthetic coding sequence
  source 1..648: mol_type = other DNA
atgggcaagggcgacccaaaaaaaccaaggggcaaaatgagctcttatgctttcttcgtgcagacctgccgggaggaacacaagaaaaagcaccccgatgcaagtgtgaatttcagcgaattctctaaaaagtgtagcgagagatggaaaaccatgagtgccaaggagaagggcaaattcgaagacatggcgaaggctgacaaagcccgatacgagagagagatgaagacatacatcccccctaaaggggagacgaaaaagaagttcaaggaccccaatgcaccaaaacgtcccccttccgccttcttcttattctgttcggagtatcggcccaagattaaaggggagcatccaggcttgtcaataggagacgttgcaaaaaagcttggggaaatgtggaataacacggccgccgatgacaagcaaccctacgagaagaaagccgctaagctgaaggagaaatatgagaaagacatcgcagcctaccgggcgaaaggaaagccagacgccgctaaaaagggtgtagtgaaggcagagaaaagtaaaaagaaaaaggaggaggaggaggacgaagaggacgaggaggacgaggaggaggaagaggacgaagaggacgaggacgaggaggaagacgatgatgacgagtag

SEQ ID NO: 119877 - DNA, 648 bp, synthetic construct
  misc_feature 1..648: note = Description of Artificial Sequence: Synthetic coding sequence
  source 1..648: mol_type = other DNA
atggggaaaggggaccccaaaaagcctcggggcaagatgtccagttatgcctttttcgttcagacctgcagggaagaacacaaaaagaagcacccagatgcctctgttaatttttcagagtttagtaagaagtgctctgaaaggtggaaaactatgagcgccaaggagaaagggaagttcgaggacatggccaaagccgacaaagcacgatacgaacgtgagatgaagacatacattcccccaaagggggaaacgaaaaaaaaattcaaggacccgaacgcccctaagaggccaccctccgctttctttcttttctgcagcgaataccggcccaaaatcaaaggagaacatcccggcctaagcatcggcgacgttgccaagaagttgggcgagatgtggaacaataccgccgcagatgacaagcagccgtatgaaaaaaaggccgccaagttaaaggaaaaatatgagaaagacatcgcggcttatagagccaaaggaaaacctgatgccgccaagaaaggcgtcgttaaggcggagaaatcaaaaaagaaaaaagaagaagaggaggacgaagaggacgaagaagatgaggaggaagaagaggacgaggaagacgaagacgaagaggaagacgacgatgacgagtag

SEQ ID NO: 119878 - DNA, 294 bp, synthetic construct
  misc_feature 1..294: note = Description of Artificial Sequence: Synthetic coding sequence
  source 1..294: mol_type = other DNA
atgggaaaaggggatcctaagaagcccaggggtaaaatgtcttcgtacgcattttttgttcagacctgtcgcgaagaacacaagaaaaagcaccctgacgcctctgtgaatttctccgaattctctaagaagtgctctgagagatggaaaaccatgtctgccaaagagaagggcaagtttgaggacatggccaaagccgataaagcacggtacgaacgggagatgaaaacttatattccccctaaaggggaaaccaagaaaaagttcaaagaccccaatgcacctaagcgctag

SEQ ID NO: 119879 - DNA, 477 bp, synthetic construct
  misc_feature 1..477: note = Description of Artificial Sequence: Synthetic coding sequence
  source 1..477: mol_type = other DNA
atggggaagggggaccccaagaaacccaggggtaagatgtcgtcatacgcttttttcgtgcagacttgccgcgaggagcacaaaaagaagcacccagacgcatctgttaacttctccgagttctccaagaaatgcagtgagcgttggaaaacaatgagcgctaaagagaaggggaagtttgaagacatggccaaagccgacaaagcgaggtatgaaagggagatgaaaacttacattccccccaaaggtgagaccaagaagaagttcaaggaccctaatgcaccaaaacgcccaccaagtgccttcttcttgttttgcagcgagtatcgccccaagatcaaaggagaacatccaggattatccattggagacgttgcgaagaagctgggagaaatgtggaacaacactgctgccgatgacaaacaaccttatgaaaaaaaggccgctaagttgaaagaaaagtatgagaaattttag

SEQ ID NO: 119880 - DNA, 648 bp, synthetic construct
  misc_feature 1..648: note = Description of Artificial Sequence: Synthetic coding sequence
  source 1..648: mol_type = other DNA
atgggaaagggcgaccctaagaagccccgaggcaaaatgagctcatacgcatttttcgtgcagacatgtagggaagaacataagaagaagcaccccgacgcttccgtgaacttctccgaattcagcaagaagtgctccgagcgatggaagaccatgagtgcaaaagaaaaggggaaattcgaggatatggctaaagccgataaggctcgatacgagagagagatgaagacctatatacccccgaaaggcgagacaaaaaaaaaattcaaggaccctaacgccccaaagaggccccccagcgccttcttcctgttctgtagcgagtatagacctaaaattaagggcgagcaccctggcctcagcatcggtgatgtggccaaaaagctgggcgaaatgtggaataacactgccgcggacgataagcagccctatgagaagaaagccgccaagttgaaagaaaaatacgagaaggatatcgcagcgtaccgcgccaagggtaagccagacgcagccaagaaaggcgtggtcaaagctgagaaatcgaagaagaaaaaagaggaggaggaagacgaagaagatgaagaggacgaggaagaagaagaagatgaggaggatgaagatgaagaggaggatgatgatgatgagtag

SEQ ID NO: 119881 - DNA, 648 bp, synthetic construct
  misc_feature 1..648: note = Description of Artificial Sequence: Synthetic coding sequence
  source 1..648: mol_type = other DNA
atgggtaagggtgaccccaagaagcctaggggcaagatgagctcttatgctttttttgttcagacttgtcgcgaagagcataaaaagaagcatcctgatgcatctgtcaatttctccgagtttagtaagaaatgtagcgagcgatggaaaacaatgagtgccaaggaaaaggggaagttcgaagatatggctaaggctgataaggcccgatacgagagagaaatgaagacgtatattcctcctaagggcgagactaagaagaagttcaaagaccccaacgccccaaaacggccacccagcgccttcttcctattctgcagcgagtacaggcctaagatcaaaggagaacacccggggctcagtatcggtgacgtcgcaaagaagttaggggagatgtggaataatacagccgctgacgacaagcagccatacgagaagaaggccgcaaagttaaaggaaaagtatgagaaggacattgccgcgtaccgagcgaagggaaaaccggatgccgcaaagaagggggtggtgaaggcagagaagtccaagaaaaaaaaggaagaagaagaagatgaagaggatgaggaggacgaggaagaggaggaggacgaagaggatgaggatgaggaggaggacgatgatgacgaatag

SEQ ID NO: 119882 - DNA, 489 bp, synthetic construct
  misc_feature 1..489: note = Description of Artificial Sequence: Synthetic coding sequence
  source 1..489: mol_type = other DNA
atgggaaagggagaccctaagaaaccacgcggtaagatgagttcttatgcctttttcgtacagacatgtagagaagagcacaagaagaagcacccagacgctagcgtcaattttagcgagttctctaaaaaatgctccgagagatggaaaactatgtctgcaaaggagaagggtaaatttgaggacatggccaaggccgataaagccagatacgaaagggagatgaaaacctacatcccccccaagggcgaaactaagaagaaatttaaggatccaaacgctccgaagcgtccccccagcgccttcttcctgttttgcagtgagtacagacccaaaatcaaaggcgagcaccccggactgagtataggggacgttgccaaaaaattgggtgaaatgtggaacaacacggctgcagatgacaagcagccctatgaaaagatactgctacacatcgaactgaaggaatcgctgatgcagcaaaaaagatag

SEQ ID NO: 119883 - DNA, 630 bp, synthetic construct
  misc_feature 1..630: note = Description of Artificial Sequence: Synthetic coding sequence
  source 1..630: mol_type = other DNA
atgggaaagggagatcccaataaaccacgaggcaaaatgagcagttatgccttttttgtgcagacgtgtagggaagagcacaaaaagaagcatcccgattcaagcgtgaacttcgcagaattttccaaaaaatgcagcgaacgttggaagactatgtctgccaaggagaagtcaaaattcgaggacatggccaagtcggacaaagcgcggtatgaccgagagatgaaaaattatgtcccgccaaaaggcgacaagaaaggaaagaagaaggatcctaacgcgccaaagcgcccaccaagcgccttcttcctgttttgtagcgaacaccggccgaagatcaaaagtgaacatcctggactatccatcggggatacggcaaagaaattgggggagatgtggtctgaacaatccgccaaagacaagcaaccctacgaacagaaagccgcaaagcttaaagaaaaatatgagaaggatattgccgcatacagagccaagggaaagtccgaagcaggtaaaaaggggccgggaagacctaccggttcaaagaaaaagaacgagcccgaagacgaagaggaagaagaagaggaggaagatgaagatgaggaggaggaagatgaggatgaggaatag

SEQ ID NO: 119884 - DNA, 630 bp, synthetic construct
  misc_feature 1..630: note = Description of Artificial Sequence: Synthetic coding sequence
  source 1..630: mol_type = other DNA
atggggaagggcgaccccaacaagcctcgtgggaagatgtcctcgtatgcgttttttgtgcagacctgtagagaggaacacaagaaaaaacacccagattcatcagtgaattttgcggagttttccaaaaagtgctcggagaggtggaagactatgagtgccaaggagaaaagcaagtttgaggatatggcaaagagcgataaggcaagatatgatagggaaatgaaaaattatgtgcccccaaagggtgacaaaaagggtaagaagaaggacccaaatgcacctaaacggccaccctctgccttcttcctgttttgcagcgagcaccgtccgaagattaagtccgaacaccccgggttgtctattggtgacactgccaagaaactgggggaaatgtggtccgagcaaagcgcaaaggataaacagccctatgagcaaaaggctgccaagctgaaggagaagtatgagaaggatattgcggcctaccgagccaaggggaagtccgaagccggaaagaaaggtcctgggagacccaccggctccaagaaaaaaaatgagccggaggacgaggaagaagaagaggaggaagaggatgaagacgaggaagaggaagacgaggacgaggaatag

SEQ ID NO: 119885 - DNA, 630 bp, synthetic construct
  misc_feature 1..630: note = Description of Artificial Sequence: Synthetic coding sequence
  source 1..630: mol_type = other DNA
atggggaaaggggatcccaacaagcctcgcggtaagatgtcttcttacgctttcttcgtgcagacatgccgggaagagcacaagaaaaaacaccctgactcctctgtcaatttcgcggagttcagtaagaagtgtagcgaacggtggaagactatgtcggcgaaagaaaagtccaagtttgaagacatggcaaagtctgataaggccagatacgacagggaaatgaagaattacgtgccacccaaaggagataagaaaggtaagaaaaaagaccccaatgcccctaagaggcccccctccgctttttttctgttctgtagcgaacataggccaaagattaaatccgagcatcctggcctcagcattggggacacggctaagaagctaggcgaaatgtggtctgagcagtcagccaaggataagcagccttacgaacagaaggctgccaagctgaaggagaagtacgagaaggacattgccgcctacagagctaagggaaaaagcgaggccggcaaaaaagggcccggcaggcccacgggttcaaagaagaaaaacgaacctgaagacgaggaagaggaagaggaggaggaagatgaggatgaagaggaagaggacgaggacgaggaatag

SEQ ID NO: 119886 - DNA, 405 bp, synthetic construct
  misc_feature 1..405: note = Description of Artificial Sequence: Synthetic coding sequence
  source 1..405: mol_type = other DNA
atggggaagggggatcctaataaaccgagggggaaaatgagctcctacgctttcttcgttcagacctgccgcgaagagcacaaaaagaagcaccccgatagcagtgtgaacttcgcagagttctcaaagaagtgctctgagcgctggaagacaatgtcggccaaggagaaatccaaattcgaggacatggccaagagcgacaaggcaagatatgaccgagagatgaagaactacgtaccacctaaaggtgataaaaaagggaaaaaaaaggacccaaacgcgcctaaacgccccccatctgccttttttctgttctgcagcgaacataggcccaagataaagtcggaacaccccgggttgagtataggggatactgccaagaaactgggagaaatgtggtcatag

SEQ ID NO: 119887 - DNA, 603 bp, synthetic construct
  misc_feature 1..603: note = Description of Artificial Sequence: Synthetic coding sequence
  source 1..603: mol_type = other DNA
atggccaaaggggaccccaaaaaacctaagggcaaaatgtcagcctatgcattctttgttcagacctgtcgggaggaacataaaaaaaaaaaccctgaggtgccagttaattttgccgagtttagtaagaagtgcagcgaacgatggaagacaatgtcgggaaaggagaagtcgaaattcgatgaaatggctaaagctgataaagtgcgctatgaccgggaaatgaaggactatggcccagcaaagggtggtaaaaagaaaaaggatcctaatgctcctaaaagacctccatcaggattcttcctattttgtagcgaatttagacccaaaattaaaagcacaaatcccggtatctcgatcggcgatgtcgcaaaaaagctgggcgaaatgtggaataatctcaatgatagcgagaaacagccatacataaccaaagcagcaaaacttaaggaaaagtatgaaaaagatgttgcagactacaagagcaagggaaagttcgacggggccaagggacccgccaaggtagcacgaaagaaggtggaagaggaggacgaagaagaagaggaggaagaggaggaggaggaggaggaggaagatgagtag

SEQ ID NO: 119888 - DNA, 567 bp, synthetic construct
  misc_feature 1..567: note = Description of Artificial Sequence: Synthetic coding sequence
  source 1..567: mol_type = other DNA
atggccaaaggagacccaaaaaagcccaaaggcaagatgtccgcgtacgcgttcttcgtacaaacctgcagagaggaacacaaaaaaaagaaccctgaggtgccagtgaacttcgctgaattctctaaaaagtgctccgaaagatggaagactatgagtggcaaggaaaagtcaaaattcgacgagatggccaaggccgataaagtccgctacgatagagaaatgaaagattacggccccgcaaagggagggaagaaaaagaaggacccgaacgcccctaaacggccaccctctggattctttctcttttgctccgagtttagaccgaaaattaagagcaccaatcctggaatctccatcggcgatgtggcgaaaaagctgggagagatgtggaacaacttaaacgattcagaaaaacagccctatattaccaaggccgcaaagcttaaggagaagtacgagaaggatgtcgctgactataaatccaaaggtaaatttgatggggcaaaggggcccgccaaggtagctcggaaaaaggtggaggaggaggatgaggaagaggaatag

SEQ ID NO: 119889 - DNA, 462 bp, synthetic construct
  misc_feature 1..462: note = Description of Artificial Sequence: Synthetic coding sequence
  source 1..462: mol_type = other DNA
atggccaagggagatccgaagaagcctaagggaaagatgtctgcctacgccttctttgttcagacatgtcgagaagaacataagaagaaaaacccagaagtcccagtgaactttgcggagtttagcaagaagtgctcggagcgctggaaaaccatgtccggcaaggagaagtccaaatttgatgaaatggctaaggcagacaaggttcgatacgacagggagatgaaagactacggccctgctaaaggcggtaagaaaaagaaagatcccaatgcacccaagcgccctccttccggatttttcctgttttgttctgaattccggccgaaaattaaatccaccaacccaggtattagcattggcgatgtagccaagaaactgggtgagatgtggaataacctaaacgactccgagaaacagccctacatcactaaggcggcaaagctgaaggaaaagtactag

SEQ ID NO: 119890 - DNA, 603 bp, synthetic construct
  misc_feature 1..603: note = Description of Artificial Sequence: Synthetic coding sequence
  source 1..603: mol_type = other DNA
atggcaaagggagatccgaaaaagcccaaaggaaaaatgtcagcttatgcattttttgttcaaacgtgccgggaagaacacaagaagaaaaaccccgaagtcccagtgaactttgcagaatttagcaagaagtgtagcgagcggtggaagacgatgtccgggaaagagaagtcaaaattcgatgagatggccaaagctgataaggtgaggtacgacagggagatgaaagactacggaccagccaagggagggaagaagaaaaaggaccccaatgcacctaaaaggcccccttccggattttttctattctgtagcgaatttagaccaaagataaaaagcaccaaccccgggatttctatcggggatgtggcaaagaaacttggcgagatgtggaacaacctgaacgactccgagaagcagccgtatatcacaaaggcggctaagctgaaggaaaaatatgaaaaagatgtggccgactacaaaagcaagggcaagttcgatggggccaaggggcccgcaaaggtggctagaaagaaggttgaagaggaggatgaggaggaagaagaggaagaggaggaagaggaagaggaggaagatgaatag

SEQ ID NO: 119891 - DNA, 582 bp, synthetic construct
  misc_feature 1..582: note = Description of Artificial Sequence: Synthetic coding sequence
  source 1..582: mol_type = other DNA
atggccaaaggagacccaaagaaacccaaggggaagatgtcagcttacgccttcttcgtccagacttgtcgagaggaacacaagaagaaaaaccccgaggtcccggttaactttgcagaattcagcaagaagtgctctgaaaggtggaagacaatgtccgggaaggagaagtccaagttcgacgagatggcgaaagctgacaaagtgcgatacgaccgtgaaatgaaggattacggtccagccaaaggcggcaagaagaagaaagaccctaacgccccaaaaaggcctccctccgggtttttcctcttctgttctgaattccggcccaaaatcaagtccaccaatcccgggatctcaatcggcgatgtggccaaaaaactgggggagatgtggaacaatctgaatgattcagaaaaacagccctacataactaaggcagcaaaactgaaagagaaatatgaaaaggacgttgctgattacaaatccaaaggaaagtttgacggcgccaaggggcccgccaaagtcgcaaggaaaaaagttgaggaggaagatgaggaggaagaggaagaagaggaggagtag

SEQ ID NO: 119892 - DNA, 273 bp, synthetic construct
  misc_feature 1..273: note = Description of Artificial Sequence: Synthetic coding sequence
  source 1..273: mol_type = other DNA
atgcccaaaagaaaggccgaaggagacgcaaagggtgataaggccaaggtgaaggacgaaccccagagaaggagcgcacgcctgtctgccaagccggcgccccccaagccagaaccaaagccaaaaaaggcccccgctaaaaaaggtgagaaggtgcccaagggaaaaaaaggtaaggccgatgccgggaaagaaggaaacaacccggctgaaaacggagatgccaaaactgaccaggcccagaaagccgaaggagccggtgatgccaagtag

SEQ ID NO: 119893 - DNA, 234 bp, synthetic construct
  misc_feature 1..234: note = Description of Artificial Sequence: Synthetic coding sequence
  source 1..234: mol_type = other DNA
atgcctaagcggaagagtccggagaacacagagggaaaagatgggtccaaagtaacaaagcaggagccgactcgccggagcgcccgcctcagcgctaagcccgcaccgcccaagcccgagcccaagccccgtaagacatccgcgaaaaaggagcctggcgctaaaatcagccgcggggccaaggggaaaaaggaggagaagcaagaggccgggaaagaggggactgagaactag

SEQ ID NO: 119894 - DNA, 300 bp, synthetic construct
  misc_feature 1..300: note = Description of Artificial Sequence: Synthetic coding sequence
  source 1..300: mol_type = other DNA
atgcccaagcgcaagtcccctgagaacacagagggcaaggacggctctaaggttaccaagcaggaaccaaccaggcgaagcgctagactgagtgccaagcccgccccacccaaacccgagccaaaacctcgcaagacttctgcaaaaaaggagcctggcgctaagattagccggggagcaaaaggcaaaaaggaggagaagcaggaggccgggaaggagggtacggcccctagtgagaacggagagactaaggcggaggaggcgcagaaaactgagtctgttgataacgaaggagagtag

SEQ ID NO: 119895 - DNA, 507 bp, synthetic construct
  misc_feature 1..507: note = Description of Artificial Sequence: Synthetic coding sequence
  source 1..507: mol_type = other DNA
atggtgctctttttcagaatcaacctgcaaaccaagaagtgcaaacagaagggaaaaggcgaacagcgcgaaaataggcctaagtggctaaccaagaaactgaagaagacctacctgcggaagacgggaaagaggaggttgagacgggttcagccccttatgaaacaggaacgtaagaagcccagcttgattaacaatcacatcccgtgcttgataagtggaccatgtttaccctcctgtacaattcagcggaatattttcataaactatttcgtgaatgcctccttcctggtggccctggagaccttcctgcgccgacgcgaatcccacctgatcccttttttcaaatgcaagtgcttcttcctgcgaggcgaaatcatttgctggctctttattttctggtacaaccagaaaatcgtctgggatatcgaactttgggaggctctaactgtgtccggcgtcagcctgacattccaccgctggggcgtttctttctacatcctgtag

SEQ ID NO: 119896 - DNA, 303 bp, synthetic construct
  misc_feature 1..303: note = Description of Artificial Sequence: Synthetic coding sequence
  source 1..303: mol_type = other DNA
atgcctaaacgtaaggtatcctcggccgagggagcggcgaaagaagaaccaaaacgccgcagcgctcggctgtccgccaagccaccagcaaaagtcgaggctaagcctaaaaaagctgccgcaaaggataaaagttccgataagaaggtgcagactaaagggaagcgcggcgcaaagggcaagcaggccgaggtggctaaccaggagaccaaggaggaccttcctgctgaaaatggggagacaaagacggaggagagtcccgcttcggacgaggcaggcgaaaaagaggcgaaatcagactag

SEQ ID NO: 119897 - DNA, 582 bp, synthetic construct
  misc_feature 1..582: note = Description of Artificial Sequence: Synthetic coding sequence
  source 1..582: mol_type = other DNA
atgggtaaacagaatagtaagctacgcccagaaatgctgcaggacctcagagaaaatactgagtttagcgagctggagctccaggagtggtacaagggttttttaaaggactgcccaacggggattctgaacgtcgacgaatttaagaagatttatgccaacttttttccatacggcgatgcaagtaaatttgctgagcatgtcttcagaacttttgataccaacagcgatggcacaattgattttagggaattcattatcgcgctgtccgtgacaagtaggggcaggcttgaacagaaactcatgtgggctttttccatgtacgatctggacgggaacggttatatttctagagaagaaatgcttgagattgtgcaggcgatctacaagatggtcagctccgttatgaagatgcctgaggatgagagcacccctgagaaaagaactgagaaaatcttccggcaaatggacactaacaatgatggaaaacttagcctggaggaattcatcagaggagcaaagtccgatccctccatcgttcgcctcctacagtgcgatccctcaagtgcgagccagttttag

SEQ ID NO: 119898 - DNA, 582 bp, synthetic construct
  misc_feature 1..582: note = Description of Artificial Sequence: Synthetic coding sequence
  source 1..582: mol_type = other DNA
atgggtaaacagaattccaagctgcggccagaggtgttacaggacctgcgcgagaacaccgagtttactgaccacgagttgcaagagtggtacaaagggttccttaaggactgtccaacagggcacttgaccgttgacgaatttaaaaaaatttacgcaaattttttcccatatggcgacgcctccaagttcgccgagcatgtgttcagaacattcgacactaacggtgacggtacaatagacttccgggagttcatcatagcactctcagtgactagtcgagggaagctggagcagaagctgaagtgggctttctcgatgtacgacctggacggtaatggatacatttcaaggagcgagatgttagaaatcgtgcaagcaatctataagatggtgtcctctgtcatgaagatgcctgaggatgaatctactccggaaaagaggacagacaaaattttcaggcagatggacaccaacaacgacgggaaactgtcgctcgaggaattcataaggggcgccaagagcgaccccagcatagttcgactgctgcagtgtgacccgagtagtgccagtcagttctag

SEQ ID NO: 119899 - DNA, 582 bp, synthetic construct
  misc_feature 1..582: note = Description of Artificial Sequence: Synthetic coding sequence
  source 1..582: mol_type = other DNA
atgggtaagcaaaatagtaagctgcgacccgaagtcctccaggacttgcgggagaacacagaattcacagatcacgaactccaggagtggtacaaaggtttcctcaaagactgccctactggccatcttacggttgatgaatttaagaaaatctatgcaaatttcttcccatacggcgatgccagtaagtttgccgaacacgtttttcggaccttcgacaccaacggagatgggaccatagatttccgcgagttcattattgcgctctccgtgacatcacggggtaaactggagcagaagcttaaatgggccttctctatgtacgatcttgatggtaacggttacatttcgcggtcagaaatgttagagatcgtgcaagctatctataagatggtaagctctgtgatgaaaatgcccgaagacgaaagcacgccagagaagagaaccgataagattttccgccagatggacaccaacaacgacggcaagttgagtctggaggagttcattagaggagctaagagtgatccttccattgtgagactccttcaatgtgacccatcatcagcaagccaattctag

SEQ ID NO: 119900 - DNA, 93 bp, synthetic construct
  misc_feature 1..93: note = Description of Artificial Sequence: Synthetic coding sequence
  source 1..93: mol_type = other DNA
atgggtaagcagaactccaagctacgcccagaagtgctccaagacctgcgtgagaacacagaatttacagaccatgagctgcaggaatggtag

SEQ ID NO: 119901 - DNA, 3054 bp, synthetic construct
  misc_feature 1..3054: note = Description of Artificial Sequence: Synthetic coding sequence
  source 1..3054: mol_type = other DNA
atgaaactgctgaagcccacatgggtcaatcacaacggcaaacccatcttctctgtggacatccatccagacggcaccaaatttgcgacggggggacagggtcaggatagcggcaaggttgttatctggaacatgtccccggtcttgcaggaagacgatgagaaggatgaaaacatcccaaagatgctgtgccagatggataatcatctagcctgtgtgaattgcgtgaggtggagcaactccggcatgtatctggcttcaggtggggacgacaaattgatcatggtctggaaacgagctacatatatcggcccttcaacagttttcggaagcagcggcaaactggccaatgtggaacaatggcggtgcgtgtccattctgagaaaccactctggagacgtgatggatgtggcctggtcgccccatgatgcctggctggcatcctgttcggttgataacacggtcgtgatttggaacgcagtgaaatttcctgagatcctcgcaactctgcgtggacattcgggcctggtgaaggggctgacctgggatccagtgggcaaatacatcgccagccaggccgatgacagatcactgaaagtgtggagaaccctggattggcagctggaaactagcatcaccaagccgttcgacgagtgtggcggaaccacccatgttctacgcctttcgtggtcccccgacggacactatctagtcagtgctcatgccatgaataatagcggacctaccgctcagatcatcgaacgcgaaggctggaagacgaacatggacttcgtcggccaccggaaggcagtaacagtagtcaagtttaacccgaaaattttcaaaaagaaacagaagaacggctccagcgccaaaccaagctgcccatactgctgttgcgctgttggatcaaaggacagatctctgagcgtgtggctcacctgcctgaagaggcctttggtggtaattcatgagcttttcgataagtcgataatggacatctcttggacactgaatgggttgggcatcctggtatgctccatggacgggtccgtcgcattcctcgacttttcacaggatgagttaggagatcccctgagtgaagaagagaagtctaggatccatcaatccacttacggcaagagcttagccattatgaccgaagcacagttgtctacagctgtaatagagaatccggagatgcttaagtatcagaggcgccagcagcagcaacaactggaccagaagtccgccgccacgagagaaatgggttcggctacatccgtcgccggtgtggtcaacggtgaatcactggaggatattaggaaaaacctgcttaagaagcaagtagagacccgtacggcagacggccgtcgccgaatcacaccgctgtgcatcgctcagttggacacgggcgatttctctaccgcttttttcaactcaatacccttgtcagggtccttggctggaaccatgctttccagtcatagttccccgcagctccttcctctggatagttctacacccaactcctttggtgcgagcaagccctgtaccgagcctgtggtggccgcttctgcacgcccggcaggtgatagcgttaacaaggactctatgaacgctacgagtaccccagcagcactttcaccttcggtgctcactaccccctctaagatcgagccaatgaaagccttcgactcccggtttactgaacgatctaaggccacgccgggtgccccagcattgacaagtatgacacccactgcagtagagcgattgaaagagcaaaacttagtaaaggagcttagaccgcgcgacttactggagagctcttccgatagcgacgagaaagtgcccctcgccaaggctagttctctttccaagaggaaactcgaattggaggtagagaccgtggagaagaagaaaaagggtcgccctcgcaaagattccaggctgatgccagtgtccctctctgtgcagagtccggctgcattgacggcggagaaggaagcaatgtgtttgtcagctcccgcactggctctgaagctgcctattcccagtccccagagggccttcacccttcaggtgtctagtgacccatccatgtacatcgaagtcgagaatgaagtcaccgtggtcggtggcgtaaaattatcacgacttaaatgtaaccgtgaggggaaggagtgggaaaccgtcctaacaagcaggattcttacggccgccggttcctgcgacgttgtatgcgtcgcatgtgaaaagcgaatgctgtcggtgttcagtacctgcggccgccggctattgtcaccaatcctgctgccttctccaatttccactctccactgcaccgggagctatgtaatggccctgaccgccgccgccactttgagcgtttgggacgtccacaggcaagtggttgttgttaaagaggagtccctgcactccatcctggctgggagcgatatgacagtgagtcagattctactcacccagcacgggatacctgtgatgaacctctctgacggtaaagcgtactgtttcaacccgtctctatccacttggaacctagtgtccgataaacaggactccttagcccaatgcgcagattttagatcaagcttgccaagccaagatgctatgctttgtagtggccctctcgcaatcattcagggcagaaccagtaattccggacgtcaggccgcccgcctgttcagcgtgccgcacgttgttcagcaggaaacaacgctggcttaccttgaaaatcaggtggccgccgccctcacccttcaatcctcccacgaataccgtcactggttgctggtctacgctagatacctggtcaatgagggattcgaataccgcctgagggagatctgtaaagatctgcttggtcctgtgcattattctaccggtagtcagtgggagtccacagtagtgggacttagaaagcgagagctgctcaaggagctgctgccagtgatcggccagaaccttagatttcagcgcctttttaccgaatgtcaggagcagctagacattcttcgagacaagtag

SEQ ID NO: 119902 - DNA, 2433 bp, synthetic construct
  misc_feature 1..2433: note = Description of Artificial Sequence: Synthetic coding sequence
  source 1..2433: mol_type = other DNA
atgaagcttctgaagcccacgtgggtgaatcataatgggaaaccaatcttctccgtagatatacacccagacggaaccaagtttgctacaggcggccagggtcaagactcaggtaaagtcgtcatttggaacatgtcccctgttttgcaggaagatgacgagaaagatgagaacattcccaaaatgctttgtcagatggataaccacctcgcatgcgtgaactgcgtgaggtggagtaattccggcatgtacctggcttctgggggcgacgacaaactcatcatggtgtggaagcgcgcgacttacatcgggccctctacagtcttcggatccagcggcaagctggcaaacgtcgaacagtggcggtgcgtctctatccttcgcaatcactctggcgatgttatggatgtcgcctggtcacctcacgacgcatggctcgcgagctgcagcgtcgacaacacggttgttatctggaatgccgtaaaattcccagagattctggccacacttcgcggacattccgggttggtcaaaggtctgacatgggatcctgtcgggaagtacatcgcaagtcaggcagacgaccgttccttgaaggtatggcggaccctagactggcaactagaaacgagcatcactaagccattcgatgaatgcggggggactacccatgtgcttaggttgagttggtcccccgatggccactatttggtgagcgcgcacgctatgaacaactccggaccaacagcgcaaattattgagcgggagggatggaagaccaacatggattttgtcgggcaccgaaaagccgtgactgtggtgaagtttaatcccaagatctttaagaagaagcagaaaaacggctcttcggcaaagccatcctgtccctattgctgttgtgccgtgggaagcaaagatcggagcctttctgtatggctgacctgcctcaaacgccctcttgttgtaattcacgaacttttcgataaatccattatggatatctcctggaccctgaatggcttgggtatactggtatgtagcatggatgggagtgtggcattcctggactttagccaagatgagctgggagatcctctgtcagaggaagagaagtcgcgcattcaccaatccacctatggtaaatcgctcgccatcatgacggaggcccagttaagtaccgccgtgatcgagaatcccgaaatgctcaagtaccagcgcaggcagcagcaacaacaactggaccaaaaaagcgccgccacaagggaaatggggagcgccaccagcgtggccggagtagtcaacggtgagtcgctggaagatatccggaagaacttattgaaaaaacaagtggaaacacgtaccgctgacggccggcgcaggatcaccccactctgtattgcacagctggacactggcgacttcagtaccgccttttttaattccattccattgagcggctccttggctgggaccatgctgtcctctcatagctctcctcagctcttaccactcgactcaagcaccccaaactcatttggcgcctccaagccctgcacagaacccgttgtggctgcttccgcgagacctgccggtgactcggtgaacaaagattcaatgaatgccacctcaacacccgcagcactgagccccagcgtactgaccaccccatctaaaatagagcctatgaaagctttcgactcccgatttaccgaacgttccaaggccactccgggtgctccagcgctgacatcaatgactccgaccgccgtggagcgcgatgtgcaccggcaggtcgtggtagtcaaggaagagtctctgcacagcattctcgccggttcagatatgaccgtgtcacagattctgttgacccagcacggtattcccgttatgaacctttctgacggcaaggcctattgctttaatccttcccttagcacctggaacctcgtgtccgataaacaggactccctggcccaatgtgctgattttagaagcagtctgccttcccaggacgcgatgttgtgcagcgggccccttgccatcattcagggccgcacgagtaactcaggacgacaagcagcccgattattttcagtgcctcacgtggttcagcaggagactacacttgcttacctggagaaccaggttgctgccgcgctcacccttcagagctcccacgaatatcgtcattggctgctagtgtacgcacgatatctggtaaacgagggatttgagtaccgtctgcgtgagatttgtaaggacctgctgggtccggtccattattctacaggcagccaatgggagtccacagtcgttggattacgcaagagagaactcctgaaagagcttcttccagtgatcggtcaaaacctgcggttccagcggctgttcacggaatgccaggagcagctggacatccttcgcgataaatag

SEQ ID NO: 119903 - DNA, 1815 bp, synthetic construct
  misc_feature 1..1815: note = Description of Artificial Sequence: Synthetic coding sequence
  source 1..1815: mol_type = other DNA
atgctttccagccacagttcccctcagttgctacctctagattcatccacccctaattccttcggtgcctcaaaaccatgtactgagcccgtggtggccgcctcagcccgcccggcgggcgacagcgtcaacaaggattccatgaatgctaccagcactcccgcagccctctccccttccgtgcttacgacccccagcaagattgaacccatgaaagcttttgacagcagattcactgaacggtccaaggctaccccaggcgcgcccgccctgacctcaatgacacctactgccgtcgagcgcctgaaggaacagaacctggtgaaggagctccgacccagagacctgctggagtctagtagtgatagtgacgagaaggtgcctctggccaaagctagctccctctctaaacgaaagttagaattggaagtcgaaacagtggagaaaaagaaaaaaggtaggccccggaaggactcccgcttaatgcctgtgagcctctctgttcagagtccagccgcattgacagcagagaaagaggctatgtgcttgtccgcaccggccctcgcactgaaactccctatcccaagcccacaaagggcattcaccctacaagtcagttccgaccctagcatgtatatcgaggtggagaacgaagttaccgtggtcggaggagtcaaactctccagactgaaatgcaacagggaaggcaaggagtgggagaccgttctcactagtcggatcctcacggcagcaggcagttgcgacgtcgtgtgcgtcgcctgcgagaaaagaatgttatctgtgttcagcacatgcgggcgccgtctcctgtcacccatcctactgccaagccccatcagcacgctgcactgtacgggttcctacgtgatggccctgaccgccgcagctaccctaagcgtttgggacgtccatcggcaagttgtggtggtgaaagaggagtcactgcacagtatacttgccgggtctgacatgaccgtatctcagattctcctgacccagcacggcattcctgtgatgaatctgagtgacggaaaggcttattgttttaacccatcattgtccacatggaatctggtctccgacaagcaggactccctcgcacagtgcgcggacttccgtagttctctgcctagccaagacgcaatgctctgctccgggccacttgccattattcagggccggacaagtaacagcggaaggcaggcagctaggctgttttctgtgccccacgtcgtccagcaagagactacactggcctacttggaaaatcaggtggccgctgctctgacactgcagtcatcacatgagtatcgtcactggctcttggtttacgctcgctatctggtgaacgaaggctctgccgaggagggcgccgcagaaggcgctgccacaagtcatagagccgagcctcctatccccgccccactacacagagtaagcggtaccgcccgacatcccgaagggcaggtggcttgtccaagcttaccatggcttcagcaaggacaagggcatactcttgccgcggatgacatgcaagaccggctgagccccgaccaagctgtaggcggcggagatacgggtcgccgctgcgctgtgctgcaccagagacagccatcatccctgggtaggtgcgctttatgccctggaagcgatatcgcgtccggtggcgggtctagtagtctccctcccagccctagatgtggtgctagggcaggcgcattacctaggtgcccaggagcatctaaggccgtgccggggctcccttcacccgccaggccccaaggcggacactag

SEQ ID NO: 119904 - DNA, 2922 bp, synthetic construct
  misc_feature 1..2922: note = Description of Artificial Sequence: Synthetic coding sequence
  source 1..2922: mol_type = other DNA
atgtccccggttttgcaagaagatgacgagaaggatgagaatatccctaagatgctgtgccagatggacaatcatctggcctgcgtaaactgcgtaaggtggtccaattcaggcatgtatctcgcatccggcggcgacgacaagctgattatggtgtggaaacgggctacgtacatcggcccatcaaccgtgttcggcagcagcggcaagctcgcaaacgtggaacagtggcggtgcgtgagcattctgcgcaaccactctggggatgttatggatgtagcctggtctccccatgatgcctggttggcgagctgttctgtggataacactgttgtcatctggaatgccgtgaagtttcctgagatcttggctaccctgagaggccactcaggactagtgaagggtttaacttgggatcctgtcgggaagtacattgcttctcaggccgacgatcgatcccttaaagtttggagaacactcgattggcagctggaaacaagtatcactaaacccttcgacgagtgtgggggaacgactcacgttttaagactaagctggagtcccgacggccattatctggtgtctgctcacgccatgaacaatagcggacctacagcccaaattatcgagcgagagggatggaagacgaatatggatttcgtcggccatagaaaagccgtgaccgtggtcaagtttaaccctaagattttcaagaagaaacagaaaaatggctcaagtgctaagccttcctgtccctactgctgctgcgcggttgggtctaaggaccgatccctgagcgtgtggctgacttgtctgaagagaccgctcgtggtgatccatgagcttttcgataagtcgatcatggacatctcgtggacactgaacggcctggggattctggtatgttccatggatggcagcgtggcctttctggatttttctcaggatgaacttggagatccacttagtgaagaggaaaagtccagaatccaccagagcacctatgggaagtctctcgccattatgactgaagcccagctcagtactgctgtcatcgagaatccagagatgctgaaataccaacgtcgacagcagcagcaacaacttgaccaaaagtccgccgcaacacgcgagatgggtagcgccaccagtgtcgcaggagtagtcaatggggagtccctggaagatatccggaaaaacctccttaagaaacaggttgaaactcgtactgccgacgggcgaagacggataactccactgtgcatagctcagctggatacaggagatttctccaccgccttctttaatagtatccccctgagcggttcacttgccgggaccatgctgtcctcccactcatccccacagctcttgcctctggacagcagcacccccaactcattcggagcaagcaagccctgcactgagccggtggtggccgcctcggcccgtcctgccggagactcggtgaacaaggactcaatgaacgctacttcaactcccgcagcgctcagccccagcgtgcttactaccccctccaagattgaacccatgaaagccttcgattctcggttcacagagcggtcaaaagccacccccggagcccctgcactgacctccatgacccctacggcagtagaaaggttgaaagagcagaatcttgtgaaggagctccgccctagagatctgctggagagcagcagcgattccgatgagaaggtgccactggccaaggccagttctctgtctaagaggaaactcgagttagaagtcgaaacagtggagaagaagaagaagggaaggcctaggaaggactccaggctgatgccagtctctctgtccgttcagtcaccagctgctctcaccgccgagaaggaagcaatgtgtttgtccgccccagccctcgccttgaagctccccatcccttccccacagagggcttttactttgcaagtgtcctcagatccttccatgtacatagaggttgaaaacgaagtgactgtggtcggaggggtcaaactctcgcggttaaagtgtaacagggaggggaaggagtgggaaactgtattaacctctcggatcttgacggcagccggcagttgtgatgtggtctgtgtcgcttgcgaaaagcggatgttatccgtgttcagcacatgcggcaggaggctgttgagtccaatcctgctgccctccccaatatcaaccctgcactgcacaggaagctatgtcatggcccttacagctgcagctactttgtctgtctgggacgtgcacaggcaggtcgtcgtcgtcaaggaagagtcgctacacagtattctggccggaagcgacatgactgttagccagattcttctcactcagcacggcattcccgtgatgaacctgtcagacggtaaagcttattgttttaacccttcactgagtacctggaatttagtatctgacaagcaggacagcctggcccaatgtgccgatttcagatccagcctgcctagtcaagacgctatgttgtgtagtgggccgctcgctattatacaaggacgcacgtccaattctgggcgccaggcagcgcgcctcttcagtgtgccccacgtggtgcaacaagaaaccacgcttgcctatttggaaaaccaggtagccgccgctcttacactacagtcctcccacgagtatcggcactggctgctcgtgtacgccaggtatctcgttaatgagggcttcgagtaccgactgcgggaaatttgtaaagacctactaggacccgttcactatagtaccggatctcagtgggagtctacagtggtggggctccggaagagagaactactgaaagagctgctcccagtaattggacagaacctgcggtttcaaagactcttcaccgaatgccaggagcagttggatatccttcgggacaagtag

SEQ ID NO: 119905 - DNA, 2421 bp, synthetic construct
  misc_feature 1..2421: note = Description of Artificial Sequence: Synthetic coding sequence
  source 1..2421: mol_type = other DNA
atgtctccggtgctccaggaggacgacgagaaagacgaaaatattccaaagatgctctgccaaatggacaaccatttggcctgtgtgaattgtgttcgatggtccaattctgggatgtatcttgcaagtggcggggatgacaaactcatcatggtgtggaagcgggctacatacatcggtcctagcacagtgttcgggagcagtggcaaattggccaatgtagaacaatggagatgcgtctccattctacgtaatcacagcggggacgtaatggacgtggcctggtccccacacgacgcttggcttgccagctgcagtgtcgataacaccgtagtcatttggaatgcggtgaaatttccggaaatcttagcaacccttcgtggacacagcggactcgtgaaaggattaacatgggaccctgtcggaaaatacatagccagtcaagccgacgaccgtagtctcaaggtgtggagaactctggactggcaactagaaactagcataacgaaaccctttgatgagtgtggcggaaccacacatgtgctgagactgtcttggtcccctgacggacactacttagtaagtgcgcacgctatgaacaacagcgggccaacggcccaaatcattgaacgcgaaggctggaagaccaacatggatttcgttggtcacaggaaggccgttaccgttgttaagtttaaccccaagatcttcaaaaaaaaacagaaaaatggaagtagtgccaagccttcgtgcccatattgctgttgcgcggtaggtagcaaagaccgatctctgtctgtctggctgacttgcttgaagcggcctctggtagtgattcacgaactattcgataagtccattatggatatctcatggaccttgaatgggctcggcatcctggtctgcagtatggacggttcagtggcattcctcgacttctctcaagacgaactcggcgaccccctaagcgaagaggaaaagtctaggattcatcagagtacatacggcaagtctctggcgattatgaccgaggcgcagttgagtaccgctgtcatagagaacccagagatgctgaaatatcagaggcgacagcagcagcagcaattagaccagaaaagcgccgcgacgcgtgagatgggtagtgctacatccgtggctggcgtggttaacggtgagagcctggaggatatcaggaagaacctgctgaaaaaacaagtggagacgaggactgccgacggccgtcgtcgcatcacaccactctgtatcgcgcagttagatacaggcgatttctccacggccttcttcaattcaattcccctgagcggttccttggccggcaccatgctgagttcacactcaagcccccagctactgcccctggactcttcgacaccaaattctttcggcgcgtccaaaccgtgtactgagcccgtggtcgcggcttcagctcggcccgcgggagactcagtgaataaggactccatgaacgccacatcaacacctgcggccctgagtcccagtgtgctgaccaccccttctaaaatagagccaatgaaagctttcgacagccgcttcactgaacgctcaaaagcaacgcccggagcgcctgcactcacgtccatgacacccaccgccgtggagcggctgaaagagcaaaacctggtaaaggaacttaggcccagggatctgctggagagtagttccgatagcgacgaaaaggtgccactagccaaagcctcttctctttccaaacgcaagctggagctggaggtagaaaccgtggaaaaaaagaagaaaggccggcccaggaaggatagccggctgatgccagtctccctctccgtccagtctcctgctgcactgacagcagaaaaagaggccatgtgcctctctgcaccagcgctggctcttaagctgcccattccctcacctcagcgagccttcacattacaggtctcgtccgatccatctatgtatatcgaggtcgagaatgaggtgacagtggttgggggcgtgaagctgtctcgcctaaagtgcaaccgggaaggcaaagagtgggagacagtgttgacctcgagaatcctaacagccgccggctcttgcgacgtggtctgtgttgcgtgtgaaaagagaatgctaagtgtcttcagtacttgtggcagacgcctgctatcgcctattctgctccccagcccaatttcaaccctgcactgcacgggcagctacgtgatggcactgacagccgccgctactctttccgtgtgggatgtccacagacaagtggtggtcgtcaaggaggaatcactccattcaatcctggccgggacttggttcctgacttctcgaactcattggctgagcgttcaaaccttgggagccgcttgtcatcctcgcaccccgtgttgcgcccaagataggtag

SEQ ID NO: 119906 - DNA, 156 bp, synthetic construct
  misc_feature 1..156: note = Description of Artificial Sequence: Synthetic coding sequence
  source 1..156: mol_type = other DNA
atggcttctagtatgagatccttattttctgaccacggaaagtacgtagagagtttccggagatttcttaatcatagcaccgagcaccagtgcatgcaggagtttatggataagaagctccccggcatcatcgggcggtatcagaactgctgttag

SEQ ID NO: 119907 - DNA, 879 bp, synthetic construct
  misc_feature 1..879: note = Description of Artificial Sequence: Synthetic coding sequence
  source 1..879: mol_type = other DNA
atggcatcatctatgaggtctcttttttccgatcacggcaaatacgtggagtcttttaggaggttcctcaatcatagtacggaacatcaatgtatgcaggagttcatggataaaaaattgcccggaattataggaaggatcggcgacaccaagagcgaaatcaaaattctgtccatcggtggtggggccggtgagatcgacctgcagattctatctaaggtgcaggctcaatatcctggagtttgcatcaataacgaggtcgtggagcctagcgccgaacagatcgccaagtataaagagctggtggccaaaaccagcaaccttgagaacgttaaatttgcatggcataaggagacttccagtgagtaccaatcacgaatgctcgagaaaaaggagctccagaaatgggactttattcacatgatccagatgctctactacgtcaaagatatccccgcaactttgaagtttttccattccttgctcggcacaaacgctaagatgttgatcatagtagttagcggctcttccggctgggataagctgtggaagaagtatggctcccgatttcctcaggatgacttatgccagtacatcaccagcgatgatctcacacagatgttggacaatctcggcttaaagtacgagtgctatgacttgctgagtacaatggacatcagtgattgctttatagacgggaacgaaaacggcgacttactatgggactttttgacggaaacttgcaatttcaacgccacagctccgccggacctacgcgccgagctgggaaaggatctgcaggaacccgaattctccgcaaagaaggaaggcaaggtgctcttcaataatacgctgagctttatcgtgatcgaagcctag

SEQ ID NO: 119908 - DNA, 381 bp, synthetic construct
  misc_feature 1..381: note = Description of Artificial Sequence: Synthetic coding sequence
  source 1..381: mol_type = other DNA
atggcgtcttccatgagaagtttgtttagcgaccacggcaagtacgttgaatcctttaggcgctttctgaaccattccacggagcatcagtgtatgcaagaattcatggacaaaaagctgcctggcatcatcggcaggattggcgacacaaagtccgagatcaaaatcctgtccattggcggcggagccgattgcctgatccggggaagctctcgcgttcttaaaaggaattcatgcttcattctctgttcaacaaggcagaaagacaagccagggatgcgtatacacgacgaaaggagcagcgaactgcccttcggagccgcccgcttggaatctaaaagcgcatttccgtcctttctggtgtcgttcatcctgttttag

SEQ ID NO: 119909 - DNA, 879 bp, synthetic construct
  misc_feature 1..879: note = Description of Artificial Sequence: Synthetic coding sequence
  source 1..879: mol_type = other DNA
atggcttcttcaatgcggtcgctgttcagcgaccacggcaaatacgtcgagtcatttcggcgattcttaaaccactccaccgagcatcagtgcatgcaggaatttatggacaagaagctgccaggaatcataggcagaataggtgatacaaagtctgaaattaagatcctgtctatcggcgggggagccggcgagattgacctccagattctgagtaaagtacaagcacagtatcccggggtatgcatcaataatgaagtcgttgaaccaagcgccgagcagattgcaaagtataaagagctcgtggccaagacctctaacctcgagaacgtgaagttcgcatggcacaaggagacatctagcgagtaccagagccgcatgctggagaagaaggaattacagaaatgggattttatccacatgatacagatgctttactacgtcaaagacatcccagctaccctcaagttttttcatagtctgctgggcactaacgccaagatgctgatcatagtcgtgtccgggtcatctgggtgggataagttgtggaaaaaatatggtagtaggttccctcaggacgatctctgtcagtacattacctctgacgatctgacacagatgctagataatctgggcctcaagtatgaatgttatgacctattaagcaccatggatatttccgactgcttcattgacggtaacgagaacggcgacttgctgtgggattttctgactgaaacgtgtaacttcaatgccacggccccccccgacctgcgcgcagagctcggcaaggatctgcaggagcccgagttcagtgcaaaaaaggagggcaaggtcttgtttaacaacaccctgtccttcattgtgatcgaggcatag

SEQ ID NO: 119910 - DNA, 1464 bp, synthetic construct
  misc_feature 1..1464: note = Description of Artificial Sequence: Synthetic coding sequence
  source 1..1464: mol_type = other DNA
atgtccttgccgaattcatcttgtcttctggaggacaaaatgtgcgagggaaacaaaaccacgatggccagcccccagctcatgccactggtggtcgtattatccacgatatgcctggtgactgtggggcttaacctgctcgtgctgtacgcagtgcggtccgagcgtaagctccataccgtgggaaacctgtacatagtgtccctatccgtcgccgatctgattgtgggtgccgtcgtgatgccaatgaacattctctatctgctgatgagcaaatggtcccttggaagaccattgtgcttattttggttgagcatggactatgtggcttccactgcttcaattttctccgtatttatactgtgtatcgatcgttataggtccgtgcagcaaccactgagatacctcaagtaccgaacgaaaacccgagcttcagctaccatcctcggagcctggtttctgtcttttctctgggtgatcccgatattgggctggaatcacttcatgcagcagacttcagttcggcgcgaagacaaatgcgaaaccgacttttacgatgttacgtggtttaaggttatgacagctatcataaacttctatctccccactctcctcatgctgtggttctacgctaagatttacaaagctgtcaggcagcactgccagcaccgggagcttatcaacaggagcctccccagctttagcgagattaaattgagaccagagaatccaaagggcgatgccaagaagcctgggaaagagtctccatgggaggtactcaagcgcaaaccaaaggatgctgggggggggtccgtgcttaaaagcccttcgcagactccaaaggagatgaaatcacccgttgtgttctcccaagaagacgacagggaggtggacaagttgtactgctttcctcttgacatcgttcatatgcaggcggccgccgaagggtcttctcgtgattatgtggccgttaacaggtcccacggacagctgaagaccgatgagcagggcttgaatacacacggagcctcagagatcagcgaggatcaaatgcttggcgattcgcaatccttttcgagaacagacagtgacaccaccacggaaaccgctcccggaaagggtaagctaaggtcagggtcaaatacgggtctagattatatcaagttcacctggaaacggcttaggagtcacagtcgccagtatgtatctgggctgcatatgaaccgtgagcggaaagctgccaaacagctcggcttcatcatggcagcttttattctgtgctggataccgtatttcatattctttatggtcatagccttttgtaagaactgctgtaatgaacacctgcatatgttcactatttggcttggctacataaattccaccctgaatcctttaatatatccgctttgtaatgagaattttaaaaagactttcaagcgtatattgcacattcgaagctag

SEQ ID NO: 119911 - DNA, 39 bp, synthetic construct
  misc_feature 1..39: note = Description of Artificial Sequence: Synthetic coding sequence
  source 1..39: mol_type = other DNA
atgtccttgccaaattcgagctgcctgctggaagactag

SEQ ID NO: 119912 - DNA, 1464 bp, synthetic construct
  misc_feature 1..1464: note = Description of Artificial Sequence: Synthetic coding sequence
  source 1..1464: mol_type = other DNA
atgtcactgccaaattcaagttgtctccttgaagataagatgtgcgagggaaataagaccaccatggcatccccccagctaatgccgttggtagtggtgcttagtacaatttgcttagtcaccgttgggcttaacctgctagtgctctatgccgtgcgcagtgagcgcaagctacacaccgtcggcaacctgtacattgtctccttgagtgtcgccgatctgatcgtaggcgcagtcgtgatgcccatgaacattctgtacctgctgatgtctaaatggtcactggggcgtccactgtgccttttctggctgagtatggactatgtggctagtaccgcctctattttttctgtgttcatcctttgtattgacagatataggagtgtccaacaaccactgcgctaccttaagtatcgtaccaaaactcgggcctcagctaccatcctgggcgcatggttcctcagcttcctatgggtgatccctatccttggctggaaccatttcatgcaacagacttccgtgaggcgagaggataaatgcgaaaccgacttctatgacgtaacttggtttaaagtgatgacggccataataaatttctatctgcccaccctcttaatgttatggttttacgccaagatctataaagctgtgcggcaacattgccaacatcgggaattgataaatcggtccctgcccagcttcagcgagatcaagctgcgcccagagaacccaaaaggagacgctaagaaacctggcaaagagtctccttgggaagtgcttaagaggaaacctaaggatgcaggtggcgggtccgtactcaagagccccagccaaacacccaaggagatgaagtcaccggtcgtattttcccaagaggacgacagggaggttgataagctctattgtttcccgttggatatagtgcatatgcaggccgcagcagagggaagcagccgagactacgtggccgttaataggtcccatggccagcttaagaccgatgagcaaggactgaacactcacggagctagcgaaattagcgaagaccaaatgttgggcgatagccagtcattcagtcggacggattcagatacaactacagaaactgctccaggaaaaggaaaacttcgctccgggagcaacaccgggttggattatataaaatttacctggaagagactgcggagccacagtagacagtacgtatccggactacatatgaatcgggaaagaaaagctgctaagcagcttggatttatcatggcagccttcattttatgctggattccatacttcatcttcttcatggtgatcgcattctgcaagaactgttgcaatgagcacctgcatatgtttacaatttggctggggtatatcaacagcaccctaaacccgttaatctaccccttgtgcaacgagaacttcaaaaagacttttaaacggatcctccacatccgctcttag

SEQ ID NO: 119913 - DNA, 1464 bp, synthetic construct
  misc_feature 1..1464: note = Description of Artificial Sequence: Synthetic coding sequence
  source 1..1464: mol_type = other DNA
atgtccttgcccaactcctcatgtctgctcgaagacaagatgtgcgagggcaataaaactaccatggcttctcctcaactcatgccattggtggtagttctgagcaccatctgtctggtcacggtgggcctcaatttacttgtgctgtacgctgtcagaagtgagagaaagttacacaccgtgggcaatctttatatagtgagtctgtctgttgctgacctgatcgtcggcgcagtcgtcatgcccatgaacatcctgtatctcctcatgtcgaagtggtctctggggcgccctctgtgtctgttctggttatctatggattacgtagcctctaccgcctcgatcttctcagtctttattctctgcatcgatagataccgcagtgtacagcagccacttcgttacctaaaataccgaacgaaaacacgtgcaagcgccactatcctgggtgcctggttccttagcttcctgtgggtgattcctatcctcggttggaatcatttcatgcagcagacaagcgtgcgccgggaggataagtgcgaaaccgatttttatgacgtaacatggttcaaagttatgacggccattattaacttttatctgccaactcttctcatgttgtggttctatgccaagatctacaaggcagtgcgacagcactgccagcaccgggaactgattaacaggtcccttccttctttctccgagatcaaattgcgacctgaaaacccaaagggcgatgctaaaaagccaggcaaggagagcccctgggaagtcttaaagaggaagcctaaggacgcgggcggaggcagcgtgctaaaatcacccagtcagacaccaaaggagatgaaatctccagtggtattttcccaggaggatgaccgtgaagtggacaagttgtactgctttccactcgatatagttcacatgcaggccgctgctgaggggagctctcgcgactacgttgcagtgaaccggagccacggacaactgaaaactgacgagcaggggctgaacactcacggggcatccgagatatcagaagatcagatgctcggggattcccagtcgttcagccggactgattcggatacaaccaccgagaccgcccctggtaagggaaagttaagatcagggagcaacacagggctggactacatcaagttcacatggaagcgcttgaggagtcatagccggcaatacgtttccggtttgcacatgaatcgggagcggaaggccgccaaacaactcggcttcattatggcggccttcatcctgtgctggatcccatattttatattttttatggtgattgcattctgtaaaaactgctgcaatgaacatcttcacatgtttaccatctggttgggctatatcaactctacactcaatcctctgatatacccgctgtgcaatgagaattttaaaaaaacttttaagcgcatattgcacatcaggagttag

SEQ ID NO: 119914 - DNA, 816 bp, synthetic construct
  misc_feature 1..816: note = Description of Artificial Sequence: Synthetic coding sequence
  source 1..816: mol_type = other DNA
atggccgcccctcaagacgtccacgtgagaatatgtaaccaggagatcgtgaagtttgatttagaagtgaaagctctgatccaggacatccgggactgctctggtccactcagcgctctcacagagctgaatactaaggtgaaagagaagttccagcagctgcgccataggattcagcctgttctttatcaacgggctttcatctggactgctagtacctttttcttcaagcttacgtatagtttgactgatttctctagcacgcagcatgactttaactcccccaccacacctgtaaccttctcagacctggaacagctggctaaggaacaggacaaggagtccgagaaacagctcttactgcaggaggtcgagaaccacaagaagcagatgctgagtaatcaggcttcatggagaaaggccaacctgacctgcaagatagctatcgataatctggagaaagctgaactgctgcaggggggagatctactaaggcagaggaagactacaaaggagtccctggctcagacctctagcaccattactgaatcgttgatggggatctcgagaatgatggcccagcaagtgcagcagagcgaagaagcgatgcagagtctagtcaccagctcccgaactatcctcgatgccaacgaggagtttaagtccatgtctggtacgatacaattgggcaggaagctgattaccaagtacaatcgccgagagctcacagacaagcttctgatatttctggctctggctctctttctggccacagtcctctatattgtcaaaaagcggttgttcccctttctgtag

SEQ ID NO: 119915 - DNA, 1194 bp, synthetic construct
  misc_feature 1..1194: note = Description of Artificial Sequence: Synthetic coding sequence
  source 1..1194: mol_type = other DNA
atggctcccaatgggactgcgtcttccttctgcctggatagtacagcctgcaaaattactatcacagttgtcttggccgtgctgatccttatcaccgtggctggaaatgtggtggtttgtcttgctgttggtctaaacagaagactccggaacctcaccaactgcttcatcgtcagtctagcaattacagaccttctgttaggtctgctagtgctgccttttagcgcaatttaccagctgtcttgcaagtggagcttcggaaaggtgttctgtaacatttatacatcactcgatgtcatgctctgcacggcaagtatcctgaacctcttcatgatttccttagaccggtactgcgccgtcatggatccactgagataccccgtgctcgtcacccctgttagagtggctataagtctcgtgcttatatgggtgatcagtataaccctctcgttcctgagtattcacttgggctggaatagccggaacgaaactagcaagggaaatcacacaacatctaagtgcaaagtgcaggttaacgaagtctacggattagtggatggccttgtgaccttctatttaccactgctgatcatgtgcataacatattaccgcatattcaaagtggccagagaccaggcaaaaaggatcaaccatattagcagctggaaggccgctactatccgtgagcataaggccacagttacactggccgcggtgatgggcgcctttattatctgttggtttccttatttcaccgcgtttgtgtacagagggttacgcggcgacgatgccataaatgaggttcttgaagccatcgtactctggcttggctacgcaaattccgccctgaatcctattttgtacgccgctttaaacagagattttcgtactgggtaccaacagctgttttgctgtagattagccaaccggaattctcacaagacttcccttaggtccaatgcatcccagctgagcagaactcagagtagagagcctagacagcaggaagagaagccgttaaaactccaggtctggtctgggactgaggtcacagccccgcagggggcgaccgatcggccttggttatgcctcccagaatgctggagcgtcgaactaacccattcttttattcatttgtttatccacagctttgccaatattcatcccatacccacaacctgccaggagttgtag

SEQ ID NO: 119916 - DNA, 1173 bp, synthetic construct
  misc_feature 1..1173: note = Description of Artificial Sequence: Synthetic coding sequence
  source 1..1173: mol_type = other DNA
atgcctgacaccaacagcaccatcaatctctcactgtcaacccgcgttacgctggcattttttatgagtctagtagcgttcgccataatgctgggcaatgcccttgtcattctcgcttttgtagtggataagaatttgcgacatagaagctcttacttcttcctgaacctcgcgatttccgatttctttgtgggggtaatctccattcccctatatatccctcacacgctgttcgagtgggacttcggaaaggagatctgcgtcttctggctgaccactgactacctgctgtgcacggcaagcgtgtacaacattgtgctcatctcgtacgatcggtatctgtcagtctctaacgccgttagctaccgaacacagcatacgggggtgttgaaaatcgtgactctcatggttgccgtgtgggttctcgcatttctcgtgaacgggccaatgatactcgtcagcgagagttggaaggacgaaggctctgagtgtgaacccgggtttttctccgagtggtacattctggccattacatcctttctcgagttcgttatccctgtcatcctggttgcctactttaatatgaacatttactggtcactgtggaagagagaccacctcagccgatgtcaatcgcatccagggcttaccgctgttagctccaacatctgtggacactcttttcggggacgcctttctagtcggcgatcactgagcgcctcaactgaggttcctgcttcttttcatagcgaacgacagcgacggaagtcttcgctaatgttctcatctcggactaagatgaactcaaataccattgcatccaaaatgggaagcttctcccagtccgattctgtggcactccatcagcgggaacacgtggaactgctcagagctcgacggcttgccaagagtctcgctattctcctcggtgtgttcgctgtttgttgggctccttacagccttttcacaatcgtgcttagcttttattccagtgcgacaggcccaaagtccgtctggtaccgcatagccttctggctccagtggttcaatagctttgtgaaccccctcctgtatcctctgtgtcataaaagattccagaaagcatttctcaaaatcttttgcattaagaagcaacccctcccgagtcagcattcccgttccgtcagctcttag

SEQ ID NO: 119917 - DNA, 909 bp, synthetic construct
  misc_feature 1..909: note = Description of Artificial Sequence: Synthetic coding sequence
  source 1..909: mol_type = other DNA
atgcccgacacaaattctaccatcaatctgagcctgagtacaagagtcactctcgcattttttatgtccttggtggccttcgctatcatgctcggtaacgcactggttattctggcattcgttgtggacaagaatctgcgacatagatcaagttacttcttcctgaacctggccataagcgatttctttgtcgtaagcgagtcttggaaggacgagggatcagagtgtgaacccggatttttttccgagtggtacattctcgctattactagttttctggagtttgttattccagtgatcctcgtggcctattttaacatgaatatttactggtctctttggaagcgggatcacttatctaggtgtcagtcccatcccgggcttacagcagtttcctcaaacatctgcggacacagcttcaggggcagactgtcctctcgccgatctctaagtgctagtaccgaggtgccagccagcttccattccgaaagacagaggagaaagtcaagtctgatgttcagctctagaacgaagatgaatagtaatacgatagcttcaaaaatggggagttttagtcaatcagacagcgtagccctgcaccaacgtgagcacgtcgagctgctgcgagctcggcgactggcaaaatctctcgcaatcctgctgggcgtgtttgcagtctgctgggccccctattcactttttaccatagtgctttcgttctactctagcgcgaccggaccgaagtcggtgtggtatcgtatcgcgttctggctccaatggttcaatagctttgtgaaccctctgctgtaccctctctgccacaagagattccagaaggctttcctaaagatattctgcattaaaaagcagcctctcccaagtcagcactcccgttctgtaagttcctag

SEQ ID NO: 119918 - DNA, 174 bp, synthetic construct
  misc_feature 1..174: note = Description of Artificial Sequence: Synthetic coding sequence
  source 1..174: mol_type = other DNA
atgaagttctttgtcttcgccctagtcctggcattgatgatctccatgatctctgccgatagccacgaaaagcggcatcacggctataggagaaagtttcatgagaagcaccatagccaccgggaattccccttttatggtgattacggctccaactacctttacgacaattag

SEQ ID NO: 119919 - DNA, 174 bp, synthetic construct
  misc_feature 1..174: note = Description of Artificial Sequence: Synthetic coding sequence
  source 1..174: mol_type = other DNA
atgaaattctttgtcttcgcgctggtgcttgccctgatgatttctatgatctcagcagattcccacgaaaagcgtcaccacggttaccgccgaaaattccatgaaaaacaccactctcatcgagagtttcctttttatggggattacggatctaactacttgtacgataattag

SEQ ID NO: 119920 - DNA, 156 bp, synthetic construct
  misc_feature 1..156: note = Description of Artificial Sequence: Synthetic coding sequence
  source 1..156: mol_type = other DNA
atgaagtttttcgtattcgcccttatccttgcgctcatgctctctatgaccggagccgacagccacgcgaaaaggcaccatggctacaagcgaaagttccatgagaagcatcacagtcaccgaggatacagatccaactacctctacgacaattag

SEQ ID NO: 119921 - DNA, 156 bp, synthetic construct
  misc_feature 1..156: note = Description of Artificial Sequence: Synthetic coding sequence
  source 1..156: mol_type = other DNA
atgaagttctttgtgtttgccttaattctcgctttgatgctgtccatgacaggcgccgactctcacgccaagcggcaccacggatataaaaggaaattccacgagaaacatcatagtcatcgcggctaccgatcaaactacctttacgacaactag

SEQ ID NO: 119922 - DNA, 1989 bp, synthetic construct
  misc_feature 1..1989: note = Description of Artificial Sequence: Synthetic coding sequence
  source 1..1989: mol_type = other DNA
atgatggaaccagaggagtaccgagagcggggcagggaaatggtggactacatatgccagtatctgtccaccgtacgcgagcggcgggtgacgcctgacgtgcagccaggatacctgcgggcccagttgcctgaatcagcccctgaagatccagactcttgggattccatatttggcgacattgagcgaatcatcatgcctggtgttgtgcattggcagtccccccacatgcatgcttattaccctgctttgacatcttggcctagtctgttgggcgacatgctggccgatgccattaattgtctcggatttacctgggcctctagtcccgcatgcaccgaactcgagatgaacgtgatggactggctggccaagatgctggggcttcccgaacactttctacaccaccacccaagctctcaaggaggcggagtactccaatcaacagtgtcagaatcgactctgatcgccttgctcgcagcccgcaagaacaaaatccttgagatgaaaacttctgagccggacgctgatgagtcatgtctgaatgcccgcctcgtggcctatgcttcggaccaagctcacagttcagtggagaaagctggactgatttccctggtaaagatgaagtttctaccagtggacgataacttcagtctcagaggcgaagccctgcagaaggctatcgaggaggacaaacagcggggactggttcctgtgtttgtctgcgctactctgggaacaacaggagtgtgcgcctttgactgtctgtccgaactggggccaatttgtgctcgggagggattatggctgcacatagacgcagcttacgccggcactgcttttctctgccccgagtttagaggatttctgaagggcatcgaatacgctgattcctttaccttcaatccttcaaagtggatgatggtgcatttcgactgcactggtttttgggttaaggataagtataagcttcaacagacctttagcgttaacccaatctacctacggcacgccaattcgggcgtagccactgactttatgcactggcagattcctcttagtcgccgtttccgttctgtgaagctttggttcgtgatccgctcattcggtgttaagaatctgcaggcacacgttaggcacgggacggaaatggctaaatactttgagtctctagtccgaaacgacccttcatttgaaatccctgccaagcgacatctcggactggtggtatttcgcctgaagggacccaattgtctcaccgagaacgttttgaaggaaatagccaaggccgggcgcctgtttttgatccccgcaactattcaggacaaactgattatccgatttacagtcacgtcacagtttaccaccagagatgacattctgagagattggaatttgatacgggacgcagcaaccctcatcctttcccagcactgtacaagtcagccatctccccgggtgggcaacctcatctctcagatccgaggggcaagggcttgggcttgtgggacaagcctgcaatccgtctccggagcgggtgacgatcccgtccaggcgaggaagatcatcaaacagccccagagagtgggcgctggaccaatgaagcgggagaatggactgcaccttgagaccctcttggatcccgtcgacgactgcttctcggaggaagctcctgacgcgacaaaacacaaattaagcagcttcctgttttcatatctcagcgtccagactaaaaaaaagactgtgaggagcttatcatgtaacagtgtacctgtttctgcccaaaagccgcttccaaccgaggcctctgtgaaaaacggcggctccagcagagttcgcatcttttctaggtttcccgaagatatgatgatgctgaaaaagtcagcattcaaaaagctgatcaagttctactctgtgcccagcttccctgagtgttcatcacagtgcggtttgcagctgccatgttgccctctgcaggccatggtgtag

SEQ ID NO: 119923 - DNA, 2100 bp, synthetic construct
  misc_feature 1..2100: note = Description of Artificial Sequence: Synthetic coding sequence
  source 1..2100: mol_type = other DNA
atgggccaccacagaccctggctgcatgcttcagtgctgtgggctggggtggcgtcactcttgctgcccccagctatgacgcaacagttaagaggagacggcctgggatttagaaaccgcaacaactcaacaggcgtggcaggacttagtgaggaggctagcgctgagctgcggcatcacttgcacagccctcgcgatcacccggacgagaataaggacgtgagtactgagaacggccaccacttctggtcccatccagacagggagaaggaagatgaggacgtaagcaaggagtacgggcacctgctgcccggacaccgctcccaagaccacaaagtgggagacgagggcgtttcaggggaggaggtcttcgccgagcacggaggccaggctaggggccatagaggccatggatccgaggacactgaggatagtgctgagcacagacaccatctgccaagccatcggagccactcccaccaggacgaagacgaagacgaggtggtgagctctgagcatcatcatcatatactgcgccatggccaccgcgggcacgacggcgaggacgatgagggcgaggaggaggaggaagaggaagaagaggaggaagaagcctctaccgaatacggccatcaggcgcaccgccatcggggccacggaagtgaggaagatgaagatgtgtccgacgggcaccaccaccatggaccttctcacagacatcaaggtcatgaagaagacgacgacgatgacgacgacgatgatgacgatgatgatgacgacgacgtcagtattgagtaccgccatcaagcccatagacaccagggtcacgggatagaggaggacgaagacgtgagtgacgggcatcaccatagggatccctcgcaccggcacagatcacatgaggaggacgataatgacgacgacgatgtctccacggagtatgggcatcaggctcatcggcaccaagaccatcgcaaagaagaggtggaggctgtatccggagagcaccatcaccatgttccagatcatcgacatcagggtcaccgggatgaggaggaggatgaggatgtttccacagagagatggcaccagggtccccagcacgttcaccacgggctggtcgatgaggaggaagaagaggaagaaattacagttcaattcggtcactacgttgcctctcaccagcccaggggccacaagtccgacgaagaagactttcaagatgaatacaagactgaagttcctcaccaccaccaccatcgcgtgccccgggaagaggacgaagaggtcagcgccgaactcggacaccaggctcctagccacaggcagtcccatcaagacgaagaaaccggccatgggcagaggggcagcatcaaggaaatgagtcaccatcccccaggtcatactgtcgtaaaggaccgcagccaccttaggaaagacgattcggaagaagaaaaggagaaggaggaagatccgggatctcacgaagaggacgacgaatctagcgagcagggcgagaaggggactcaccacggatcccgggaccaggaagacgaggaagacgaagaagagggacacggcttatcccttaatcaggaggaagaggaagaagaggataaagaagaagaggaggaggaggaagatgaggaacgaagggaggagcgtgcggaggtcggtgctcccctgtcccctgaccacagtgaggaagaagaagaggaggaggagggtttggaggaagacgagccaaggttcacgatcatcccaaatccattagatcgtagggaagaagccggcggagcgtccagcgaagaggaatctggcgaggataccggtccacaggacgcacaggaatatgggaactaccaaccgggatccctctgcggctactgctctttttgtaatcgatgtactgagtgtgaatcttgccattgcgacgaggaaaatatgggagaacattgtgatcagtgtcagcactgccaattctgttatctttgtccgctggtgtgtgaaacggtgtgcgccccgggctcctacgtagattacttctcttcttccctgtaccaggccctagccgacatgctggaaacccctgaaccatag

SEQ ID NO: 119924 - DNA, 1170 bp, synthetic construct
  misc_feature 1..1170: note = Description of Artificial Sequence: Synthetic coding sequence
  source 1..1170: mol_type = other DNA
gaagatgacaatgatgatgacgacgtaagcaccgaatacggccatcaagctcacagacaccaagaccatcggaaggaggaggtcgaggccgtcagtggagagcaccatcaccacgtgcccgaccatcgacaccagggacacagggacgaggaagaggacgaagatgtgtctacagaacgctggcaccagggacctcagcacgtgcaccacggcttggttgatgaggaagaagaggaagaggagatcaccgtccagttcgggcactacgttgcctcccaccagcccagaggccataagagtgacgaggaagactttcaggacgagtataagacggaagtccctcatcatcatcaccacagggtgccgcgggaggaagacgaagaggtatcggcggagctgggacaccaagccccatcacacaggcaatcacaccaagacgaggaaaccggacatggtcagcgcgggtccataaaggagatgagtcaccacccccctggccatacagtggtaaaagaccgttcccacctacgaaaggacgatagtgaagaggagaaggaaaaggaggaagatcctggatcccacgaggaggacgatgagtcatcagagcagggcgagaagggtacacatcacggatcgagggaccaggaagacgaggaagatgaagaggagggccacgggctgtctctaaatcaagaagaagaagaggaggaagatgaagagagacgagaagagcgagctgaggtcggagccccactgagtccagaccatagcgaagaggaggaggaggaggaggagggtctggaagaagacgagccgcgttttactatcatacccaatccgcttgacagacgcgaagaggccggaggtgcaagcagcgaggaagaaagcggtgaggacaccggtccacaggacgctcaagagtatggcaattaccagcccgggtctttgtgtggatactgcagcttttgcaataggtgtacagagtgcgaaagctgtcactgcgatgaagaaaatatgggcgagcattgcgatcagtgccagcattgccaattctgttacctttgccccctggtatgcgaaaccgtttgcgcacctggctcttacgtggattatttcagcagctcgctatatcaggccctggcagacatgctggaaactccggagccctag

SEQ ID NO: 119925 - DNA, 1365 bp, synthetic construct
  misc_feature 1..1365: note = Description of Artificial Sequence: Synthetic coding sequence
  source 1..1365: mol_type = other DNA
atggggcatcaccggccgtggctgcatgcttcagttctgtgggccggagttgctagcttgctgttgcccccagctatgacacagcagctgaggggcgacggactgggcttccggaatagaaataaggatgtgtcaactgagaatgggcatcacttttggtctcaccctgatagagaaaaggaggatgaagacgtgtccaaggagtatggccacctactcccaggacacaggtcccaggaccacaaagtaggtgatgagggtgtgtcaggtgaggaggtctttgccgaacatggcggccaggcacgcgggcaccgtgggcacgggtctgaagacacagaagattccgcagagcacagacatcacctgccttcccaccggagccattctcaccaagatgaggacgaagacgaggtggttagctccgagcaccatcaccacatcctaagacacggccacagaggacacgatggcgaggacgatgaaggagaggaagaggaggaggaggaagaggaggaggaagaggcatcaactgagtatggacatcaagcgcatagacatcgggggcacgggtctgaggaagacgaagacgtgtctgacgggcaccaccaccacggtccttcacacagacaccagggccacgaggaagacgacgatgacgacgacgacgacgacgacgacgacgacgatgatgacgtcagcatcgagtaccgtcatcaggcacataggcaccagggccacggcattgaagaggatgaagatgtctctgatggacaccatcaccgcgacccctctcaccggcataggtcacatgaagaggacgacaatgatgacgacgacgtctcaactgaatacggtcaccaagcccacagacatcaggaccaccgcaaggaggaagtcgaggccgtgtctggggagcaccaccatcacgttcctgatcacagacaccaagggcaccgggacgaagaagaggacgaggatgtctccacagaaagatggcatcagggacctcagcacgtgcaccacggcctagtcgacgaggaggaggaggaggaggagatcactgtccagttcggtcactatgtggcctctcaccagcctcgggggcataaatccgacgaggaggattttcaggacgagtacaagactgaggtccctcaccaccaccatcacagagttcctcgagaagaggatgaggaagtgtctgccgaacttggacatcaagcacctagccacagacagtcgcaccaggacgaagaaaccgggcacggtcagcggggaagcataaaagaaatgagtcaccatccccctggccacacagtcgtcaaagatcggagccacctgagaaaggatgactccgaagagtag

SEQ ID NO: 119926 - DNA, 381 bp, synthetic construct
  misc_feature 1..381: note = Description of Artificial Sequence: Synthetic coding sequence
  source 1..381: mol_type = other DNA
atggctgacgaaatagctaaggctcaggtagcacgacccgggggggatacgatcttcggcaagatcatcagaaaagagattccggccaagatcatcttcgaggatgatcgctgcctcgcattccatgacatctcacctcaggcccctacccacttcttggttattccaaagaaacacattagccagataagcgtagctgaggatgatgacgagagtctgttggggcatctgatgatagtgggaaaaaaatgcgcagccgacctgggtctcaacaaaggataccggatggtcgtaaatgagggttccgacgggggccagtctgtgtaccatgtgcacttacatgtcctgggcggcaggcagatgcattggcctcccggctag

SEQ ID NO: 119927 - DNA, 492 bp, synthetic construct
  misc_feature 1..492: note = Description of Artificial Sequence: Synthetic coding sequence
  source 1..492: mol_type = other DNA
atggcggctgcggttgtgctggctgccggactccgggctgctcggcgagccgtggccgcgaccggggttagaggcggacaagtccggggggccgcgggagtgacagacgggaacgaagtggctaaggctcagcaggccactcccggtggggccgcccctacaatcttctcccggatcctggataaatccctccctgccgatatcctctacgaggaccagcaatgtctggtctttcgtgatgtcgcgccccaggccccagtgcacttcctggtgataccgaaaaagcctattcctagaatttcgcaggccgaagaggaggaccagcagctgctgggccatttgctactggttgctaaacagacagctaaagcagaaggcctgggagatggctaccgcctagtgattaacgacggaaagcttggggcccaaagtgtgtatcatttacacatccacgtgctcggaggtagacagttgcagtggcccccgggctag

SEQ ID NO: 119928 - DNA, 615 bp, synthetic construct
  misc_feature 1..615: note = Description of Artificial Sequence: Synthetic coding sequence
  source 1..615: mol_type = other DNA
atggctaaagtacaagtgaacaacgtggtggtgctggacaacccgtctcccttctacaatcctttccaattcgagatcaccttcgaatgcatcgaggacctaagcgaagacctggagtggaagatcatctacgttgggtctgcagagagtgaagagtacgaccaggtgctcgacagcgttttagtcggtcccgtgccggccggccgccacatgttcgtgtttcaggctgacgctcccaatcctgggctgatccccgacgctgacgctgtgggggtgaccgtagtgctcattacctgcacttaccgggggcaggaattcattcgcgtggggtattacgtcaataatgagtacaccgaaactgaactacgcgagaaccccccagttaaacctgacttttctaaattacagcgaaacattttagcaagtaatcccagagttaccaggtttcacatcaattgggaagataacactgaaaagttggaggacgcagaaagtagcaatcccaacctgcagtccctgctttccacggacgccttgccgagcgcttcaaaaggatggtccacttctgagaactcccttaacgttatgctggagagtcacatggattgtatgtag

SEQ ID NO: 119929 - DNA, 1329 bp, synthetic construct
  misc_feature 1..1329: note = Description of Artificial Sequence: Synthetic coding sequence
  source 1..1329: mol_type = other DNA
atggcaggcgaaggcgaccagcaggacgctgcccacaacatgggcaatcacctcccgctccttccagctgagtccgaagaagaggatgagatggaggtggaggaccaggatagtaaggaggcaaagaaacccaacattatcaactttgataccagtctgcccacctctcacacctacctgggagccgacatggaggaattccacggtaggactcttcacgacgatgatagttgtcaggtgatcccagttttgccccaggtgatgatgatcctgatacccgggcagaccctgccactccaattatttcaccctcaagaggtgtctatggtgcggaacctgatccagaaggatcgaacatttgctgttcttgcatactctaatgttcaggagagagaagcccagttcgggacaactgctgaaatttatgcgtaccgagaggaacaggattttggaatagaaatcgtgaaggtcaaggctattggccgtcaacgattcaaagtgcttgagcttcgaacccagagcgacggaatccagcaagcaaaggttcagatcctccctgagtgcgttttaccgagcacaatgagcgcggtgcagctggaaagcctgaataagtgccagatttttcctagtaaaccagtgagtagggaggaccaatgttcttacaagtggtggcaaaagtatcagaagcgaaagttccactgtgcgaatttaacatcatggcctaggtggttgtatagcctctatgacgcagaaacattgatggacagaattaagaaacaactgagggaatgggatgagaatttgaaggatgattccttaccgtctaaccccattgacttctcataccgagttgctgcatgtctcccaatcgacgacgtacttagaatccagctcctgaagattggttctgcaatccagcgtctgagatgtgaactggatattatgaacaaatgcacctctctatgttgtaagcagtgccaggagacagagatcaccacaaaaaacgagatcttttccctgagcctgtgcggtccaatggctgcctatgtcaatccccacggatatgttcacgaaaccctgacggtgtacaaggcatgtaatctcaacttgataggcaggccgagcaccgaacactcatggtttcctggatacgcatggaccgtggcacagtgcaagatttgtgccagccacatcggatggaaattcacagctactaagaaagatatgtcaccccagaagttttggggcctcacacgctcggcccttttacccaccatccccgatactgaggacgagatctcacccgacaaagtaatcctttgtttgtag

SEQ ID NO: 119930 - DNA, 1308 bp, synthetic construct
  misc_feature 1..1308: note = Description of Artificial Sequence: Synthetic coding sequence
  source 1..1308: mol_type = other DNA
atggctgaacgcgcagcacttgaagaactggtgaagctgcagggtgaaagggttaggggtctaaagcagcaaaaggcaagtgccgaacttatcgaggaagaagttgcaaagcttctgaagttgaaagcacagcttgggcctgatgagtccaaacagaaatttgtgcttaagacgcccaagggaacacgcgattattccccaagacagatggccgtccgagagaaggtgttcgacgtgatcattagatgtttcaaaaggcacggcgccgaagttatcgatacgcccgtgttcgagctgaaggatttcgacatcgccggtaactttgatcccatgataccagatgctgagtgcctgaaaatcatgtgcgagatcctgtcctcactgcagatcggcgattttctggttaaagtcaatgatcgcaggatacttgacgggatgttcgccatttgcggcgtgtctgattctaagtttcgtactatctgctcttccgtggataagttggacaaagtgtcttgggaggaggtgaaaaacgagatggttggggagaaagggctggcacctgaagtagcggacaggataggcgactacgttcagcagcacggcggcgtgtccttggtggagcagctgctgcaggacccgaagctgagccagaataagcaggccctggagggattgggggatttgaaactgttatttgagtatctcactttattcggaatcgacgataagatcagttttgacctttctctggcccgtggactggattactacaccggagtaatttacgaggccgtactgctgcaaacacctgcccaggccggggaagagcccttgggggtcgggagtgtggctgccggcgggcggtacgatggccttgtcggcatgtttgacccaaagggtagaaaagtgccttgcgtgggtctgtccatcggggtagagcgtattttctcgatagtcgagcagaggttggaggccctagaggaaaagatacgaacaaccgagacccaagtgctggtggcttccgctcagaaaaaactgctggaggaacgtcttaagcttgtcagtgagttatgggatgccggaattaaggctgagctgctctataagaagaatccaaaactactgaatcaattgcagtattgtgaagaagccgggatcccactggttgccatcatcggggagcaagagctcaaagacggagttatcaagctgaggagcgtgacctctcgcgaggaggtggacgttcggcgagaggacttggtggaagaaatcaagcgtcggactggacagcccctttgtatttgctag

SEQ ID NO: 119931 - DNA, 1188 bp, synthetic construct
  misc_feature 1..1188: note = Description of Artificial Sequence: Synthetic coding sequence
  source 1..1188: mol_type = other DNA
atggcagagcgcgcagcattagaggagctggtgaagttgcagggcgagagagtgcggggccttaagcagcagaaggcatccgccgagctgatcgaggaagaggtggccaagctgctgaagttgaaggcccaactgggtcccgacgagtccaagcaaaagtttgtgctgaagacaccaaaagatttcgacatagctggcaacttcgaccccatgattcccgacgctgagtgcttaaaaatcatgtgcgagattctttcaagcttacaaattggcgattttctggtgaaggtgaatgacaggcgaatccttgatgggatgtttgctatctgcggcgtgtctgattccaaattccggaccatttgcagctccgtggacaaactggacaaggtctcatgggaagaggtgaagaacgaaatggtaggggagaagggactagcgcctgaggttgccgaccgtattggtgattatgtacagcagcacgggggagtttcactggtggagcagctactgcaagatccaaagctatcgcagaataagcaagcccttgaaggtctgggagatctaaagttgcttttcgaatatttgactctttttgggattgacgataagattagcttcgatttgtccttggcaagagggctggattactacacaggcgtgatctacgaagctgtcctgctccagacgcccgcccaagccggagaggagcccttgggcgtgggctcagtggccgctggggggagatacgatgggctggtgggaatgttcgatccgaagggccgtaaagtgccctgtgtgggtctgagtattggcgtagagaggattttttctatcgtggagcagcgtctggaggccttggaggaaaagattcggacaaccgaaacccaggtgctggtggcttcagcgcagaaaaaacttctggaagagcgcctgaaactggtctccgaactatgggacgccggcatcaaagctgagctgctgtacaaaaagaaccctaagctgctgaatcagctgcagtattgtgaagaggcaggtatcccgctggttgctataatcggcgaacaggagctaaaggacggagtcattaagctccgatcggtgacatcccgcgaagaggtggacgtacggagggaggacctggtggaggagatcaaacggcgtactggacagccactctgcatttgctag

SEQ ID NO: 119932 - DNA, 1410 bp, synthetic construct
  misc_feature 1..1410: note = Description of Artificial Sequence: Synthetic coding sequence
  source 1..1410: mol_type = other DNA
atggctgagcgggctgccctagaagagctagttaaactgcaaggcgagagagtacgtggtctgaagcagcaaaaagcatcagccgagctgatagaagaggaggtcgccaagctcctcaaactcaaggcccagttggggccagatgagtctaagcaaaaatttgtgctcaaaacacccaaggagacactaatgggcaaatatggagaggattctaagttaatctatgacctgaaagatcagggcggggaactgctatctctgagatacgatttgactgttcctttcgcacgctaccttgccatgaacaagctgactaatatcaaacgatatcacatcgcaaaggtgtatcgtagagacaaccctgccatgacccggggaagataccgggagttctatcaatgtgactttgacattgcgggcaacttcgaccccatgatcccagacgctgaatgtctgaaaatcatgtgtgagatactatccagcctgcagatcggggactttctggtgaaggtgaatgatcgtaggatcctggacgggatgtttgccatctgcggtgtatccgattccaagttccggaccatttgttcttctgttgacaagcttgataaagtttcatgggaggaggtgaagaatgaaatggtgggagagaagggtttggccccagaagtagcagaccgaatcggagattacgtgcagcagcacggtggcgtttctctggtcgagcagttgcttcaagatcctaagttgtcccagaacaagcaggcgcttgaagggctgggggatctgaagctcctgtttgaatacctgacccttttcggcatcgatgataagatcagcttcgacctgtcgctagcacggggcctcgactactacaccggggtcatttacgaagcagtccttttacagacaccagcgcaggctggcgaagagcctttgggggttggcagtgtggcagccggcggaaggtacgacggactcgtgggaatgtttgaccccaaaggccggaaggtgccatgcgtgggtctttccatcggagtggaacgcattttctctatcgtggagcagcgtttggaagctttagaagaaaagattagaaccaccgaaacccaagtactcgtggccagcgcccagaagaagttgttggaagagcggctcaaactggtatcagaactatgggatgctggcattaaagccgagctgctgtacaaaaagaacccaaaacttctgaatcagctgcaatactgtgaggaggcagggatccccctcgtggccatcattggcgagcaggagttaaaggacggggttattaagctgagaagtgtcacttctagggaagaagtggatgtgcgcagagaagacctggtggaggagatcaaacgacgcacaggccagcccctctgtatctgctag

SEQ ID NO: 119933 - DNA, 945 bp, synthetic construct
  misc_feature 1..945: note = Description of Artificial Sequence: Synthetic coding sequence
  source 1..945: mol_type = other DNA
atgaccagaggacggtatcgagagttctatcagtgtgactttgatattgcaggcaactttgatcccatgatcccagacgccgaatgcctcaagattatgtgcgagattctctccagcctccaaatcggtgatttcttagtaaaagtgtcctgggaagaggtgaaaaacgaaatggtcggagagaaggggttggccccggaggttgcagaccgcattggggattatgtgcaacaacacggtggagtctccttagtcgaacagctgctccaggaccccaagctctcccaaaataagcaggcactggagggtctgggagatcttaaactgttgttcgagtatctgacgctatttgggattgacgataagatcagtttcgatctgagcttagcacgcggcctggattattatacaggggttatctatgaagccgtgttgttgcagactcctgctcaggcaggtgaagaacccctaggggtcggtagcgtagcagccgggggcaggtacgatggtctggtcggaatgttcgacccaaaagggcgaaaggtgccttgtgtgggactctcaattggggtggagcgaatattctctatcgtggagcaaagacttgaagccctcgaggaaaaaatacgaaccacggaaacacaggtccttgtggccagcgctcagaagaagctccttgaggagcggcttaaacttgtgagcgaactttgggacgcagggatcaaggctgagcttctctacaaaaagaaccccaagcttctgaaccagctccaatattgtgaagaggccggaatcccgctagtggctatcataggcgagcaggaactcaaggacggcgtgatcaagttaaggtccgttacatcacgtgaggaggtggacgtacggcgggaggatctggtcgaggagatcaaaagaagaaccggtcaacctctgtgtatttgctag

SEQ ID NO: 119934 - DNA, 1530 bp, synthetic construct
  misc_feature 1..1530: note = Description of Artificial Sequence: Synthetic coding sequence
  source 1..1530: mol_type = other DNA
atggcagaacgagccgcgttagaagagttagtgaaactccagggagaacgcgttcggggtctcaaacagcagaaggctagcgcggaactgattgaggaggaagtggcgaaactgctcaagctgaaagcccagctgggacctgacgagagcaaacagaaattcgtgctcaaaacaccaaagggaacccgcgattatagtccgaggcagatggccgtgcgcgaaaaagtgtttgatgtgatcattcgttgctttaaacgccatggggctgaggtaatcgacacaccagtctttgagctgaaagaaacacttatgggcaagtatggagaagatagcaagctcatctatgacctgaaggaccaaggcggcgagctgctttctctcagatatgacctgaccgtgcctttcgcccgatatctagctatgaataagctcaccaacataaagcggtaccacatcgctaaagtgtatcggagggacaaccctgctatgacccgaggcaggtacagggagttttaccagtgcgacttcgatatagccggcaattttgacccaatgattcctgacgccgagtgtctcaagatcatgtgtgaaatcctgagttccctgcaaatcggtgactttttggtcaaagtcaacgacaggcgcattcttgatgggatgttcgccatttgtggcgttagcgactctaaattccgaacgatctgttcaagtgttgacaagctggataaggtatcttgggaagaagtgaaaaacgagatggtcggcgaaaaaggactcgccccggaggtcgccgaccgaattggcgattatgtccagcagcacgggggagtgtcccttgtggagcaactacttcaggacccaaagcttagtcagaataaacaggctctagagggactcggtgacctaaaattgctctttgagtatcttacacttttcggaatagacgataagatttcctttgacctgagcttggccaggggactcgactactacacgggggtaatctatgaggctgttctgctacagacccccgcccaggctggagaagagcccctcggggtgggctccgtggcggccgggggacgatatgacggtctggttggcatgttcgaccccaagggacgaaaagtgccttgtgtggggctttccattggcgtggagcggatcttctcaatcgtcgaacagcggctcgaggcactggaagaaaaaatcaggacaaccgaaacgcaggtcctcgtagcctcagcgcagaagaagttgctggaggagaggttgaagctggtgtcagaactgtgggacgctggaatcaaggctgagctgctttataaaaaaaatcctaaacttctgaaccagctgcagtattgcgaggaagctgggattcctctggtggccattatcggtgagcaggagctgaaggatggggttatcaaattacgctcagttacatcccgagaagaggtagacgtccgaagagaggatttggtcgaagaaattaagcgacggacagggcagccactgtgcatctgctag

SEQ ID NO: 119935 - DNA, 1323 bp, synthetic construct
  misc_feature 1..1323: note = Description of Artificial Sequence: Synthetic coding sequence
  source 1..1323: mol_type = other DNA
atggcagtgagagaaaaggtctttgacgttataatccggtgttttaaaagacatggggcagaggtgattgacacgcccgtttttgagcttaaagaaacactgatgggaaaatacggcgaggattctaaactcatatacgatctgaaagaccaaggtggggaactgctgagtctgcgttacgacctcactgtgcccttcgcccgatacttagccatgaataaactgaccaacattaagaggtaccatattgctaaggtctacaggcgagataatccagctatgactagggggagatatcgggagttttaccaatgtgacttcgatatcgccggtaatttcgaccctatgattcccgacgctgaatgtctgaagataatgtgtgaaatactctcctccttacaaattggagactttcttgtgaaagtgaacgatagacgtatcctggacggtatgttcgcaatctgcggtgtgagcgacagcaagttccgcactatctgctcctccgttgacaaactggacaaggtgagttgggaggaggtcaagaatgagatggtcggagaaaagggactggcgccagaggtagccgaccgcatcggtgattatgttcaacagcatggaggggtgtccctcgtcgagcagctcttgcaggaccccaaattgagccagaacaagcaagcacttgagggcctcggggacctgaagctgctgtttgagtacttaacccttttcggcatcgatgataagattagctttgatctctccctggctcggggtcttgattactacacaggggtcatatacgaagccgtcctcttgcaaacgccagcccaagctggcgaagaaccactgggggtgggttcagttgctgccggcggccggtacgatggtttagttggtatgtttgatcccaagggtcggaaagtgccgtgcgtgggcctatcaataggcgtagaacggatcttttcaatcgtggagcagagactcgaggccctggaggagaaaattaggaccaccgagacacaagttctggtcgctagcgcccaaaaaaaactgcttgaggaacgtctgaagctggtgtccgaattatgggacgccgggatcaaggctgaactgctctataaaaaaaatcctaagctcctgaaccagctgcagtactgtgaggaagcgggtataccactcgtggccattataggcgaacaagaactgaaagacggtgtgataaaacttagatctgtgaccagtcgcgaggaggtcgacgtgcgaagggaagatttagtggaagagatcaagcgccggactggacagcccctctgcatctgttag

SEQ ID NO: 119936 - DNA, 867 bp, synthetic construct
  misc_feature 1..867: note = Description of Artificial Sequence: Synthetic coding sequence
  source 1..867: mol_type = other DNA
atggctgaacgcgccgctctagaggagctggtcaaacttcaaggtgagcgcgttaggggactgaagcagcaaaaagcatcagcggagctaattgaagaggaagtggcaaagctgctgaaactcaaggctcagctcggtcccgatgaatctaagcagaaatttgtgctgaaaacaccgaagggcactagggattattcccccaggcaaatggcggtgagggagaaggtattcgatgtcattatccgctgcttcaagcgtcatggggctgaagtcatcgataccccagttttcgagctgaaggtcaacgaccgcagaattctggatggaatgttcgctatctgtggggtgagtgatagcaaattccgaacaatatgctcgagcgttgataaactggataaagtgtcttgggaggaagtgaaaaatgagatggtgggggagaagggcctggcccccgaggtagcagataggattggagattacgtacagcagcacggcggagtgagcctggtagagcagcttctgcaggatcctaagctctctcagaataagcaagccctggaggggcttggcgaccttaaactgctttttgaatacctaaccctgtttggcattgacgacaagatctcttttgacctaagcctggcacgaggcttggactattacacaggcgtgatttatgaagccgtcctgcttcaaacgcctgcccaagcgggggaggagccacttggcgtgggttccgtcgccgctggcggtcgatacgacggcctggtcggtatgttcgacccaaagggaagaaaagtgccgtgcgtgggcctgtccatcggcgtagaacggatcttctctatcgtggagcagcgcctggaatag

SEQ ID NO: 119937 - DNA, 1350 bp, synthetic construct
  misc_feature 1..1350: note = Description of Artificial Sequence: Synthetic coding sequence
  source 1..1350: mol_type = other DNA
atggccgaacgcgctgcactggaggaactggtgaagctgcagggggagcgtgtgcgggggctgaagcagcagaaggcttcagctgagttgatcgaagaagaagtggcgaaactgctgaaactcaaggcacagctgggccccgacgagagcaagcaaaaattcgtgctcaagactccgaaggaaacgctcatggggaaatacggagaagactccaagcttatttacgacctcaaagatcaggggggtgagctgctgagtttgagatacgacctcacggtgccttttgcaagatatctcgcaatgaataagctgacaaatattaagaggtaccatatagccaaagattttgacattgctggtaacttcgacccgatgatccctgacgctgagtgcctgaaaatcatgtgcgagatactgtcctcactgcagatcggtgattttctagttaaagtaaacgatagaaggatcctggacggaatgttcgccatttgtggggtgtcagacagcaaatttcgtacgatttgctcctccgtggacaaactcgacaaggtaagttgggaagaagtgaaaaacgagatggtaggtgaaaaaggtttagctcccgaggttgcagatcgaatcggtgactatgttcaacagcacgggggagtttcgcttgtagaacaactgctgcaggatcccaagttgagccagaataagcaagccttggaaggacttggagatctgaaattattattcgaatacctgacactgtttggcatcgatgacaaaataagtttcgacctgagcttagcgagaggcttggattactatactggtgtcatttatgaggctgtattgctacagacacctgctcaggccggggaagaaccgctaggagtgggctctgtggcagctggcgggaggtatgatggcctcgtgggcatgtttgaccctaagggacgcaaggtgccgtgcgtcgggttatccattggcgtggagaggattttctctatagtcgaacagagattagaagctctcgaagagaaaattaggacaaccgaaacccaagtgctggtcgcctccgctcaaaagaaactgctcgaagaacgcctgaagcttgtgagcgagctgtgggatgccggaataaaggcagagcttctatataagaaaaatccaaaattactcaaccagttgcagtactgcgaggaggccggaatccccctggtggcaataattggggagcaggagctaaaagatggcgtgataaagctgagaagtgtgaccagtcgggaagaggtggatgtgaggcgtgaggaccttgttgaggaaatcaaaagacgcacaggccaacctttgtgtatctgttag

SEQ ID NO: 119938 - DNA, 1470 bp, synthetic construct
  misc_feature 1..1470: note = Description of Artificial Sequence: Synthetic coding sequence
  source 1..1470: mol_type = other DNA
atggccgagcgggcggcactggaagagctggttaagttacagggcgaacgtgtgcggggtctcaagcagcagaaagcttcagcggagctcatcgaggaagaggtggccaaactactcaagttgaaagcccaattgggccccgatgaatcaaagcaaaagtttgtgctgaagacaccgaaggggacccgggattattccccaaggcagatggccgtccgtgagaaggtctttgatgtgataatccgctgctttaaaaggcacggagccgaagtcatagatactcctgtctttgagctgaaggagaccctaatgggaaaatacggggaagattccaaattaatttacgatctgaaggaccagggcggggagctcctgtctctgaggtacgatctgaccgtgcccttcgcccgctacttggcaatgaataagctgaccaatattaaacgatatcacatcgccaaagatttcgatatcgccggcaatttcgatcctatgattcccgacgccgagtgtctcaaaatcatgtgtgaaatcctgtcttctctgcaaatcggggacttcctcgtaaaggtcaacgacaggagaatccttgacggaatgttcgccatctgtggggtcagtgactctaaattcaggaccatctgctcatctgtggacaagctcgacaaagtgagctgggaagaggttaaaaatgagatggtgggggaaaagggactcgcacccgaagtagccgatcggatcggagattacgtacaacaacacggtggcgtctcgttggttgaacagttactgcaggatccaaagttaagtcaaaacaaacaggctctagaggggctgggcgatctcaagctgctatttgagtacctgacactgtttggaattgatgataaaatctcattcgatttgtcactggccagggggcttgactattacaccggcgtgatctacgaggccgttctgctgcagacacccgcacaggccggagaggaaccgcttggcgtgggatccgttgctgccggtggccggtatgacggactcgtggggatgtttgacccaaagggtcggaaagtgccatgtgtgggtctctctatcggagtggagcggatctttagcatcgtcgaacagcgcctggaagccctcgaggagaagatcaggacaactgagactcaagttcttgtggcatctgctcaaaagaaactgctcgaggagcgcctgaaattagtatctgagctctgggatgctgggataaaggcagagctcctgtataaaaaaaaccccaaactactgaatcaactgcagtattgcgaagaggcaggcatccccttagtggctataataggcgaacaggagcttaaagatggggttattaagctccgttctgtaacgtcaagagaagaggtggatgtcagaagagaagacctggtggaggagataaaaagaagaactggtcaaccattatgtatttgctag

SEQ ID NO: 119939 - DNA, 1017 bp, synthetic construct
  misc_feature 1..1017: note = Description of Artificial Sequence: Synthetic coding sequence
  source 1..1017: mol_type = other DNA
atgatggctatgaattcaaagcagccctttgggatgcaccctgtcctgcaagagccgaagttcagctccctgcattcaggatccgaggccatgaggcgggtctgtttgccagccccccagcttcaagggaacatttttggttcatttgatgaatcactgctagcaagggctgaggcccttgcagcagttgatatcgtcagccatggaaagaatcatcctttcaaaccagacgctacttatcacacgatgagttccgttccctgcaccagcacctctagcacagttcctatatcacatcccgcagccctcacttcacacccacatcatgccgtgcaccaggggcttgaaggggatctcctcgagcacatcagccccactctcagtgtgagcgggctgggtgctcccgagcactcggtgatgcctgcccagattcacccccaccatctgggtgcaatgggacacctccatcaggccatgggaatgagtcacccccacactgtggctccacactccgcgatgcctgcctgtctctcagatgttgaatcagatcccagagaacttgaggcgtttgcagagcgcttcaagcagagacgtattaagctcggcgtcacacaggctgatgtgggggccgcgctagcaaacttgaagataccaggcgtcggatcgctgtcccagtctaccatatgccgctttgaaagtctgaccttatcacacaataatatgatcgcacttaaacccgtcctacaagcttggcttgaagaggctgaggctgcgtacagggaaaaaaacagcaagccagagctgtttaatggatctgagcggaagcgaaagcgcacctctattgcggccccagaaaaaagatcacttgaagcctattttgccattcagccgaggccatcgagcgagaagattgccgcaatagctgagaaattggacctgaaaaagaatgtggtgcgagtgtggttctgcaaccagaggcagaaacagaaaaggatgaaatattcagccgtgcattag

SEQ ID NO: 119940 - DNA, 1038 bp, synthetic construct
  misc_feature 1..1038: note = Description of Artificial Sequence: Synthetic coding sequence
  source 1..1038: mol_type = other DNA
atgacgctgctcgaagtgccatttgcgcggtacttggccatgaacaaggtcaagaaaatgaaacgataccacgtcggtaaagtctggcggagggaatcacctacgattgttcaaggccgctatagagaattttgccaatgtgactttgacattgctggacagtttgatccgatgatcccagacgctgagtgtctaaagatcatgtgtgagattctgagcggactgcaactgggagacttcctgataaagatggcctggaaggatgtgagacacgagatggttgttaagaagggactcgcccctgaagtggccgaccggatcggcgactacgtccagtgccatgggggtgtaagcctagtggagcagatgtttcaagacccacgtctgtctcagaataagcaggcactggagggccttggggacctgaaactgctgtttgagtacctcacgctgtttggaatcgccgacaaaataagttttgacctgagccttgcgagagggctagactactacacaggcgttatctacgaggctgtcttgctgcagacccctacccaggccggggaagagcccctcaacgtgggatctgtggccgcgggaggccggtacgacgggttggtgggcatgtttgacccaaagggccacaaggtgccctgtgtgggtctttctattggggttgagcgaattttttacatcgtggagcagcgcatgaagactaaaggagaaaaggttcgcacgacagaaactcaggtgtttgtggctaccccgcaaaaaaacttcctacaggagagattgaagctaatcgccgaactctgggattcaggtataaaagccgagatgttgtataaaaacaatcccaaactgctgacccagctgcactattgcgagagcacgggaattcctttagtggtgattatcggcgaacaggagctcaaggagggcgttatcaagatccgctcagttgcttcaagagaagaggtggcaatcaaaagagaaaacttcgttgccgagattcaaaagcgtctctctgaatcatag

SEQ ID NO: 119941 - DNA, 1179 bp, synthetic construct
  misc_feature 1..1179: note = Description of Artificial Sequence: Synthetic coding sequence
  source 1..1179: mol_type = other DNA
atgccacttcttgggctgctgccaagacgagcctgggcaagcttattgagccagttactccgaccaccttgtgcttcctgtactggggcggtgcgctgtcagagccaggtcgccgaggcagtgctgacctcccagctaaaggcccatcaggagaaacccaacttcatcattaaaactcctaaagacttcgatatcgcaggccagttcgacccgatgatccctgacgccgaatgtctaaagataatgtgcgagatcctgtctgggttgcagctgggtgatttcctgatcaaagtcaacgataggcggatagtggacggtatgttcgccgtgtgcggagtacctgaaagtaagttccgcgcaatctgctcctccatcgacaagcttgataaaatggcatggaaagacgttcggcacgaaatggtcgtcaagaagggcctcgccccagaagtcgccgataggattggggactacgttcagtgtcatggcggagtgtccctggttgaacagatgtttcaggatcctcggctgtcccagaacaagcaggccctcgaaggactgggcgatctgaaattgctctttgagtaccttacgctcttcgggatcgcggacaagatctctttcgatctatctctcgcgcggggattggattattatacaggagttatttatgaagcagtgctgctccagaccccaacccaggcgggtgaagaacctctcaacgtgggcagcgtggcagctggaggcagatatgacggcctggtgggcatgtttgaccccaaggggcataaggtgccctgcgtggggctgagtatcggcgtggagcgcatcttctacattgtggagcagcgcatgaagactaaaggagagaaggtcaggacaactgagacccaagtgtttgttgctacaccccagaaaaacttcttgcaagaacggctcaagttgatcgctgagctctgggacagtggcataaaagccgagatgttatacaagaataatcctaaactgctgactcaactgcactattgcgaatctaccggcatccctttagtagtgatcattggggaacaggagctgaaggagggggtgataaagatacggagtgtggcttctagggaagaagtagcaataaaacgagaaaattttgtggcagagatccaaaagagactgtcggaatcctag

SEQ ID NO: 119942 - DNA, 1401 bp, synthetic construct
  misc_feature 1..1401: note = Description of Artificial Sequence: Synthetic coding sequence
  source 1..1401: mol_type = other DNA
atgcccctgttgggcctgctgccacgccgggcttgggcatcacttctttctcagttgctcaggcctccctgcgcgtcttgtacgggcgccgttaggtgccagagccaggtcgctgaggccgtgcttacctctcaacttaaggcacatcaggagaaacctaactttatcatcaaaacgcccaaagagaccctcaccgagaagtacggcgaggatagcggattgatgtacgacctcaaggaccagggcggtgagctgctgagcctgcgctatgacttgaccgtgccatttgcacgctacttggcaatgaataaggtgaagaagatgaagagataccatgttggaaaggtgtggcggagggagtccccaactatcgttcaaggtcggtatagagaattttgccaatgtgactttgatatcgccggccagtttgacccgatgatacccgacgctgaatgtctgaagatcatgtgtgagatactgtcaggactgcagttgggtgattttctgatcaaagtgaatgatcgtcgcatcgtggatgggatgttcgctgtctgcggtgtccctgagagcaagttccgagcaatctgtagtagtattgataagcttgataaaatggcatggaaagacgtaagacacgagatggtcgttaaaaagggcctcgccccagaggtcgctgaccgcattggcgactatgtgcaatgtcacgggggagtcagcttggttgagcaaatgtttcaggacccccgactgagccagaacaagcaggcactggagggtttaggcgatctgaagctattatttgaatacttgactctattcgggatcgcagataaaatctcattcgatctgagcttggctaggggtttagactactacaccggagtaatttatgaggccgtgttgcttcagactcccactcaggcaggggaagaacccctgaacgtaggctccgtggcggccggcggacgctatgacggtcttgtggggatgttcgaccccaagggacacaaggttccatgcgttgggttatctattggggtggagagaatcttctacattgtggagcaaaggatgaagacaaagggggagaaggttaggactacagaaacacaggtgtttgtggccacaccccagaagaacttcctccaggagagactcaagctaatcgcagaactgtgggattccgggatcaaagctgaaatgctgtacaaaaataaccctaaactgctgactcagctgcactactgtgagtccacagggattcctctagtggtaataatcggtgagcaagagctcaaagaaggggtcatcaaaatacgaagtgtcgcatcccgtgaggaagtcgcaattaagagagagaatttcgtagctgagatacagaagcgattgtccgaaagctag

SEQ ID NO: 119943 - DNA, 1005 bp, synthetic construct
  misc_feature 1..1005: note = Description of Artificial Sequence: Synthetic coding sequence
  source 1..1005: mol_type = other DNA
atgccactactaggcctcctgccccggagagcctgggcatcactcctgtcccagctgcttagacctccgtgtgcttcttgcacaggggccgtcagatgccagagtcaggattttgatatcgccgggcaatttgatccgatgatccccgacgccgagtgcctcaagattatgtgcgagattctcagcgggctccagttgggcgattttctgattaagatggcatggaaggatgtccggcatgagatggtcgtcaagaagggcctggctcctgaggtggccgacagaattggagattatgtccagtgccatggcggggtctcattggttgaacagatgttccaggacccacggctctcgcagaacaaacaggccctggaagggctgggcgacttaaagctactctttgaataccttactctttttggaattgcagacaaaataagtttcgacctttccctggctagaggacttgactactataccggggtcatctatgaagcggttcttctgcagacacctacccaggccggtgaggaacccctaaacgtaggctctgtggcagccggcggtcggtatgacggattagtggggatgtttgatcctaagggccataaagtgccttgtgtgggtctgtcaattggggttgagagaatcttctacatcgtggaacagaggatgaagacaaagggggagaaagtgagaacgacagagactcaggtctttgttgccacacctcaaaaaaattttctccaggaaaggttaaagctgatagctgagctttgggactcaggcatcaaggcggagatgctgtacaaaaacaacccgaaactgctcacgcagctccactattgcgagtcaaccggtattcctctggtcgtgatcatcggggaacaagagctcaaggagggcgtgattaagattcgtagcgtggctagtagggaagaggtggccatcaagagggaaaacttcgtagcggagatccagaagcgactatctgagtcgtag

SEQ ID NO: 119944 - DNA, 1446 bp, synthetic construct
  misc_feature 1..1446: note = Description of Artificial Sequence: Synthetic coding sequence
  source 1..1446: mol_type = other DNA
atgccactgttgggactgctgccaagacgagcatgggccagcttgctgtcccaactgcttaggccgccatgtgcatcatgtactggcgccgtgcgatgtcaatcccaaggcacacgcgatctgtctcctcagcatatggtcgtgcgcgagaaaatcctggacctggtgatcagttgctttaagcggcatggggcgaagggcatggacacaccagcctttgagttgaaagagacactcactgaaaaatatggcgaagacagcggtttaatgtacgaccttaaggaccagggtggagagctgttgagcctgcggtacgacctgacagtcccgttcgctagataccttgcaatgaataaagtgaaaaagatgaagcgttaccacgtaggaaaagtgtggagacgtgagagtcctacgatcgtgcagggccggtatcgtgagttttgtcagtgtgattttgacatagctggtcagttcgacccgatgattcctgacgccgagtgcctgaaaatcatgtgtgaaattctgtccggcttgcagctgggtgacttccttatcaaggtgaacgatcgcagaatagtcgacggaatgtttgccgtgtgcggagtacctgagtccaagtttcgcgccatttgctcctcaattgataaactggacaagatggcatggaaagatgtaagacatgagatggtagtgaaaaagggcctcgcacccgaggtggctgaccgcattggcgattatgtgcagtgccatggtggagtctccctagtggagcaaatgtttcaggatccacgactttcacagaacaaacaggctctggaggggctgggggatctaaagttgctcttcgaatacctgacactgtttgggatcgccgataagattagctttgatctctctctggcacgcgggcttgactactacactggcgttatttacgaggctgtgctgcttcagactcctacacaagcaggtgaagagcctctcaacgttggctcagtggccgccgggggaaggtacgacggcttagtcggtatgttcgaccctaaggggcataaagtgccatgtgtcggtctatcgattggtgtagagcggatcttttacattgtagaacagcgcatgaagacgaaaggggagaaggtccgaaccacggagactcaagtatttgtggccacaccacaaaagaactttctgcaagaaaggcttaaattgattgcagaactgtgggattctggcattaaggctgagatgctgtataagaacaaccccaagttactgacccaacttcactattgcgagagtactgggatccccctcgtggtgatcattggggaacaggaactgaaagagggagtgatcaagatcagatcggtagcatccagagaggaagtggcgataaagagggaaaacttcgtcgccgaaatacagaagcgcctgagtgagtcatag

SEQ ID NO: 119945 - DNA, 1185 bp, synthetic construct
  misc_feature 1..1185: note = Description of Artificial Sequence: Synthetic coding sequence
  source 1..1185: mol_type = other DNA
atggattcagctctgtcagacccccacaatggcagtgccgaggcagggggtccaaccaactccacaaccaggccaccgagtacaccagaaggcatagcactcgcctacggcagcctcctgctcatggcactactccctatattctttggcgccttgcggagtgtcaggtgtgctcgggggaagaatgcctcggatatgccagaaacgatcactagtagggatgccgccagatttcccatcattgcttcttgtaccctcttaggcttgtacctgttcttcaaaatcttcagccaggaatacattaatctactgcttagcatgtacttcttcgtgttgggaatcctggccttgagccataccatctcaccatttatgaataaatttttcccggcctctttccctaacaggcaataccaactattgttcacacagggcagtggggaaaataaggaggagatcatcaattacgaattcgatacaaaggaccttgtgtgcctaggcctgtcttctatcgttggggtgtggtaccttctaaggaagcactggatcgcgaacaacctatttggtttggccttttctctgaatggggtggaattgctgcatctcaataacgtgagcaccggttgcattctcctgggtggcctgttcatttacgacgtcttctgggtgttcgggaccaatgtgatggtcacagtggctaaaagttttgaggcgcccattaaactggtcttcccacaggacttgttggagaaaggcctggaggccaataatttcgctatgttaggcctcggtgacgtggtgatcccgggaatcttcattgccctgctgctgcgtttcgacatatcccttaaaaaaaacacccacacctacttttacacatccttcgctgcttacatatttgggctgggcttaactattttcatcatgcatattttcaagcacgctcagcccgcgctgttatatctcgtacctgcctgtatcgggttccccgtgctggtggcattagctaagggcgaggtaactgagatgttctcctatgaatctagcgccgagattttgccgcatacacctcggcttacacacttcccgactgtgtccggatcccctgcttcactcgctgattctatgcagcagaagctggccgggcctcgccgtcgccggccccagaatccaagcgctatgtag

SEQ ID NO: 119946 - DNA, 1134 bp, synthetic construct
  misc_feature 1..1134: note = Description of Artificial Sequence: Synthetic coding sequence
  source 1..1134: mol_type = other DNA
atggatagtgcattgtcagatccccataatggctcggcggaggcaggaggaccaacgaatagcacaaccaggcccccaagcacacccgaaggcatcgctctggcttacggctctttactcctgatggccttgctaccaattttcttcggagctttacgtagcgtgagatgcgctcgcgggaagaacgcctctgacatgcccgaaaccattacttccagagatgcggctaggttccccatcatcgcctcttgcacattactcggactgtacctgttcttcaaaatctttagccaggagtatatcaacctgctcctgagtatgtatttctttgtgctaggtattcttgcactttcacatacaataagtcctttcatgaacaaattttttcccgccagctttcctaatcggcagtatcagctgctattcacccagggcagtggcgaaaataaagaagagattatcaactatgagtttgacactaaagacctcgtatgcttggggctttctagcatcgttggagtttggtatttgctgcgtaagcattggattgcaaacaatctgttcgggctggccttttccctgaatggcgtcgagctgttacaccttaataacgtgtcaaccgggtgcatcctactgggcggactgttcatttacgacgtgttttgggtgtttgggacgaacgtgatggtcaccgtcgccaaaagcttcgaggcacctattaaactcgtcttccctcaagatctcttagaaaaggggcttgaagcaaacaacttcgccatgctcggtctgggagacgtggtgatacccgggatcttcattgccctgctccttcggttcgatattagcctgaaaaagaatacacacacctacttttacaccagctttgccgcttacatctttggcctgggactgactatctttatcatgcatatctttaaacacgcacaacccgccttgttatatttggtgcccgcctgtattggattccccgtgctcgtggccctggccaagggagaagtcaccgagatgttttcttatgaggagtctaatccgaaggaccccgccgccgttaccgaatctaaagagggcacggaagccagcgccagtaaaggactggagaagaaggagaaatag

SEQ ID NO: 119947 - DNA, 1008 bp, synthetic construct
  misc_feature 1..1008: note = Description of Artificial Sequence: Synthetic coding sequence
  source 1..1008: mol_type = other DNA
atggactcagcactgtccgatccacacaatggatccgcagaggcaggaggtcctacaaactccaccaccagaccaccttccacccccgaggggatagcacttgcctatggctccctattgctgatggccctattgcccatcttctttggcgccctccgctcggttaggtgtgccaggggaaagaatgcatccgatatgcctgagacaatcacttctcgcgacgccgcgagatttcctatcattgcctcatgcacccttctcgggctctacttgttcttcaagatcttctcacaggagtacataaacttgctgctatcaatgtatttttttgtgctcgggatactggcacttagccacacaatatcgccatttatgaacaaatttttccctgctagtttcccaaatagacagtatcaactgcttttcacgcagggatcgggtgaaaataaagaagagatcatcaactatgaatttgacacgaaggaccttgtctgtctagggctctcaagtatcgtcggagtttggtatctgctgaggaaagtttttgggaccaatgtcatggttacagtagcgaagagcttcgaggctccaattaaacttgttttccctcaggatctcctggaaaaaggactggaggctaacaattttgcgatgttaggccttggggacgtcgtcatccctggaatttttatcgcactgctgctgaggttcgacatcagtttgaagaagaatacgcatacctatttttatacgtcattcgcagcatatattttcggcttgggtttaactatatttattatgcacatatttaaacacgcccaacccgcgcttctgtatttggtgcctgcatgcattgggtttcccgtgctcgttgccctcgcaaaaggagaggtgaccgaaatgttcagctatgaagagtccaatccaaaggacccagcggctgtaaccgaaagtaaggagggcacggaggcctccgcctcaaaaggcctcgagaaaaaggagaagtag

SEQ ID NO: 119948 - DNA, 1281 bp, synthetic construct
  misc_feature 1..1281: note = Description of Artificial Sequence: Synthetic coding sequence
  source 1..1281: mol_type = other DNA
atggactctgcgctgagcgacccacacaatgggagcgctgaggcgggcggaccaactaactccaccactcgtccaccatcaaccccagaagggatcgccttggcttatgggtcactcctcctcatggccctcttgccaatcttttttggagccttgagaagcgtgcgttgtgccaggggaaagaacgctagcgacatgcccgagaccatcaccagcagagacgcggcccgatttccaatcatcgcctcttgtacacttcttgggctttacttgtttttcaagattttttcgcaggagtatattaacctgttgttaagtatgtacttcttcgtactcgggatcttagcacttagccatacaatctcgcctttcatgaataaattcttcccagcaagttttcccaacaggcaatatcagttgctgttcacacagggcagcggggagaacaaggaggaaattattaattacgagtttgacacaaaagatttagtttgtctcggcctgagtagtatagtcggagtctggtaccttctcagaaagcactggatcgccaacaatctttttgggctggcattttctttgaatggtgtagaactgctgcacctcaacaacgtgtcgacgggttgcatcctccttgggggtttatttatttatgacgtgttctgggttttcggcaccaacgtgatggtgacggtcgctaagtctttcgaggcccccatcaagctggtgttccctcaggaccttctggaaaaagggcttgaggcaaataacttcgctatgttggggctgggtgacgtggtgattcccgggatattcattgccctgctgctgcggtttgatatttctctgaaaaagaacacacatacatatttctatacttccttcgcagcgtacatctttgggttgggtctaacaattttcattatgcatatctttaagcacgcccagccggcgcttttgtacctggtgcctgcttgcattggatttccagtccttgtggctctcgccaagggggaagttaccgagatgttctcctatgagtcttctgcggaaatcctgccccacacacctagactgacgcactttccaaccgttagcggctcaccagccagcctggctgattccatgcagcagaaactagccgggcccagaagaaggagaccccaaaaccctagtgctatttacgaggagagcaaccctaaagatcccgctgctgtgaccgagtcgaaggagggaacagaagccagtgcttccaaaggactggagaaaaaagagaaatag

SEQ ID NO: 119949 - DNA, 3411 bp, synthetic construct
  misc_feature 1..3411: note = Description of Artificial Sequence: Synthetic coding sequence
  source 1..3411: mol_type = other DNA
atgttctcccggaaaaaacgggaactgatgaagacaccttctatctccaagaaaaatcgtgcaggctctccttctcctcagccaagtggtgagctacctagaaaggacggagctgatgcagtctttcctgggccgtctttagagccccctgcaggatcaagtggggtaaaggcaaccggaaccctgaaacggcccactagcctctctcgccatgcaagcgcagcgggatttcctctcagcggagcagcttcatggacactgggacgcagccacagatcacctctgacagcagcaagcccaggagagttacccaccgaaggagccggaccagatgtggttgaggacataagtcacctgctggccgacgtggctcggtttgccgaaggactcgaaaaactgaaagagtgtgtccttcgcgacgatctgttggaagccaggcgtccaagggctcacgaatgtctgggcgaagctctccgggttatgcaccaaataatcagtaaatacccactcctgaacaccgtggagacattgaccgccgctggcacacttattgcaaaagtgaaggctttccattacgagtctaacaatgacctggagaagcaggagtttgagaaggcgttggagactatagccgtggccttttcttcaacagtgtcagaattcctcatgggggaagtggactcatccacgctgctcgctgttccccccggcgactcgtcacagagcatggaaagtctgtatggacctggctctgaaggaactccgcccagccttgaagattgcgacgcaggctgcctgccagctgaggaggtggacgtgctcctccagcgctgcgaagggggcgtggatgctgccctgctctacgcaaagaacatggctaagtatatgaaggacctaatttcatatctggaaaagcggacaactcttgaaatggagttcgccaaggggctgcagaaaattgcgcacaactgccggcagagcgtgatgcaagagccacatatgcctctcctgagtatctattcactggcgcttgaacaggatttagagttcgggcactctatggttcaggccgtgggtaccctgcagactcagaccttcatgcagccgttgaccctgagaagattggagcatgaaaaaagacgaaaggaaattaaggaagcctggcacagggcccagagaaagctccaagaggcagagtccaaccttcgaaaagctaagcagggctacgtacaaaggtgtgaagaccacgataaggccaggtttcttgtggccaaggccgaggaagagcaggcagggagtgcgccaggagcgggctccaccgccacgaaaacacttgacaaaaggaggcggttggaagaggaagctaagaacaaggccgaggaggccatggcaacttaccgtacgtgcgtggcggatgcaaaaacccagaagcaggagttagaggacacgaaggtcactgctctcaggcagatccaggaggtgatacggcagagcgaccaaaccataaaatcagctaccatatcatactatcagatgatgcacatgcagactgcacccttgccagttcacttccagatgctgtgcgagtccagcaagttatacgatcccggccaacaatacgcttcccacgtcaggcagcttcagcgcgatcaggaacctgatgttcactatgatttcgaacctcatgtttccgccaatgcttggagcccggtaatgagggcaagaaaatctagcttcaatgtgagtgacgtggcacgcccagaggccgctgggagccctccggaggaaggtggttgtacggaaggcacaccagccaaggaccaccgggcaggtagggggcaccaggtgcacaagtcttggccactgagcatatctgattccgatagcgggctggatcctgggccaggggctggtgactttaaaaagtttgagcggacatcttcatccggaactatgtcctctaccgaggagttggttgatcccgacggaggtgcaggcgccagcgccttcgaacaggccgacctcaatggcatgactcccgagcttcccgtggccgttccttcgggcccctttcgccacgaaggcttaagcaaagccgctcggactcacagactgcgcaagctcaggaccccagctaagtgcagggagtgtaattcctacgtttattttcaaggcgccgagtgcgaagagtgttgtctcgcctgtcataagaagtgcttggagacccttgctattcaatgtggccacaagaagctgcagggccggctacagctcttcggccaagacttctcgcatgctgcccgctctgcccctgacggagtcccttttattgtgaagaaatgcgtgtgcgagatcgagagacgggccttgaggacgaaggggatttatcgcgtaaacggtgtgaaaaccagagtcgagaaactgtgtcaggcatttgagaacggcaaggagctggtcgagctgtcgcaagcttcccctcacgatattagcaacgtactgaagctgtacctccgccagctgcctgaacccctgatttcctttcggctataccatgaacttgtgggtttagccaaagacagtctaaaagcagaagcagaagcaaaggccgcatctcgcggtagacaagatgggtccgagtctgaagccgtggcggttgccctggcagggaggttgagagagctgctacgggacctgccaccagaaaacagggccagcctccaatacttgctcaggcacctgcggcgtatagtggaagttgagcaggacaacaagatgaccccaggcaacctgggaatagtgttcggtcctaccttactgcggcccagacctacagaggccaccgtgagcctgagtagtcttgttgactacccacatcaagcaagagtgatcgagaccctcatcgtgcattatgggctggtattcgaagaggaaccagaggagactcccggcggacaggacgagagttcaaatcagcgggcggaagtagtcgtccaggtgccctacctcgaggccggcgaggccgtagtttaccccctgcaggaggcggctgcagatggctgccgagaatccagggtggtgagcaacgattcagactccgacctggaagaagcctctgaattgctttcttcctctgaggccagcgccctggggcatctcagttttctggaacaacagcagtcagaagctagccttgaagttgctagtggatcacacagcggcagtgaggagcaactggaagccactgcccgagaggacggcgatggcgacgaggacgggcctgcccagcagttatctggctttaataccaatcagagtaacaatgtactgcaagcacctctaccccccatgagactcaggggaggtcgcatgactttaggatcttgtagagagcggcagcctgagtttgtttag

SEQ ID NO: 119950 - DNA, 3393 bp, synthetic construct
  misc_feature 1..3393: note = Description of Artificial Sequence: Synthetic coding sequence
  source 1..3393: mol_type = other DNA
tcctactcgccatacagggcgggcagacagggaccacagcaaagaggtcgagaccccgggatccaactcacggaactccctaggaaggatggggcagacgctgtgttccccgggccctccctcgagccccctgcaggttcatctggcgtgaaggcgaccgggactctgaagcgccccactagtctcagcagacatgcctctgcggccgggttccccctgagtggagccgcatcctggaccttaggtagatcgcaccggtcccctttgactgcagcttctcccggggaattaccgacagagggggctggacctgacgtggtcgaggatatttcacacttgctcgcagatgtcgcaaggttcgccgagggcctcgaaaaactcaaagaatgcgtactgcgggatgatctcctcgaagctaggaggcccagagcccatgagtgcctaggagaagctcttcgggtgatgcaccaaataatatccaaataccctctacttaacacggtggagaccctgactgccgctggcacactgatcgcaaaggttaaagcgtttcattatgagtccaacaatgatcttgaaaagcaggaattcgagaaagctctggagacaattgctgtcgctttctcaagtacagtgtccgaatttttgatgggagaagttgactcaagtaccttactggccgttcctcctggcgacagcagccagtccatggagtcgctctacggtccggggtcagaggggacaccgccctccctggaagattgcgacgccggctgcttacccgccgaagaagtggacgtactgctgcagaggtgtgaaggcggtgttgacgctgccctgctgtacgctaagaatatggccaagtatatgaaagatttaatcagctacctggaaaaacgaaccacactggaaatggagttcgccaagggcctccagaagatcgcacataactgtaggcagagcgtcatgcaggaaccacatatgcctttactcagtatctactccctggcccttgaacaggacttggagttcgggcactcaatggtccaagcagtgggtactttgcagacccagacattcatgcagcctctcacactgcgacgtctcgagcacgaaaaacggcgaaaggagattaaagaggcctggcatagagcccagagaaaactccaagaagccgaatcaaatctgaggaaggccaaacagggttatgttcaaagatgcgaggaccacgataaagcacggttcctggtggctaaagcagaggaagagcaggccgggagtgctcctggggcaggcagcacagctacaaagactttagataagcgaaggcggttggaggaggaggcaaagaataaagccgaggaagccatggcaacatacaggacctgcgtggccgacgccaagacgcagaaacaagagcttgaggacaccaaggttacggccctcagacagatccaggaagtcatcagacagtcggaccaaactataaaatcagcaactatatcctactatcagatgatgcacatgcagactgcgccgctgccagttcacttccagatgctctgtgagtctagcaagctttacgatccgggccagcagtacgccagtcatgtaagacagctgcagagggatcaggaaccagacgtccactatgactttgagccacatgtgagcgcaaatgcatggtccccggtaatgcgcgcgcgcaaaagcagtttcaatgtaagcgatgtggctcgccctgaagctgccggctcgccaccagaggaggggggctgtactgaaggcacccccgctaaggatcatcgagcagggaggggccatcaggtccataagtcctggcctttgagcattagcgattccgattctggcttggacccgggccccggagctggcgatttcaagaaatttgaaaggacctctagcagtggtaccatgtcatccacggaggagcttgtcgatcccgacggaggcgctggcgcttctgcattcgaacaggctgatctgaacggcatgaccccagaattgccggtggccgttccatcagggccgttccgccacgaaggtctgagtaaagctgcccgcacacacagactgcgaaaattgcgaacacccgctaagtgccgggaatgcaattcgtatgtatacttccagggcgctgagtgcgaagaatgttgcttagcctgccataagaagtgcttggaaaccctggccatccagtgcggacacaagaagctccaaggccgtttacagctgttcggtcaggatttctcccatgcagctaggtccgcacctgacggtgtgccttttattgtgaaaaaatgtgtttgtgaaattgagcggagggccctgcgaaccaaggggatatatcgcgtgaacggggttaaaacacgggtagagaaactgtgccaggccttcgagaacgggaaggagctagtggagctgagccaagcctcccctcacgacatctccaacgtactgaagttatatctgcggcagttgcccgagcccctcatcagctttagactctaccacgaacttgtgggtctggccaaggacagtttgaaagcagaagccgaggcgaaagcagcgagcaggggcagacaggacggttcagaatccgaagcagtggccgtcgccctcgcagggcgtcttagagagcttttgagggatttgccacccgagaaccgcgcatcccttcagtacctgctgaggcatctgagaagaattgtggaggtggagcaagacaacaaaatgacacctggaaacttgggtatagtgtttggaccaactctattgagacccaggcccaccgaagcaactgtgtctctatctagcctcgtggattacccccatcaggcccgcgtgattgagaccttgattgtgcactatggactggtgttcgaggaagagccggaagagactcccggtggacaggatgagagcagcaatcagcgtgccgaggtcgtggtgcaggtcccctacttagaagcaggagaggctgtggtgtacccattacaggaagccgctgcggatggctgcagagagtctagggttgtctccaacgattcggactccgaccttgaggaagcatctgaactgttgtcttcttcagaggcttcagccctgggtcacctgagttttctcgagcagcagcagtccgaggcaagcctggaagtcgcttctgggtcccatagtggatccgaggagcagctggaggcaactgccagagaggatggggacggggacgaggacggaccggcacagcagctgtctggatttaacacaaaccaatcaaataacgtgttgcaagcaccactgccaccaatgcggctgcggggggggaggatgaccctaggcagctgtcgggagaggcagccggagtttgtctag

SEQ ID NO: 119951 - DNA, 3015 bp, synthetic construct
  misc_feature 1..3015: note = Description of Artificial Sequence: Synthetic coding sequence
  source 1..3015: mol_type = other DNA
atgcaccaaattatctctaaataccctcttcttaataccgttgaaaccctcaccgccgccggaacccttattgccaaagtgaaagcctttcattatgagagcaacaatgacctcgaaaagcaggagtttgagaaggctctagagacaatcgctgtagctttcagcagcacagtgtcggagttcctgatgggcgaagtggacagctctacgcttctagctgttcccccaggggatagttcacaaagcatggagtctctgtatggaccgggttctgaaggcactcctccttctttggaggactgtgacgccggctgcctcccagcagaagaagtggatgtccttctacagagatgtgagggaggcgtggatgcagcactgctatacgcaaaaaatatggccaagtacatgaaagacctcatttcctatttggagaaaaggacaacactcgagatggagttcgcaaaaggcctgcagaaaattgcgcataattgtagacagagcgtgatgcaggagcctcacatgcctctgctctcaatatactctctggctctggaacaggatttggagttcggacactccatggtgcaggcagtcgggaccctccagacccagacctttatgcagccactcacactgagaagactcgagcacgagaaaaggaggaaagagattaaagaagcatggcaccgggcgcagagaaaactgcaagaggctgagtcgaacctccgaaaagccaaacagggatacgtccagcggtgtgaggatcacgataaggcacgattcctggtagccaaggcggaggaggagcaggcaggcagcgcaccaggggccggctccacagcaacaaagaccttagacaaacgtaggcgccttgaggaggaagcgaaaaataaagctgaggaggctatggccacctatagaacttgtgtggctgacgccaagacacagaaacaggagttagaggatacaaaggttaccgccctacggcaaatccaggaagttattagacagagcgaccagaccattaaatcagcaaccatctcctactaccagatgatgcacatgcagacagcgccattacctgtccactttcagatgctgtgcgagtcatccaagctatatgaccctggtcagcaatacgcatcccacgtgcggcaactgcagcgtgaccaggagcccgacgtacattatgacttcgaaccacatgtctctgccaatgcctggtcccccgtgatgagggcgcggaaatcttctttcaacgtgtccgacgtagcaagacctgaagccgccggcagcccccctgaggagggcgggtgcactgagggcaccccagccaaggaccatcgtggcgaatgtccagcagggccgcgggggggaaggtggctacccgctacgcaccctggcccaagcccggagaccccgctgagccccgctggccggggtcatcaggtgcacaaatcatggcccctctctatcagcgactccgattcaggcctggatcccggaccaggcgcaggagactttaagaaattcgaaaggacaagttcaagcggaactatgtcctcaactgaggaattggtggaccccgatggaggagctggagcatcagccttcgagcaagctgatctgaatgggatgacccccgaattgccagttgcagtgcctagtggaccttttagacacgagggcttgagtaaggctgcccggacgcatcgtctacgcaaactacgcacgcccgccaaatgccgggagtgtaactcctatgtctatttccagggggcagagtgcgaggagtgttgcttagcctgtcataaaaaatgcctagaaaccctggcaattcaatgtggccataagaaattacaaggccgcttgcagctcttcggccaagattttagtcacgctgctaggtccgcgccagatggcgtgccctttatagttaagaagtgtgtgtgcgaaatcgaaaggcgggccctgaggacaaaagggatttatcgtgtcaacggagtcaaaacacgagtggaaaagttatgccaggcatttgagaacgggaaggagctagtggaactctcccaagctagtcctcacgacatctctaatgtactgaagctatatcttcgccagctccccgaaccactcatctccttccggctgtatcacgaactggttggtttagcaaaggactccctgaaagccgaggccgaagcgaaagccgctagccggggaagacaagatggctccgagagtgaagcggtggccgtagcacttgcaggaagactcagggagctccttagagacctgcctcccgaaaaccgagcgtcattgcagtacttgctcagacacctgcgaagaattgttgaggtggaacaagataacaagatgacacctgggaatctcggcatagtgttcgggcccaccctgctgagacctcgccccaccgaagcaacggtttcattgtcttccctggtggactacccacatcaggcacgggtgattgagacacttattgtccattacgggttagtattcgaagaagagcctgaggaaactccgggcggtcaggatgagtcctcaaatcagcgcgcagaggtagtggtccaggtcccctacctagaagcaggagaagccgtggtgtaccctctgcaagaggctgctgcggatggttgcagagaaagccgggtggtgtctaatgattcggacagcgatttagaggaagcatccgagctgctgagttccagtgaggcatccgcacttggacacctttcttttctggagcagcagcagtcagaggccagcctggaagtggcttcgggttcacatagcggctccgaggaacagcttgaggcaaccgcacgcgaggatggtgacggtgatgaggatggcccagctcagcaactctccggttttaataccaaccagtccaataatgttttgcaggcccctttacctccgatgcggctgcgcggcggtcgcatgacgctgggttcctgcagagaaagacagccagagttcgtttag

SEQ ID NO: 119952 - DNA, 3459 bp, synthetic construct
  misc_feature 1..3459: note = Description of Artificial Sequence: Synthetic coding sequence
  source 1..3459: mol_type = other DNA
atgagccgaggtcagcgcgtcctgaagggcctgcttggctgggtgtgcacctggacctgggcctggcgcgcacgcctcggggcgcgcggctgtggactccacgtgctatgccctcgcgacctacccctcccgccagaggaactcccgcggaaagacggtgctgatgcggtgtttcccggtccaagcctggagcccccagcgggaagcagcggtgttaaagccactgggacactgaaaagacctaccagcctcagcagacacgctagtgccgccggctttccactttcaggggccgccagttggacgttaggacggagtcatcggtccccgctcaccgccgctagcccgggtgaattgcccacagagggcgcagggcccgatgtggtggaggatatcagtcatcttttagctgatgttgcaaggtttgccgaaggtctcgaaaagctgaaggaatgtgtcctcagagatgatctcctagaggccagaaggccaagagcccatgaatgcttgggcgaggctctgagagtgatgcaccagatcatttcaaagtacccgctgctcaacacagtcgagacacttacagccgccggaaccctgatcgctaaggttaaggcctttcattatgagtctaataacgatttggagaaacaggaattcgagaaggccctggagaccatcgcagtagcattctccagcactgtcagtgaattcctcatgggtgaggtggacagttcaactctgttggccgtacccccgggggactctagccagagtatggagtctctctatggacccggaagtgaaggaacaccgccaagtctcgaagactgtgacgctggctgcttgccagccgaagaagtggacgtgttacttcagagatgtgagggcggggtggacgctgcactgttgtatgcaaagaacatggccaaatatatgaaagacctgataagctacctggaaaagagaacgacgctcgagatggagttcgccaagggactgcagaaaattgcacataattgccgacagagtgtgatgcaggaaccccacatgcccctcctatctatctacagcctggcactggaacaggatctggaattcgggcatagtatggttcaggccgttggcacgctgcagacacagacattcatgcagccgctgacattgcgacgtctggagcatgagaagcgccgtaaagagatcaaggaagcctggcatagagcccaaagaaaactacaggaagctgaatcgaacctacggaaagccaagcagggttacgtgcaacggtgtgaggatcacgacaaggcgcgcttcttggtggcaaaggctgaagaggaacaggccggctccgctccaggagcaggcagcactgcaactaagactctggacaagaggcgccgcctcgaggaagaagcaaagaacaaagccgaggaggcaatggcgacctacaggacttgtgtcgctgacgcaaaaacacagaaacaggaattggaagatacgaaggttaccgcccttcggcagattcaggaggtgatccgtcaaagcgatcagactataaagtcagccaccatttcctactatcagatgatgcacatgcagacggcccccctgcctgttcactttcaaatgctctgcgagtctagtaagctgtatgacccaggacagcaatacgcatcccatgtcagacagctgcaacgggaccaagagcccgatgtccattatgatttcgaaccccacgtgtccgcgaacgcgtggagtccagtgatgagagctcggaagtcgtcatttaatgtgagcgacgttgctcggcctgaagctgcaggcagcccccccgaagagggaggatgtacagagggaacaccagccaaagatcatcgcgctggtcgggggcaccaggttcacaagagctggcccctctctatatcggatagcgattcaggactggatcctggccccggcgccggtgatttcaagaagttcgagcgaaccagcagttcaggtacaatgagcagcacagaggagctggtggatcctgacgggggggctggggccagcgccttcgaacaagctgatctcaatggcatgaccccagaactgccagttgcagtgccctcaggaccctttcggcacgagggtctttcaaaagctgctcgaacacatcgactgagaaagctacgcactccggctaaatgtagggagtgcaatagttacgtgtatttccagggcgcagaatgtgaggagtgttgcctggcctgtcacaagaaatgtcttgagactctggcaattcagtgcggccacaaaaagctgcaaggccgcttgcagttgttcggacaggatttctctcatgccgcccgctcagcccccgatggtgttccatttatcgtaaagaagtgtgtctgcgaaattgagcggagggcactaagaactaagggaatctatagggtgaatggcgtgaaaactcgcgttgaaaaactctgtcaagcctttgaaaatggcaaagaactcgttgaactttcccaggcctcaccacacgatatttctaacgtgctaaagctgtatctgagacagctgcccgagcccctcatctcatttcgtttgtaccatgaactagtaggcctcgccaaagatagtcttaaggccgaggccgaggccaaagccgctagccgcggccgacaagatggaagcgaaagtgaggctgtcgctgtcgcgttggccgggaggctccgcgagctcctgcgagacttgccacccgagaatcgggcgtcacttcagtatctgctccggcacttgcggcgcattgtggaagtggagcaagataacaaaatgacaccaggtaacctgggcatcgtgtttgggcccacgctgctccggccacgtcctaccgaggccaccgtgtcgctgagttctctggtggattatccgcaccaagcacgcgtgatcgagacccttatcgtccattacggcctagtgtttgaggaggagcctgaggaaacccccggtggccaggacgaatcgtcaaatcagcgggccgaggttgtggtgcaagtaccttatcttgaggctggcgaagccgtcgtgtatcctcttcaggaagccgccgcagatggctgtcgggaatcaagggtggtgagtaatgactccgacagcgatctggaggaagccagcgaactcttgtccagttccgaagcaagtgcactggggcatctatcatttttagagcagcagcagtctgaagcaagcctcgaagtggcttccggtagtcacagtggaagtgaagagcagctagaggccaccgcacgggaggatggcgatggggatgaggacggacctgcccagcagctgtcaggctttaacaccaaccagagtaacaacgtactgcaggctcctctgcctcccatgcggctcaggggcggccgcatgactttgggcagctgtcgggagcgacaacccgaattcgtatag

SEQ ID NO: 119953 - DNA, 3060 bp, synthetic construct
  misc_feature 1..3060: note = Description of Artificial Sequence: Synthetic coding sequence
  source 1..3060: mol_type = other DNA
atgtgcatatgtgggacagctcaccccgtgctcgatgagggaccagtgaggtgtcgcgctggccctcgagacttgctagaagcaagacgaccgagggcccacgagtgcctcggagaggccctgcgggttatgcatcagataataagtaaataccccttactaaatactgtcgaaacactcaccgccgcaggaactttaattgccaaagtcaaggcctttcattatgagtctaacaatgatcttgaaaaacaggagtttgaaaaagccctggagaccattgccgtcgctttctcatcaaccgtttccgaattcctgatgggcgaagtagactcatcaacccttttggccgttcccccaggcgacagttcacagagtatggaatctttatatggtcctggcagtgagggtacacccccgtctctggaagactgcgatgctgggtgcctccccgcagaagaggtagacgtgcttctccaacggtgcgagggcggcgttgacgccgcactgctgtacgccaagaacatggcgaagtatatgaaagacctgattagctacctcgagaaaagaacaaccttagaaatggagtttgccaaaggattacaaaagatcgcccacaattgtaggcagtctgttatgcaggaaccccacatgccgcttttaagcatatattccttggcgctggagcaagatctcgagtttggccactctatggtgcaggctgtagggactctgcaaacacaaactttcatgcaaccactgaccctgaggcgcctggaacacgaaaagcggaggaaagagataaaagaagcgtggcaccgcgctcagcgcaagttacaagaggccgaatcgaatttgcgaaaggcaaagcagggatacgtgcagcgctgtgaagatcatgacaaagcacggtttttggtggctaaagctgaggaggagcaggccggctcagctccaggggccggaagcacagcgactaaaaccctggacaagcggaggcgcctcgaagaagaggcaaagaataaggccgaagaagctatggctacctacagaacatgcgttgctgacgcaaagacacaaaagcaagagctcgaggacaccaaagttacagctcttagacaaatccaagaggttatacgacagagtgaccagactattaaaagcgccacaatctcatactatcagatgatgcatatgcagaccgcacccctgcccgtccattttcaaatgctgtgcgagagttctaagctgtatgaccccggccaacagtatgccagtcacgttcgccagctgcagagggatcaagagccagacgttcattacgactttgaaccacatgtcagtgccaatgcctggtccccagttatgcgggccaggaaatcaagctttaacgtgtctgatgtagcccgacccgaggctgccggcagccctcccgaggaaggcggatgcactgaaggcacccccgccaaggaccacagggcagggcgcggtcatcaggtccacaaaagttggcctctctctatctctgattccgattctggactcgatcccggacctggcgcgggcgactttaaaaagttcgagagaacgagttcatccggtaccatgagctccactgaagagctggtagacccagacgggggcgctggcgcaagcgccttcgagcaagctgacctgaacgggatgactcccgaactgcccgtggctgtaccctcagggcccttcagacatgaggggctctccaaagctgcacgtacccacagactaaggaagctgagaacccctgccaagtgcagggagtgcaactcctacgtgtacttccaaggagctgagtgtgaggaatgttgtctggcctgccataagaagtgtctggagaccctggccatccagtgcgggcataagaaactgcagggacgcctacagcttttcggccaggatttctctcatgcagccaggagtgctccagatggcgtgccattcatcgtcaaaaagtgcgtgtgcgaaatcgaacgccgtgctttgcgcaccaaaggaatttacagagtcaatggggtcaagacaagggtcgaaaagttgtgccaggcattcgaaaacggcaaggaactcgtggaactttctcaggcatctccccacgatataagtaacgtgcttaaactgtatctgaggcaactgcccgagcccttaatctcctttaggttgtaccatgagttggtgggattagctaaggactcgctcaaagccgaagccgaggcgaaggcagctagccggggccggcaggatggctcagagtcggaggctgttgccgtggcccttgctggacgcttacgggagctgctccgcgacctaccccctgaaaaccgggctagcctgcagtatttactcaggcacctgaggcgtattgtggaagtggaacaggataacaaaatgacccctgggaacctcgggattgtgttcggcccgactttgctcaggccacgtcccacagaggccaccgttagcctgagtagcctggtggactatccccaccaggccagagtcatcgagactctcattgtgcattacggattggtgttcgaagaagaaccggaggaaacacctggcggccaagatgagtcttccaatcagcgggcagaagtggtagtacaggttccctacctggaagcaggggaagccgtcgtctaccccctgcaggaggctgccgctgacggctgcagagaatcacgcgtcgtctctaacgactctgactccgacctcgaggaggcaagtgagctcctgtcctcaagcgaagcatctgcgctcggccatttatctttcttggaacagcagcagtcagaagcaagtctggaggttgcttccggctctcactccggatccgaggagcaacttgaagctacagctagggaagacggggacggcgatgaagacggaccagcacagcagctctcagggtttaacacaaatcagagcaacaacgtcctgcaggctccgcttccacccatgagactccgcggaggacgcatgactctggggtcttgccgcgaaagacagcctgagttcgtgtag

SEQ ID NO: 119954 - DNA, 2847 bp, synthetic construct
  misc_feature 1..2847: note = Description of Artificial Sequence: Synthetic coding sequence
  source 1..2847: mol_type = other DNA
atgttcagcagaaagaagcgcgagctcatgaagaccccttccatcagtaagaaaaacagggcgggcagccctagtcctcagcccagcggagaactgccgcggaaagacggcgctgatgccgtattcccgggcccgtcgctggagccccctgccggtagcagcggcgttaaagccaccggcactctcaaacgccccacaagcctcagtcgccacgctagtgccgccggcttccctctcagtggggctgcatcatggacccttggtcgatcacatcgatcccctttgacggcagcatctcccggagaactcccaacagaaggtgccggccccgatgtggtggaagacatttcacacctattggcagacgtagcacggtttgccgaaggcctcgagaagcttaaagagtgcgtgctgcgggacgatctcttggaggccaggcggccacgcgctcacgagtgtctgggggaggctctcagagtgatgcatcagatcatttccaaatatcctctcctaaacacggtggagacccttaccgccgccggcaccttgatcgccaaagtaaaggcatttcattatgagtcaaacaatgacctcgagaaacaagagtttgaaaaggcccttgaaaccattgccgtggcctttagcagcaccgtgagtgagttcctgatgggtgaagtggactcgtctactctcctcgcagtgcctccaggcgactcttcgcaatcaatggagtctctctacggcccgggtagcgagggcaccccgccctctttggaggattgcgacgctgggtgtctccccgccgaagaagtcgacgttctcctgcagcgttgtgagggaggcgttgatgcagcactgttgtacgcaaagaatatggccaaatatatgaaagatctgatttcttatctggaaaaaaggaccacgctggagatggaatttgccaaaggactgcagaaaatagcacacaactgcaggcagagcgtgatgcaagagccacatatgccactattgagcatatactctttagccctcgaacaggacttggaatttggacactctatggttcaggctgtagggacacttcaaacgcagacattcatgcagcccctcacattgcgcaggttggagcatgagaaaaggcgtaaggagatcaaagaggcatggcaccgagcccagcggaaactgcaggaggctgagtccaatctgcgcaaggctaaacagggctatgttcagcgatgcgaagaccatgataaagccaggttcctggtagccaaggctgaggaggagcaggccggatctgctccaggagccggcagcacagctactaagacgctcgacaagcggcggcggctcgaggaagaagctaagaataaggccgaggaagcgatggcaacataccgaacctgcgttgctgatgctaagacgcagaaacaagaattggaggacactaaggtgaccgcactgcggcagatacaggaggtcatccgccagtctgaccagacgatcaaatctgccacaatctcatactaccaaatgatgcacatgcaaaccgcccctcttccagtgcattttcagatgctctgcgaatccagcaaactgtatgaccctggacagcagtacgcctctcacgtgcgacagctgcagcgagaccaagagcctgacgtgcattatgactttgagccccacgtcagcgctaacgcttggagtcccgttatgcgtgcccgtaaatcttctttcaatgtcagtgacgtggcaaggcccgaagctgccgggagcccccccgaagaagggggctgcaccgaaggcacccccgcaaaggaccacagagcggggagagggcaccaagtccataagtcatggccactgtctataagcgatagtgactcagggctggatccaggccctggggccggggatttcaaaaagtttgaaagaacctcttccagtggtaccatgagttccactgaggaactcgtcgaccctgacggaggcgcaggggcctccgctttcgaacaggccgatctgaacggcatgactccagagctccccgtggccgtgccttctggcccattccgtcatgagggactctccaaagcggcccgcacccatagactgcgaaagttgcgcacacctgcgaaatgtagggaatgtaactcatacgtgtacttccagggtgccgagtgcgaggagtgttgcctggcttgtcataagaaatgtctggaaacgctggctattcagtgcgggcataagaaattacagggacgcctccaactttttggccaggatttcagtcacgcagcccggagtgcaccagacggggtcccattcattgtaaaaaagtgcgtttgtgagatagagagacgggcactccgaacaaaaggtatttatcgggtcaacggagttaagacccgtgtggagaagctgtgccaggccttcgagaatggtaaagagctggtcgagcttagccaggccagtccacacgacattagcaacgtgctgaagttgtaccttaggcagctccccgaacccctgatttcattccgactctaccacgaactggtaggcctcgctaaggattctcttaaggctgaggccgaggctaaggcggcaagtaggggacggcaggacggctctgaaagcgaagccgtggccgtagccctggcaggacggctgcgcgaattactgcgagatctgcccccggagaacagggcttctttacagtatctgttgaggcacctgcgcagaattgttgaggtggagcaggacaacaagatgacaccaatgcggctacggggcggacgcatgacactaggctcttgccgcgaacgccagccagaatttgtgtag

SEQ ID NO: 119955 - DNA, 3492 bp, synthetic construct
  misc_feature 1..3492: note = Description of Artificial Sequence: Synthetic coding sequence
  source 1..3492: mol_type = other DNA
atgttttctagaaaaaagcgcgaattgatgaaaaccccgagtataagtaaaaagaaccgagcagggtccccatctccacagccttcaggcccccattttattagtggagaaaccgaggccgtcagcagacccgagaacccttttaatgagctgcccagcgatctccccaaggagctgcccaggaaagatggagcagatgccgtgtttcctgggccatcactggagccaccagccggctccagcggggttaaagcgacaggcacacttaagcgacccacgagcctttctcggcacgccagcgcagctggcttcccgctctccggtgcagcttcttggacactgggccgcagtcacagaagtcccttgacagccgcctcaccaggagagctgcccactgaaggagctgggcctgatgtggtcgaggatatatcccacctgctagctgacgtggccagattcgctgagggtttggagaagctgaaggagtgcgtcctgagagatgaccttctcgaggcacgtagaccccgtgctcacgagtgcctcggagaggcactgcgagtcatgcatcagatcatttccaagtaccccctgctcaataccgtggaaactttaactgctgccgggactctgatcgccaaggtgaaagcctttcactacgagagcaacaatgacctagaaaagcaggagttcgagaaggcattggagactatcgcagtcgctttctcaagcacagtcagcgagttcctgatgggggaagtagactcgtctacccttctggccgtgccgccaggtgactctagtcagagtatggagagcctctatgggcctgggtcagaggggacgccaccttcgcttgaagactgtgacgcaggctgtctccccgccgaggaggtcgatgtgctcctccagaggtgcgaagggggcgtcgatgccgccctgttgtacgccaagaatatggccaagtacatgaaagaccttataagctatctagaaaagcgaaccactttggagatggaatttgccaaaggtttgcaaaaaattgcccacaattgtaggcaatcggtcatgcaagagccgcatatgcccctgctgtctatctactccctggccctggagcaagacttggaattcggtcatagcatggtgcaggcagtgggcacacttcaaacccagacattcatgcagccgctcacacttcggagactggaacacgagaagcggcgtaaggagattaaagaggcgtggcatcgagcacaacgcaagttacaggaggcagagagtaatctcaggaaggcaaagcagggctacgtccaaaggtgcgaggaccacgataaggcacgattcctggttgctaaagccgaggaggaacaggctggctctgctccaggggccgggtctaccgccacaaaaactcttgataaaaggagacggttggaggaagaagcgaagaataaggccgaagaggccatggcaacttaccggacatgcgttgcagacgcaaagactcagaagcaagagttagaagatacaaaggtcacggccttgcggcagatccaggaagtgatccgacaaagtgaccaaactattaagagcgcaactatctcgtactaccagatgatgcacatgcagacagcgcccctgcccgttcacttccagatgctgtgcgagtctagcaaactctacgaccctggccagcagtatgcgagccacgtgcggcagctccagcgggaccaggagcccgatgttcactacgacttcgagcctcatgtgtccgctaatgcttggtctccagtgatgcgggcacgaaagtcaagtttcaatgttagcgacgtggcccggccggaagccgctggttctcccccggaggagggaggctgtaccgaaggtacgcctgccaaagaccacagggccggcagaggtcaccaggtgcataagtcatggcctctgtcaatctctgacagcgactctgggctggacccggggccaggtgccggagatttcaagaagtttgagagaacctccagctctgggaccatgtcttcaactgaggagctggtggacccggacgggggcgccggcgcgagcgcgtttgaacaggccgatctaaatggaatgacccctgagctgcctgtggctgttccaagcggaccgtttcgccacgaagggctgagcaaagccgcccgcacacataggcttcgcaagctgcgcactcctgctaagtgccgggagtgcaatagctacgtttatttccagggagcagaatgcgaagagtgctgcctcgcctgccacaagaagtgtcttgaaaccctggctattcaatgcgggcacaagaagctgcagggccgcctgcagctctttgggcaagattttagccatgccgcgcgctccgctcctgatggcgtgccatttatagttaaaaagtgcgtttgtgaaatcgagcgccgagcgctgcgaacgaagggcatctatcgggtcaatggtgtaaaaacccgcgtcgagaaattatgccaagcctttgaaaatggcaaggagctcgttgagctgagccaggctagtccacacgacataagcaatgtgctgaaactctatctccggcagctgccggagccacttatcagtttccgactataccacgagttagttggactcgccaaggatagtctgaaggctgaggcagaggccaaggcagcctctcggggccggcaggacgggagtgaaagcgaggcagtggccgtagccctggcgggaagactccgcgaactattacgcgatctccctccagaaaacagagctagcttgcagtaccttctgaggcacttacggagaattgtggaagtggagcaagataataagatgactcctggaaacttggggattgtgtttggacctaccttgctcagaccacgtccaacagaagccacagtgtcactatctagtctggtggactacccccaccaggccagagtgattgagacattgattgttcactatggtttggtatttgaagaagaacctgaggagacccctggagggcaggacgaaagttcaaatcaacgggccgaggtcgttgtacaggtgccctacctagaggccggtgaggcagtggtttatcccttgcaggaggccgctgcggatggctgcagagaaagtcgggttgtatctaatgacagtgactctgacttagaagaggcatctgagctattaagcagctctgaagcaagcgcactggggcatttgtcctttcttgaacagcagcagtcagaggcgtctctggaggtcgctagtggatcccattctggctcagaagagcagctcgaagcgactgctagggaagacggggacggagacgaggatggccctgcccagcaattgagcggctttaacaccaaccagagtaataacgtcttgcaggctcctctccctcctatgcgactaaggggagggcggatgactttggggagttgtcgggagcggcaacctgagttcgtgtag

SEQ ID NO: 119956 - DNA, 420 bp, synthetic construct
  misc_feature 1..420: note = Description of Artificial Sequence: Synthetic coding sequence
  source 1..420: mol_type = other DNA
atgtctatttcgagtgcactggccatggtttttatgggagccaagggaaacaccgccgctcagatgtcccaggcgctgtgtttttcaaagatcggaggcgaagatggcgacattcatagagggtttcagtccctgcttgtcgcaatcaaccgaaccgatacagagtatgtactgcggactgccaatggactgttcggcgagaagtcctatgacttcttgacagggtttacggactcctgcggcaaattttatcaggctaccatcaaacagctagactttgtaaacgacacagaaaagtcaacaacacgtgtgaactcctgggtcgcagataaaacaaagggggaaaacattctgctgttttacttcgataatatcctgaattcgttcattgtatccagcttgcagaattgccagatctag

SEQ ID NO: 119957 - DNA, 162 bp, synthetic construct
  misc_feature 1..162: note = Description of Artificial Sequence: Synthetic coding sequence
  source 1..162: mol_type = other DNA
atggagatctttatcgaggttttctctcactttctcctgcagctcacagagctgaccctgaatatgtgcttagaacttccgactggctccctagagaagtcattgatgatttcaagccaggttcttcagattcccgtagctaactctacaaagcaacggtag

SEQ ID NO: 119958 - DNA, 648 bp, synthetic construct
  misc_feature 1..648: note = Description of Artificial Sequence: Synthetic coding sequence
  source 1..648: mol_type = other DNA
atgagcgagaccgtcccaccggcccctgccgcttccgcggcacccgagaaacccctggcaggtaagaaagccaagaagcccgcaaaggctgcggctgcctccaagaagaaaccggctggcccctccgtgtcagagctcatcgtacaggccgccagcagctcgaaggaaagaggaggagtgagtttagccgccctgaaaaaagccctcgcggccgcaggatacgatgtggagaagaacaacagcagaataaagctcggtatcaagagcctcgtttcaaagggaaccctggtgcagactaagggtactggcgcctcaggcagctttaagttaaacaaaaaggcttctagtgtagagacaaagcctggagcctccaaggtggccaccaaaacaaaagcaactggggcttccaagaagttgaaaaaagcaacaggggcctctaagaagagtgtgaaaactcccaagaaagccaagaagcctgccgccacacgcaagtcatccaaaaatccaaagaaaccaaaaactgttaagccgaaaaaggtcgccaaaagcccggcaaaagccaaggccgtcaaaccaaaggccgcaaaagcccgggtcactaaacccaagactgccaaacctaagaaggctgcccctaaaaagaagtag

SEQ ID NO: 119959 - DNA, 681 bp, synthetic construct
  misc_feature 1..681: note = Description of Artificial Sequence: Synthetic coding sequence
  source 1..681: mol_type = other DNA
atgagtgagaccgctccagccgagacagcaaccccagcccctgtagaaaagtcaccagcgaagaagaaagcgaccaaaaaggctgcaggagccggggccgccaagcggaaagcaacaggtccaccggtgagcgagctgattacgaaggctgtggccgcctctaaggaaaggaatggcctgtccctggcggccctcaaaaaggctttggccgctggaggatatgatgtggagaagaataatagccgcattaagctgggtttgaagtccctagttagtaagggtaccctggtgcagacaaagggaacaggcgcctcgggctctttcaagcttaacaaaaaagccgcctctggcgaggccaagccgaaagcgaaaaaagccggcgcagcgaaagcgaagaagcctgctggcgcaacacctaaaaaagcgaaaaaggccgccggagccaagaaagctgtcaagaaaacaccgaagaaggccaagaaacctgccgctgccggggtgaagaaggttgccaagagcccgaaaaaggctaaagccgctgctaagccaaaaaaagcaactaagtccccagctaagccgaaggcagtgaaaccaaaagccgccaagcccaaagcagcaaagccaaaagccgcaaagcccaaggctgccaaagccaaaaaggccgcagccaagaaaaagtag

SEQ ID NO: 119960 - DNA, 642 bp, synthetic construct
  misc_feature 1..642: note = Description of Artificial Sequence: Synthetic coding sequence
  source 1..642: mol_type = other DNA
atgagtgaaaccgccccagcggcccccgccgccgcacctcccgctgagaaagcccccgtgaagaagaaggccgcaaagaaagccgggggcactccgcgaaaagcctccgggccccctgtgtcggaactgattaccaaggcagtggccgcatcaaaagagagaagtggtgtgagcctcgctgccttgaagaaggcacttgccgcagcagggtatgacgtggagaagaataactccagaattaagctgggactgaagagtctggtgtccaagggtacccttgtgcagaccaagggcacaggcgcctccggaagcttcaaactcaacaagaaagcagcaagtggggaggcgaagccaaaggtcaaaaaagccggaggaacaaaaccaaaaaaacccgtaggggccgctaagaagccaaagaaggcagccgggggagccacccctaagaaatccgcgaaaaagaccccaaagaaggcaaagaagcccgccgctgccaccgtcactaagaaagtcgctaagtcacctaagaaagctaaggtggctaagccgaagaaagctgctaagtctgcagctaaagccgttaaacccaaagccgctaaacctaaagttgtgaaacccaaaaaagccgcacctaaaaaaaagtag

SEQ ID NO: 119961 - DNA, 666 bp, synthetic construct
  misc_feature 1..666: note = Description of Artificial Sequence: Synthetic coding sequence
  source 1..666: mol_type = other DNA
atgtctgagacagctccgctcgcccccaccatacctgctccagccgagaagacacccgttaagaagaaggccaaaaaagctggcgccacagccggaaagagaaaagcctctggtccaccagtgtccgaactgataaccaaggccgtggccgcctcaaaggagagatctggggtttctctggccgccctaaaaaaggccctcgctgctgcgggatacgacgtggagaaaaacaatagccggatcaagctaggtctgaagtccctggtgagcaaaggcacattggttcagactaagggcacgggcgcctctggttcatttaagctgaacaagaaggcggcatcaggagagggaaaacctaaagcaaagaaagcaggtgccgcgaaacccaggaagcccgcaggggccgctaaaaaacctaagaaagtggccggtgccgccacgccgaaaaagagcatcaaaaagacacctaagaaggttaagaagcccgccaccgccgcgggcacaaaaaaggttgccaagtctgccaaaaaagtcaaaactccccagcccaagaaggccgcaaagagcccagctaaggccaaggccccaaagcccaaagccgcaaagccaaagagcggcaaacccaaggtaaccaaagcaaaaaaagcagcccccaaaaaaaagtag

SEQ ID NO: 119962 - DNA, 660 bp, synthetic construct
  misc_feature 1..660: note = Description of Artificial Sequence: Synthetic coding sequence
  source 1..660: mol_type = other DNA
atgagcgaaaccgcccccgccgcaccagcagctccggcgccagccgaaaagactccagtgaaaaaaaaggcccgaaaaagtgcgggtgcagccaagaggaaggcttccgggccccccgtaagcgagctgatcaccaaggcggtggcagcctccaaggagcgaagcggcgtgtctcttgccgcactaaagaaggctctcgccgccgcaggctatgacgtggagaaaaataattctcggattaagcttggcctaaaatccctggtttctaagggtaccttagtacagactaagggaaccggggctagcggatcgtttaaactgaacaaaaaggctgcatctggtgaggctaaacccaaggccaaaaaggccggggcggcgaaggcgaagaagccagctggggcagcaaagaagccaaaaaaagctacaggggcagccactccgaagaaatcagccaagaaaacccctaagaaggccaagaagcccgccgccgccgccggggccaagaaagctaagtcgccgaaaaaggccaaagctgccaagcctaaaaaagccccaaagtcccccgcaaaagccaaggcggtaaagcctaaagcagccaagcccaagacagccaagcctaaagcagctaaaccgaagaaggctgcggctaagaaaaaatag

SEQ ID NO: 119963 - DNA, 624 bp, synthetic construct
  misc_feature 1..624: note = Description of Artificial Sequence: Synthetic coding sequence
  source 1..624: mol_type = other DNA
atgtccgagacggtgccggctgcaagtgcttccgcaggcgtcgctgcaatggagaaactgcctacaaagaaaagaggccggaaacccgcaggcctgataagcgctagtagaaaggtaccgaacctcagcgtcagcaaattgataactgaagctctatccgtgagtcaggaacgggttggcatgagtcttgtcgctcttaagaaagccctcgccgctgctgggtatgatgtcgaaaaaaacaactcccgtataaaactctcactcaagtcgcttgtcaacaagggaattttagtgcaaacaaggggcacaggcgcctctgggtcatttaaactttccaaaaaggtgatccctaaaagcacgaggtctaaggccaaaaagtccgtcagcgccaaaaccaagaagctggttctctctagggacagcaaatctcctaagaccgcaaaaacaaataagcgagcaaagaagccgagggctacaacccccaagactgtccgctctggtcggaaagcgaagggagccaaggggaagcagcaacagaaaagtcctgtgaaggcacgcgcttccaagagtaagctcacacaacaccatgaggtgaacgtaagaaaggcgactagcaagaaatag

SEQ ID NO: 119964 - DNA, 393 bp, synthetic construct
  misc_feature 1..393: note = Description of Artificial Sequence: Synthetic coding sequence
  source 1..393: mol_type = other DNA
atgtcaggccggggaaagcagggtggaaaggccagagccaaagctaaaacaaggtcttctagagctggactgcagttccctgtcggacgagttcacagactgttgcgtaaaggcaactatagtgagcgagtgggcgccggggccccagtgtatctggctgctgttctggagtatctcacagccgaaatattagaactcgcaggaaatgccgccagagataacaagaagacaaggattatcccgaggcacttacaactggccatccggaacgatgaggaactgaataaattactgggacgcgttactatagcccagggcggagttctgcctaacattcaggcagtactgctccccaagaagaccgagtcacatcacaaggcaaagggtaaatag

SEQ ID NO: 119965 - DNA, 393 bp, synthetic construct
  misc_feature 1..393: note = Description of Artificial Sequence: Synthetic coding sequence
  source 1..393: mol_type = other DNA
atgagtggtagggggaaacagggtggcaaggctagggccaaggccaaatctagaagttccagagcgggacttcagtttccagtagggagggtccacagactcctcagaaaggggaactatgccgagagagtgggggctggagcccccgtgtatctggctgccgtgctggaatacctgacggccgagattctcgagttagcggggaatgctgcccgagacaataagaaaacacgtatcatccctagacatctgcagcttgccatcagaaatgatgaggaactgaacaaactgctgggacgtgtgacaattgcccagggtggcgttctgcccaatatccaggctgtgctcctccctaaaaaaaccgagtctcatcacaaagccaaaggaaaatag

SEQ ID NO: 119966 - DNA, 393 bp, synthetic construct
  misc_feature 1..393: note = Description of Artificial Sequence: Synthetic coding sequence
  source 1..393: mol_type = other DNA
atgtccggacgcggaaaacagggtggcaaggcccgcgccaaggccaagtcacgatcttcccgcgctgggctccagtttcccgtcggtagggtgcaccggttgttaagaaaagggaactacgccgaacgcgtgggcgctggcgctcctgtgtatctggccgccgtcctggaatatctcactgccgaaattctcgagctcgcagggaacgctgctagagacaataaaaaaacaaggataatcccccgtcacctgcaactggccattaggaacgacgaagagctaaataaactccttggacgagtcactatcgcccagggaggagtactgccgaacattcaagcggttctgctgcccaagaaaaccgaaagtcaccacaaggctaaggggaagtag

SEQ ID NO: 119967 - DNA, 393 bp, synthetic construct
  misc_feature 1..393: note = Description of Artificial Sequence: Synthetic coding sequence
  source 1..393: mol_type = other DNA
atgtccggccgcggaaagcagggcggcaaagcacgggcaaaggcaaagactaggtccagccgggcaggacttcagtttccagtgggaagggtccaccggttgctgagaaaaggtaattactctgaaagggtgggcgcaggtgcccccgtctacctagctgcggtccttgagtaccttacagccgaaatcctggaactcgccggaaatgccgcgcgggataacaagaagacccgaatcattcctaggcatctgcaactggccatccggaatgacgaagagctgaataaacttctcggaaaagtgacgattgcccaaggcggcgtcctccctaacatccaggcagtcctgttgcctaagaaaacagagtcccatcacaaagcaaagggaaaatag

SEQ ID NO: 119968 - DNA, 393 bp, synthetic construct
  misc_feature 1..393: note = Description of Artificial Sequence: Synthetic coding sequence
  source 1..393: mol_type = other DNA
atgagtggacgggggaaacaaggggggaaggctcgcgcaaaggcaaaaaccaggagctcacgggccggcttgcaattccccgtgggacgcgttcataggctcctgagaaagggcaactatagcgagagagttggcgccggcgcccccgtgtatctagcagccgtactggagtacctgaccgccgaaattctggaactggctggaaatgccgccagggataataagaaaactagaatcatcccaagacatttgcaactcgctatcaggaacgatgaggaactgaacaagcttttgggacgggtgacaatcgcacaaggcggggtattgcctaacatccaggccgtgctgctcccaaaaaagacagaatcgcaccataaggcaaaaggtaaatag

SEQ ID NO: 119969 - DNA, 393 bp, synthetic construct
  misc_feature 1..393: note = Description of Artificial Sequence: Synthetic coding sequence
  source 1..393: mol_type = other DNA
atgtccgggagggggaagcagggaggaaaggcccgagcaaaggccaagacacggagttctcgcgccggactacaatttcccgtggggagggtgcaccgactcctcaggaagggcaattacgctgagagagtgggtgccggggcaccagtttatttggcagccgtactcgagtatctgaccgccgaaattctcgagctcgccggcaacgcagccagagataataagaaaactcgaattatccctagacatcttcaactcgccatccggaacgatgaagagctaaacaagcttctggggaaggtgacaattgcacaagggggcgtccttcctaatattcaggctgttctattgcctaaaaagactgagagccaccataaagccaagggcaaatag

SEQ ID NO: 119970 - DNA, 387 bp, synthetic construct
  misc_feature 1..387: note = Description of Artificial Sequence: Synthetic coding sequence
  source 1..387: mol_type = other DNA
atgagtggcagaggcaagcagggggggaaagcacgcgccaaagccaagacgaggtcttcccgtgccggactgcagtttcccgttgggagagtacacagactgctccgaaagggcaattatgccgagagagtgggcgctggagctcctgtgtaccttgccgcggtgctcgagtaccttaccgcagagattttagagctcgctggcaatgctgcacgggacaataagaaaacaagaataattccgcggcatctgcagctggccatcagaaacgacgaggaactgaacaaactgctgggtaaggtcactatagcgcaaggcggcgttttaccaaacattcaggctgtcctccttccaaagaaaaccgagagccatcataaaaccaagtag

SEQ ID NO: 119971 - DNA, 393 bp, synthetic construct
  misc_feature 1..393: note = Description of Artificial Sequence: Synthetic coding sequence
  source 1..393: mol_type = other DNA
atgtccggcaggggtaagcagggaggaaaagcgcgggccaaagccaagactcgctccagccgcgccggactccaatttcccgtaggcagagtgcataggttactgcgcaaaggtaactacgcagagcgcgtaggcgcaggagcccctgtatacttggccgctgtgctggaataccttaccgccgagatcctcgagctggccggcaacgccgccagggataataagaaaactaggattatcccccggcacttgcagctggcaattcgcaatgacgaggaactgaacaagctcctgggcaaagtgacaatagcccaggggggagtgctgcctaacattcaggcggtgctgctcccgaaaaaaacagaaagtcaccacaaggctaaaggaaaatag

SEQ ID NO: 119972 - DNA, 393 bp, synthetic construct
  misc_feature 1..393: note = Description of Artificial Sequence: Synthetic coding sequence
  source 1..393: mol_type = other DNA
atgtcaggcagaggaaagcaggggggcaaggcacgggcaaaggcaaagacccgatccagccgggctggactccagttcccggtcgggcgcgtccaccgactcctcagaaagggtaattacgcagagcgggtcggagctggtgctccagtgtaccttgccgcggtgctggaataccttacagctgaaattctcgaactcgccggtaacgccgcccgcgataacaaaaaaactcggataataccccggcatttgcagctggccattcgcaatgacgaagagttgaataagcttttaggaaaagttaccattgcccaagggggggtcttgcctaacattcaagcagtgttactccctaagaaaactgaatcgcaccacaaagcgaaaggcaagtag

SEQ ID NO: 119973 - DNA, 393 bp, synthetic construct
  misc_feature 1..393: note = Description of Artificial Sequence: Synthetic coding sequence
  source 1..393: mol_type = other DNA
atgagcggtcgggggaagcaaggcggcaaggccagggctaaggcaaaaactaggagctccagagcaggactccagttcccggtgggcagagtgcaccgacttctcaggaagggaaactatgctgaaagagttggagctggagcacccgtgtatttagccgcagtgttagaataccttaccgcagagatcctggagcttgctgggaatgcagctcgggacaacaaaaagacgaggatcatacctcgtcatttgcagctcgccatcagaaatgatgaagagttaaacaagctactaggaaaggtgacaatcgctcaggggggagttctgcccaacatccaagcagtgttgttacctaagaaaacagaatctcatcacaaggctaagggaaagtag

SEQ ID NO: 119974 - DNA, 384 bp, synthetic construct
  misc_feature 1..384: note = Description of Artificial Sequence: Synthetic coding sequence
  source 1..384: mol_type = other DNA
atgcccgaggtcagctccaaaggagccacaatctccaaaaaagggtttaagaaagcagtcgtgaagacacagaaaaaagaggggaaaaaacggaaaaggacccggaaggaaagttatagcatctatatctacaaggtcttgaagcaggtccatccagatacagggataagcagcaaggccatgtcgattatgaactcatttgtgacagacatcttcgaacgtatcgcttcagaggcctccagattagcgcactatagtaagcgaagcactattagttctcgagaaattcagaccgctgtgagactgttgctgcctggcgagcttgctaagcacgcagtatctgaggggactaaagcagtgacaaaatatacttcttccaagtag

SEQ ID NO: 119975 - DNA, 381 bp, synthetic construct
  misc_feature 1..381: note = Description of Artificial Sequence: Synthetic coding sequence
  source 1..381: mol_type = other DNA
atgcctgagccttctaagtcagcacctgctcccaagaagggcagcaagaaagctatcactaaggcccagaagaaggacgggaagaagcggaaaagaagcagaaaggaatcctattcaatctacgtttacaaagtgctgaagcaggttcatccagacactgggatctcttccaaggcaatgggcataatgaattctttcgtcaatgacatattcgagagaattgcgggagaagcttctcggctagcgcattacaataagcgaagtaccattacgtctagggaaattcaaaccgccgtccggttgctgctcccgggagaactcgccaagcatgccgtgagtgagggcaccaaagccgtgaccaagtacacctcctctaagtag

SEQ ID NO: 119976 - DNA, 381 bp, synthetic construct
  misc_feature 1..381: note = Description of Artificial Sequence: Synthetic coding sequence
  source 1..381: mol_type = other DNA
atgcctgaacccgcaaaatcagccccagctcctaagaaagggtccaaaaaggctgtaaccaaagctcaaaaaaaggatgggaagaagaggaaacggtcaagaaaggagtcctattctgtatacgtatataaggtcttaaagcaggtgcacccagacacaggaattagttccaaggctatgggtatcatgaatagtttcgtgaatgacattttcgagcggattgccggtgaggcatctcggctggcacactacaataagcggtctaccatcaccagtcgggagattcagaccgccgtgaggctgttactcccgggggaactggctaagcatgccgtctccgaagggacaaaagctgtgaccaagtatacatctagtaagtag

SEQ ID NO: 119977 - DNA, 381 bp, synthetic construct
  misc_feature 1..381: note = Description of Artificial Sequence: Synthetic coding sequence
  source 1..381: mol_type = other DNA
atgcctgagccagccaagtccgctcccgcgccaaaaaaggggagcaaaaaggctgtgactaaggcccaaaagaaggacgggaaaaaacgaaagcgaagcaggaaagagagctactcagtgtacgtgtacaaagtgcttaagcaggttcaccccgacaccggtatcagctccaaagccatgggcattatgaactcctttgttaacgatattttcgagcggattgccggcgaggcgtcccgcctcgcacattacaataagcgctcaactatcacctctagagaaatccagaccgccgttaggttactgttacccggcgaactcgccaaacatgcagtgtctgagggcacaaaggcagtgactaagtacacctcctctaagtag

SEQ ID NO: 119978 - DNA, 381 bp, synthetic construct
  misc_feature 1..381: note = Description of Artificial Sequence: Synthetic coding sequence
  source 1..381: mol_type = other DNA
atgccggaaccgaccaaatcagctcctgctccgaaaaaaggtagcaaaaaggctgtgactaaggctcagaagaaggatggcaagaaacgaaaacgctccagaaaggagtcttattctgtctatgtctataaagtgctgaaacaggtacacccagacacagggatttccagtaaggctatgggaattatgaactctttcgtgaacgatatattcgagaggatcgcaggcgaggcttcccggttggctcactacaacaagaggtctacaatcacttcccgggaaattcaaactgcagtccggctgctattgcctggcgaactggcgaagcacgccgtaagtgaaggcactaaggccgttactaaatacacctctagtaaatag

SEQ ID NO: 119979 - DNA, 381 bp, synthetic construct
  misc_feature 1..381: note = Description of Artificial Sequence: Synthetic coding sequence
  source 1..381: mol_type = other DNA
atgccagaacccaccaagtctgcccccgccccgaaaaagggctcgaagaaagccgtgacaaaagcccagaaaaaagatggcaaaaagcgaaagaggtcaaggaaggagagctatagcgtgtacgtctataaggtgctgaaacaggttcacccagacacgggcatctcatctaaggcgatgggcataatgaatagttttgtgaatgatattttcgagagaatcgccggggaggccagccgtcttgctcactataataagcggtccaccataacctctcgcgagatccaaacagccgtgaggttgttgttaccaggtgaactggccaagcatgccgtttcggagggcaccaaggctgtcacaaagtatactagctcaaagtag

SEQ ID NO: 119980 - DNA, 381 bp, synthetic construct
  misc_feature 1..381: note = Description of Artificial Sequence: Synthetic coding sequence
  source 1..381: mol_type = other DNA
atgcccgagcccgcaaagtcagcccctgctcccaaaaaggggtccaagaaggccgtgactaaggcccagaagaaggatggaaagaagcggaagcgctcccggaaggaaagctattctgtttatgtctataaggtgctgaaacaagtccacccagataccgggatctcctccaaagcaatggggatcatgaatagctttgtaaacgatattttcgagcgtattgccggagaagcttcacgactggcacattataataagcggagcaccatcacttcccgggaaattcagactgccgtaagactactactgcccggggaactggctaaacatgcggtatccgaaggaacaaaagcagtgactaagtacacaagctccaaatag

SEQ ID NO: 119981 - DNA, 381 bp, synthetic construct
  misc_feature 1..381: note = Description of Artificial Sequence: Synthetic coding sequence
  source 1..381: mol_type = other DNA
atgccggagcccgcaaaatctgcacccgcgcccaagaaaggaagtaaaaaggctgttacgaaggcccagaaaaaggatggcaaaaagagaaaacgttcccgcaaagagagctacagtgtgtatgtctacaaagtcctcaaacaggttcatcccgacaccggcatatcatctaaagctatgggaatcatgaattccttcgtgaatgatatcttcgaaagaatcgctggggaggcctcaaggctcgcacattacaataagaggtcaactattaccagtagagaaatccagaccgccgtgcgcctgcttctgcccggggagttagctaagcacgctgtatccgaaggcaccaaggctgtgaccaagtacacctcctccaagtag

SEQ ID NO: 119982 - DNA, 381 bp, synthetic construct
  misc_feature 1..381: note = Description of Artificial Sequence: Synthetic coding sequence
  source 1..381: mol_type = other DNA
atgccagaaccagcaaagagcgccccagctccgaagaaagggtcgaagaaggctgtgaccaaagctcagaaaaaagatggcaagaaacgcaaaagatcccggaaggagtcttatagcgtttacgtttacaaagttctgaagcaagttcaccccgatactgggattagttcaaaagctatgggcataatgaatagtttcgtgaatgatatttttgagcggattgctggtgaggcctcccgactagcccactacaataaacgctcaacaattacatccagagaaatacagactgctgtaagactgctgttgccaggcgaactggcgaagcatgccgtgtcagaggggacaaaagcagtgaccaagtacaccagcagtaagtag

SEQ ID NO: 119983 - DNA, 381 bp, synthetic construct
  misc_feature 1..381: note = Description of Artificial Sequence: Synthetic coding sequence
  source 1..381: mol_type = other DNA
atgcccgatcctgctaagtctgccccagcccccaaaaaggggtccaagaaagctgtaacaaaagcacagaagaaagatggcaaaaagcgaaagaggtcccgaaaagagagctattcagtgtatgtatacaaagtactgaagcaagtgcatccggacacagggatctcttccaaggccatgggaattatgaattctttcgtgaacgacatattcgagcgaatagccggcgaggccagtagactggcacactataataaacgcagcactattacatcgcgggagattcaaacggcggtccgactgctgctacctggggagcttgccaaacatgctgtgtctgaaggcactaaggccgtgacaaaatacacttcttccaaatag

SEQ ID NO: 119984 - DNA, 381 bp, synthetic construct
  misc_feature 1..381: note = Description of Artificial Sequence: Synthetic coding sequence
  source 1..381: mol_type = other DNA
atgccagaacctgccaaatcggctcccgcacccaaaaagggtagcaaaaaggctgtgacaaaagcacagaaaaaagacggtaaaaagcgaaagcggtcgagaaaagagtcatactcggtatacgtctacaaggttcttaaacaggtccatcccgacactgggattagtagcaaagctatggggattatgaatagcttcgtgaatgacattttcgagaggatcgctggggaagcgtccaggcttgcccattataataagaggtccaccatcacttccagagagatacaaaccgctgtgaggctgctactcccaggcgaactggctaagcacgctgtttccgaagggacgaaagcggtgacaaagtacacttcatctaaatag

SEQ ID NO: 119985 - DNA, 381 bp, synthetic construct
  misc_feature 1..381: note = Description of Artificial Sequence: Synthetic coding sequence
  source 1..381: mol_type = other DNA
atgccagaactggccaaaagcgctccagccccaaaaaaggggtcgaagaaggcggtgaccaaagcccaaaaaaaggatggtaaaaagaggaagcgaagtcggaaagaatcttactcagtctatgtttataaggttctcaagcaggtacaccctgacacaggcatctcaagtaaggctatggggattatgaactcattcgtgaacgatatcttcgagcggatagcttctgaggcctcgaggctggcccattataacaagcgtagtacaatcacgagtcgagagatccagaccgcagttcgattactgctacccggagaactcgcgaagcatgctgtgtctgaagggactaaagcggtgacgaagtacacttccagtaaatag

SEQ ID NO: 119986 - DNA, 381 bp, synthetic construct
  misc_feature 1..381: note = Description of Artificial Sequence: Synthetic coding sequence
  source 1..381: mol_type = other DNA
atgcccgaacctgtgaagtctgctcccgtgccaaaaaagggtagcaagaaagcaatcaataaagctcagaagaaagatggtaaaaagagaaaacggtctagaaaggaaagctactccgtatatgtgtataaagtcctgaagcaggtacacccagacactggcatcagctcaaaagctatgggaatcatgaacagcttcgtgaatgacatcttcgagaggattgcaggagaggcctctcggctcgctcattataataaaaggtcaacaattacatcacgggaaatccaaaccgcagtccgactgctgctgcccggcgagctagcaaagcacgctgtcagtgaagggaccaaggccgttaccaagtataccagctccaagtag

SEQ ID NO: 119987 - DNA, 381 bp, synthetic construct
  misc_feature 1..381: note = Description of Artificial Sequence: Synthetic coding sequence
  source 1..381: mol_type = other DNA
atgccagaaccttccaagtcagctcctgcccctaagaagggttcaaaaaaggctgtgacgaaggctcagaagaaagacgggaagaagaggaagaggtcgcggaaagagagttattctgtgtatgtgtacaaagtgctgaaacaggtgcaccccgataccggaatttcttcaaaagcaatggggatcatgaattcatttgtcaacgacatttttgagcgcatagccggcgaggccagtcgcctggctcactataacaaacgctccacgatcacctctcgtgaaattcagactgccgtacggttgcttctgccaggcgaactggcaaaacacgctgtgagcgaggggaccaaagccgttactaagtacactagtagtaaatag

SEQ ID NO: 119988 - DNA, 381 bp, synthetic construct
  misc_feature 1..381: note = Description of Artificial Sequence: Synthetic coding sequence
  source 1..381: mol_type = other DNA
atgccagaaccatcaaagagcgcccctgctcccaagaaggggtcaaaaaaagccgtcacgaaggcccaaaagaaggacggcaaaaaacgtaaacggtccaggaaggagagctactctgtgtatgtatacaaagtcctcaaacaagtccaccccgataccggcattagctcgaaagcgatgggaattatgaacagctttgtgaacgacatctttgagagaatcgcgggtgaggcctcacggcttgcccactataacaaacgcagcaccataacgtcccgagagattcagacagcggttcggctgctcttacctggcgaactcgcaaaacacgctgtgtcagagggaacaaaggcagtgactaagtacacgagcagcaagtag

SEQ ID NO: 119989 - DNA, 381 bp, synthetic construct
  misc_feature 1..381: note = Description of Artificial Sequence: Synthetic coding sequence
  source 1..381: mol_type = other DNA
atgcccgaccccgcgaaaagcgcccctgccccaaagaagggatctaagaaagccgtcaccaaggcccagaagaaggatgggaaaaaaagaaagaggtctcgcaaggaatcctatagcatctatgtgtataaggtgcttaagcaggtccatcctgatacaggcataagctcaaaagcaatgggtattatgaattcttttgtgaatgatatctttgaaagaatagcgggtgaggcctcacgccttgcccattataacaagcggtccaccattacatcgagggagatacagactgcagtgcggctcttgttgcctggcgagcttgctaaacatgccgtgtctgagggcacaaaggcggtaacaaagtacacctcaagtaaatag

SEQ ID NO: 119990 - DNA, 411 bp, synthetic construct
  misc_feature 1..411: note = Description of Artificial Sequence: Synthetic coding sequence
  source 1..411: mol_type = other DNA
atggcacggaccaaacagaccgcccggaaatctaccggaggaaaggccccccgcaagcaactcgctacgaaagctgcaaggaaatcagctccggcgacgggtggcgtcaagaaaccccatcggtataggcccggaacggtggctctccgagagattcgccgctatcagaaatctactgagctcctgattaggaagcttccattccagcggctggtaagagagatcgctcaggactttaaaacagatttgagattccagtccagtgcggtaatggcgttgcaagaggcctgcgaggcttacctggtgggtctgttcgaggatactaacctttgcgccatccacgcgaaaagggtgaccatcatgcccaaagatatccaactggcccgtcgaatcagaggcgaaagggcctag

SEQ ID NO: 119991 - DNA, 411 bp, synthetic construct
  misc_feature 1..411: note = Description of Artificial Sequence: Synthetic coding sequence
  source 1..411: mol_type = other DNA
atggcgaggactaaacagactgccagaaaaagtactgggggaaaggcgccccggaagcaattagcaacgaaggcagcgagaaaatcagcaccagctacaggcggtgtgaaaaaaccgcaccgatacagacctggtacagtcgccctgagggagattagaagataccagaagagcacagagctcttgataagaaagctgcctttccagagactggtccgcgagatcgcgcaggactttaaaacagatctacggttccaatcttccgcggttatggcgcttcaggaggcctgcgaggcatacctggttggcctgtttgaagacactaacctttgtgccattcacgccaagcgggtaacaatcatgcctaaagacattcagcttgcccggcgcatccgaggagagcgagcttag

SEQ ID NO: 119992 - DNA, 411 bp, synthetic construct
  misc_feature 1..411: note = Description of Artificial Sequence: Synthetic coding sequence
  source 1..411: mol_type = other DNA
atggccaggactaagcagactgcccgcaagagcaccggaggaaaggctccgagaaaacagctggccactaaggccgcacgaaaaagcgcccccgcaactggaggcgtgaagaaaccacaccgataccgtcccggcaccgttgccttaagagagatcaggcgttaccagaagagtaccgaactgctgattcggaagttgccatttcagcgactggtccgagaaattgcccaagactttaaaacagacctaaggtttcagagcagtgccgtgatggctctgcaagaggcatgcgaagcatacctggtcggtctcttcgaagatacaaatctatgtgcaatacatgccaagagagtcactataatgcccaaagacatccagctggccaggcgcatcagaggagagcgggcctag

SEQ ID NO: 119993 - DNA, 411 bp, synthetic construct
  misc_feature 1..411: note = Description of Artificial Sequence: Synthetic coding sequence
  source 1..411: mol_type = other DNA
atggcgcggacaaaacagacagcccgcaaaagcacgggtggcaaagctccaaggaagcagctggctaccaaggctgctaggaagtccgcacccgctactgggggagtgaagaaacctcaccgataccgccccggaacagtcgcgttacgagaaatcaggaggtatcagaagtcaacggagctccttataaggaagttgccctttcagcggcttgtgcgtgagatcgcgcaggattttaaaactgacctgagattccaaagctccgccgtgatggcgcttcaggaggcttgcgaagcctatctggttgggttattcgaggacaccaacttgtgcgcgatccatgcaaaaagggtcaccattatgccgaaagatattcagctggccagaaggattagaggagagcgcgcgtag

SEQ ID NO: 119994 - DNA, 411 bp, synthetic construct
  misc_feature 1..411: note = Description of Artificial Sequence: Synthetic coding sequence
  source 1..411: mol_type = other DNA
atggcaaggacgaagcagacggccaggaagagcacaggtggcaaggctcctcgtaaacagctggcgacaaaggccgcaaggaaaagtgcacccgccacggggggagttaagaagccacacagatataggccaggcactgtcgcattgcgtgagatccgccgataccaaaaatccacagagctcctcattcggaagcttccctttcagcggcttgtgcgggaaattgcacaggatttcaagaccgacttgaggttccagtccagcgcggtgatggccttacaggaggcttgtgaggcgtacctggtgggacttttcgaagacacaaacttatgtgctattcacgctaagcgggtgacgatcatgcctaaggatattcagcttgcacggcgcatacgaggcgaacgggcatag

SEQ ID NO: 119995 - DNA, 411 bp, synthetic construct
  misc_feature 1..411: note = Description of Artificial Sequence: Synthetic coding sequence
  source 1..411: mol_type = other DNA
atggccaggaccaaacagaccgcccggaagagcacaggcggcaaggcacccagaaagcagctggccacaaaagcagccagaaagagtgcacctgccacaggcggtgtgaagaaaccccaccgatatagacccgggacagtggctcttcgcgaaattagaagatatcagaaaagcactgaattgctaatccgaaagctgccctttcaacgcctggtcagagaaatcgcgcaggactttaagacagacctgcggttccagtcatctgccgtgatggcgctgcaggaagcctgtgaagcttatctcgtgggcctgttcgaggatacaaatctgtgtgcaatccacgccaagcgcgtgaccattatgccaaaagacatccaactggccagacgaattaggggagaaagggcatag

SEQ ID NO: 119996 - DNA, 411 bp, synthetic construct
  misc_feature 1..411: note = Description of Artificial Sequence: Synthetic coding sequence
  source 1..411: mol_type = other DNA
atggctaggacaaagcagactgcaagaaaatccacgggtggtaaggcccctcggaaacaattggctaccaaggccgccagaaaaagcgcaccagccacgggcggagtgaaaaagcctcacagatacaggcccggtaccgtcgcattgagggagatccgccgctaccagaagtccaccgaattactgatccggaaactgccttttcagaggttggttagggaaattgcccaggattttaaaactgacctcaggtttcagtcctccgccgtcatggcactacaggaagcttgtgaagcatatctggtcggcctgtttgaggatacgaatttgtgtgccatacacgcaaaacgggtgactattatgcccaaagatatccagcttgcgaggcgaattcggggcgagcgagcctag

SEQ ID NO: 119997 - DNA, 411 bp, synthetic construct
  misc_feature 1..411: note = Description of Artificial Sequence: Synthetic coding sequence
  source 1..411: mol_type = other DNA
atggctcggaccaagcagactgcccgaaagagtaccggcggtaaagcacctcgaaagcagttggccaccaaggctgctcgaaaatccgcaccagccactggtggtgtcaagaaaccacaccgttatcggcctggaactgtcgcattgcgggagatcaggaggtatcagaaaagtacagagctcctgatccgaaagctgcctttccagagacttgtcagagagatcgcccaggacttcaagactgacttacggttccagagtagtgccgtcatggctctgcaggaagcttgcgaggcctacctcgtgggactattcgaagacacgaatctgtgcgctattcatgctaaacgcgtgactatcatgccaaaagatattcaattggcaaggcgaatcaggggcgagagggcctag

SEQ ID NO: 119998 - DNA, 411 bp, synthetic construct
  misc_feature 1..411: note = Description of Artificial Sequence: Synthetic coding sequence
  source 1..411: mol_type = other DNA
atggccaggactaagcagacagctcgaaagtctacaggcggtaaggctccacggaaacagctggcaacgaaagcagccagaaagagcgcccctgctacgggtggggtaaagaaaccccatcgctacaggccaggaactgttgcgctgagagaaattagacgctaccagaagtccaccgagcttttaatccgcaaactgccgtttcagaggctcgtgcgggagattgcacaggattttaaaaccgatcttcgctttcagagctccgcagtgatggccctacaagaggcatgcgaggcatacctggtggggctgtttgaggatactaacctgtgcgccattcacgccaaaagagtgactatcatgcccaaggatatacagttagctaggagaatcaggggcgagagggcatag

SEQ ID NO: 119999 - DNA, 411 bp, synthetic construct
  misc_feature 1..411: note = Description of Artificial Sequence: Synthetic coding sequence
  source 1..411: mol_type = other DNA
atggccaggactaaacagactgctcggaagagcactgggggaaaggctcccagaaagcagctggctactaaggccgctcggaagtcggcgccagcgacaggaggagtgaagaagccacatcggtaccgtccaggcactgtggccctgagggagatccgaagatatcagaaaagtaccgagctgttaattcgcaagctccccttccagcggttggtgagagaaattgcacaggacttcaagacagatctgcgattccagagttcggccgtgatggccctgcaggaggcttgtgaggcatacctggtgggactgttcgaggatactaatctctgtgccatccacgccaaacgcgtgaccattatgcctaaagacatacaattggcacggagaatcaggggcgagcgcgcatag

SEQ ID NO: 120000 - DNA, 411 bp, synthetic construct
  misc_feature 1..411: note = Description of Artificial Sequence: Synthetic coding sequence
  source 1..411: mol_type = other DNA
atggctagaacgaaacagactgcccggaagagcaccgggggaaaggctccgagaaaacagctggcaaccaaggctgctcgaaaatcggcaccggctacaggcggggtaaagaaaccccacaggtacagacccggcaccgtagccctacgcgagattcggcggtaccagaaatccacagaacttctgattcggaagctgccgttccagagactggttcgcgagattgcgcaggactttaagactgatctgcgtttccagagtagcgccgtcatggccttgcaggaggcatgtgaagcatacctggtcggtctgttcgaagacaccaacctatgtgcaatccacgccaaacgcgtgacaatcatgccaaaagatattcagcttgcgcggcgtatcaggggggagagggcatag

SEQ ID NO: 120001 - DNA, 339 bp, synthetic construct
  misc_feature 1..339: note = Description of Artificial Sequence: Synthetic coding sequence
  source 1..339: mol_type = other DNA
atgtcaggacggggcaaaggcggaaaaggattagctaaggccaagacctgcagctccttacccggcctgcagttccccggtcgagtgcggcatttgttccggaaaggcaactactttgagcccgtgggagctggggctccagtgtatttgcagtatttagcagctgaaattctcgagctagttggaagcgcgatcagagataaaactcgctctatcatcccaaggcacctccagctcgccattcgcaacgatgaagaggttaataaacagctggggaatgttaccattgctcagggcggggtgctgtcaaacattcaggccgtcctcctccccaaatag

SEQ ID NO: 120002 - DNA, 312 bp, synthetic construct
  misc_feature 1..312: note = Description of Artificial Sequence: Synthetic coding sequence
  source 1..312: mol_type = other DNA
atgtctggccgggggaaaggagggaagggcttgggtaaggggggtgcgaagcgccaccgcaaggtgctccgggataatatccagggaatcactaaacccgccatacgtaggttggcccgacgcggaggagtgaagagaatctcaggactgatctatgaggagacacggggcgtgctgaaagtcttcctggagaacgttatacgcgacgccgttacctacacagaacacgctaaaagaaaaactgtgacagcaatggatgtggtgtatgcgctgaaacggcagggtcgcacgctttacgggtttgggggctag

SEQ ID NO: 120003 - DNA, 312 bp, synthetic construct
  misc_feature 1..312: note = Description of Artificial Sequence: Synthetic coding sequence
  source 1..312: mol_type = other DNA
atgagtggccggggtaagggaggtaaggggctgggcaagggtggtgccaaaagacatcggaaggtgcttagagataacatacagggaatcaccaagcccgcaattcgcagactggcccggagaggtggagtgaaacgtatttccgggctgatttatgaggaaaccaggggtgtcctcaaagtgtttctcgaaaacgtgatccgggacgcagtcacatatacagaacacgcaaagcgaaagacagttacagcgatggatgttgtctatgcgcttaaaagacagggtagaacgctctatggattcggcggctag

SEQ ID NO: 120004 - DNA, 312 bp, synthetic construct
  misc_feature 1..312: note = Description of Artificial Sequence: Synthetic coding sequence
  source 1..312: mol_type = other DNA
atgagtggcagaggcaaggggggcaagggtctgggcaaaggcggtgccaaacggcatcgcaaggttctgcgcgataacattcagggcattactaagcccgccatccggagactggccagaaggggaggtgtcaaacgcatctcaggacttatttatgaagaaacacgaggggtactgaaagtgttcctagagaacgtgattagagacgccgtcacatatacagagcacgctaaaagaaaaaccgtgacagccatggacgtcgtgtatgcactcaaacgccaggggcgcaccctgtatggctttgggggatag

SEQ ID NO: 120005 - DNA, 312 bp, synthetic construct
  misc_feature 1..312: note = Description of Artificial Sequence: Synthetic coding sequence
  source 1..312: mol_type = other DNA
atgtccggccgaggaaaaggcgggaaagggttgggaaaaggcggcgcaaagcggcaccgaaaagttctgcgcgacaacattcagggcattaccaagccagccatccggcgactggctcggcgtgggggagtgaaaaggattagcggcctgatttatgaagaaactcgaggagtactgaaggtgtttctcgaaaatgtcatccgtgatgccgtgacttacacggaacatgcgaaaaggaagaccgtgactgccatggacgtggtctacgctttaaaacgacagggccgcactctatatggttttggcggctag

SEQ ID NO: 120006 - DNA, 312 bp, synthetic construct
  misc_feature 1..312: note = Description of Artificial Sequence: Synthetic coding sequence
  source 1..312: mol_type = other DNA
atgagtggtcgggggaaaggggggaagggtctcggcaagggaggggccaagaggcacaggaaagttttaagagacaacatacagggcatcactaaaccggcaataaggcgcctggctcggcgcggcggagtaaagagaatcagtggcctgatctacgaggagacaagaggagtactcaaagtcttcctggagaatgtgataagagacgcagtgacctacaccgagcatgctaagcgtaagacggtcacggctatggacgttgtgtatgccctgaaacggcaagggagaaccctgtacgggttcggggggtag

SEQ ID NO: 120007 - DNA, 312 bp, synthetic construct
  misc_feature 1..312: note = Description of Artificial Sequence: Synthetic coding sequence
  source 1..312: mol_type = other DNA
atgagcggacgtgggaagggaggcaaaggtctcggaaaggggggtgcaaaacgccatcggaaagttctgagagacaacatccagggcatcacaaagccagcgattcgacgcctggcacggcggggtggagtgaagaggatctctggtcttatatacgaggagacaaggggggtactgaaggtcttcctggagaatgttattcgcgacgccgtgacgtataccgaacacgccaaacgaaagactgtgacggccatggacgtggtttacgccttaaaacggcagggccgtactctgtatggcttcggtggctag

SEQ ID NO: 120008 - DNA, 297 bp, synthetic construct
  misc_feature 1..297: note = Description of Artificial Sequence: Synthetic coding sequence
  source 1..297: mol_type = other DNA
atgtccgttcggggtaaagcaggcaaaggattaggcaagggaggagctaagtgccaccgcaaagttctgagcgacaacattcagggcatcacgaagtgtactattcgcaggctggcacgccatggaggtgtcaagcggattctgggattaatttacgaagagacccgccgtgtgtttaaggtgttcctcgagaatgtgatttggtatgcagtaacgaataccgaacacgcgaagcgaaagactgtcactgcgatggcagtggtatacgttctgaagcgtcaaggccgcaccctatag

SEQ ID NO: 120009 - DNA, 312 bp, synthetic construct
  misc_feature 1..312: note = Description of Artificial Sequence: Synthetic coding sequence
  source 1..312: mol_type = other DNA
atgtcaggaaggggcaaagggggtaaagggctaggcaagggcggagctaaacgtcacagaaaggtattacgtgacaacattcaaggcatcactaaacctgcaattcggcgcctcgcacgaaggggcggcgtcaagcgcattagtggcctaatttacgaagagaccagaggagtgctcaaggtgtttcttgagaacgtgatccgggatgcggttacatacaccgagcacgccaagagaaagaccgttacagcgatggacgtggtctacgcacttaagcgccagggcagaacactatacgggtttggaggttag

SEQ ID NO: 120010 - DNA, 312 bp, synthetic construct
  misc_feature 1..312: note = Description of Artificial Sequence: Synthetic coding sequence
  source 1..312: mol_type = other DNA
atgagcgggagaggaaaaggcggaaaggggcttggcaagggaggcgctaagaggcacaggaaggtcctgcgagacaacattcagggaatcaccaaaccagcgattcgccgattagcacgcaggggaggagtcaagaggattagcggccttatttacgaagaaactagaggcgtcctcaaagtgtttctggagaacgtgatcagggacgctgttacctatactgagcatgccaaaaggaaaacggtaacggctatggacgtagtctacgctctgaaacgccaggggcgcaccctgtatggatttggtggatag

SEQ ID NO: 120011 - DNA, 312 bp, synthetic construct
  misc_feature 1..312: note = Description of Artificial Sequence: Synthetic coding sequence
  source 1..312: mol_type = other DNA
atgtccgggagaggcaaggggggtaagggactgggcaaagggggagctaaaagacaccgaaaggtcttgagggataatattcagggaattaccaagcccgccatccgacgactggcccgaagagggggcgtgaaacgaatctcaggtcttatttatgaggagacccggggcgttttgaaggtattcctcgagaatgtcatccgtgatgctgtgacctacactgagcacgccaaaaggaagacagtgacagcaatggacgtcgtctacgcattgaaaagacaagggaggacactgtacggttttggcggttag

SEQ ID NO: 120012 - DNA, 312 bp, synthetic construct
  misc_feature 1..312: note = Description of Artificial Sequence: Synthetic coding sequence
  source 1..312: mol_type = other DNA
atgtctggccgagggaaaggtggtaaggggctcggtaaaggcggggctaagagacatcgtaaagtgttaagagacaatatccaggggatcaccaaaccagccataaggcgactagcccgtaggggtggagtgaagagaattagtgggctgatatatgaagagacccgcggtgtgttaaaagtatttctagaaaacgtcattcgcgacgccgtgacctacaccgagcacgctaagcgcaaaaccgtgaccgccatggatgtagtttatgcattgaagcggcaggggaggaccctctatgggttcggaggctag

SEQ ID NO: 120013 - DNA, 312 bp, synthetic construct
  misc_feature 1..312: note = Description of Artificial Sequence: Synthetic coding sequence
  source 1..312: mol_type = other DNA
atgagcggcagagggaaaggtggaaagggtctgggcaaaggtggtgccaaacgccatcgtaaggtgcttcgggataacattcagggcattactaagcctgcaataaggcgtctagcacggcgagggggagtcaaacggatctccggattgatatatgaggaaacgagaggggttctgaaggttttcctggaaaatgtgatacgagatgctgtcacttacacagagcatgccaagcggaagactgtgacagcgatggacgtggtgtatgctctaaagcgccagggacgcaccctttacggctttggaggctag

SEQ ID NO: 120014 - DNA, 312 bp, synthetic construct
  misc_feature 1..312: note = Description of Artificial Sequence: Synthetic coding sequence
  source 1..312: mol_type = other DNA
atgtccgggagaggaaagggcggcaagggtttagggaaaggtggggcgaagcgccacagaaaagttcttcgcgataacattcaaggaatcacgaagcctgccattcgcagactcgctcggagaggcggtgtgaagagaatttctggccttatttatgaagagaccagaggggtgctgaaggtcttcctcgagaacgtaatacgggacgctgtaacatacacggagcatgcaaagcgcaaaacggtgacagccatggacgtagtgtatgctttgaaacgtcagggacgcacactgtatgggtttggcggctag

SEQ ID NO: 120015 - DNA, 390 bp, synthetic construct
  misc_feature 1..390: note = Description of Artificial Sequence: Synthetic coding sequence
  source 1..390: mol_type = other DNA
atgagcggccggggtaagcaaggtgggaaggcacgggctaaggccaagagtcggtcaagcagggctggacttcaattccctgttggtcgggtgcataggctgcttagaaaaggcaattacgcagagagggtgggtgctggagctcccgtatatatggccgcggtgctagaatatctgactgctgaaatactagaactggctgggaatgcggcccgagataacaagaagaccaggattatcccccggcacctgcaactagccatcaggaacgatgaggaactcaataagctgttgggcaaagtcacaatcgcgcagggtggggtcctcccaaatattcaagctgtgctgttgcctaagaagactgaatctcacaaagctaagtccaagtag

SEQ ID NO: 120016 - DNA, 381 bp, synthetic construct
  misc_feature 1..381: note = Description of Artificial Sequence: Synthetic coding sequence
  source 1..381: mol_type = other DNA
atgccagaaccagccaaatccgccccagcccctaagaaaggctccaaaaaagctgtcaccaaagcccaaaaaaaagatgggaagaagagaaaacggagtcgaaaggaatcatactcgatttacgtgtacaaggttctgaagcaggtgcatcctgacacagggatctcatctaaagcgatgggcatcatgaattcttttgtgaatgatatctttgaaaggattgccggggaggcctctcgcctcgctcattacaataaacgtagtaccattacttctagagagattcaaacggctgtcaggttgctcttgcctggtgagctcgcaaaacatgctgtgtcagagggcactaaagcagtgactaaatatacaagctcaaaatag

SEQ ID NO: 120017 - DNA, 411 bp, synthetic construct
  misc_feature 1..411: note = Description of Artificial Sequence: Synthetic coding sequence
  source 1..411: mol_type = other DNA
atggcccgcacaaagcagacagcccggaaatcgacaggcggtaaagccccccgaaaacagcttgctactaaggctgcgagaaagtcagctcccgctacaggcggggtcaagaagccgcataggtacaggcccggaacagtggctctccgggaaattaggaggtaccagaaatcaacagaactgttgatacgaaagcttccatttcagcgtctcgtcagggagattgcacaggactttaaaactgatttgaggttccagtccagcgccgtgatggctctacaggaggcctcggaggcctatcttgtgggcctgttcgaggataccaatctgtgtgctattcatgccaaaagggtcacaattatgccgaaggatatccagctggcccgacgtataagaggcgaacgagcatag

SEQ ID NO: 120018 - DNA, 411 bp, synthetic construct
  misc_feature 1..411: note = Description of Artificial Sequence: Synthetic coding sequence
  source 1..411: mol_type = other DNA
atggcacggacaaaacagaccgctaggaaatccaccggaggcaaagcccccagaaaacagttagcaacaaaggtagcccggaaaagtgcccctgccactggcggggtgaagaagccacaccggtaccggcccggaaccgtagccttgcgggaaatacgccggtaccagaaatccacggaactacttatccgcaagttgccctttcagcgattgatgcgggaaattgcccaagattttaagactgatctacgatttcagtcctctgcggttatggcactccaagaggcttgcgagagttacctggttggcctgtttgaagataccaacctatgtgtgattcatgccaaaagggtcactatcatgcctaaggacatacagctggctagacggattcgcggagagagagcttag

SEQ ID NO: 120019 - DNA, 684 bp, synthetic construct
  misc_feature 1..684: note = Description of Artificial Sequence: Synthetic coding sequence
  source 1..684: mol_type = other DNA
atggagggacagagtggaagatgtaagatcgtggttgtcggtgacgccgagtgtggcaagaccgctctcctgcaagtgttcgcaaaggacgcatatccaggcagctacgtcccaaccgtgtttgagaactacaccgcaagcttcgagatcgacaagagaaggatcgaactgaacatgtgggatacaagtgggtcatcatattatgataacgtgaggccccttgcataccccgacagcgatgctgtgctgatatgtttcgatattagccggcccgagacactggatagtgtactgaagaagtggcaaggggaaacacaggagttctgtccgaatgcaaaagtcgtgctggtgggctgcaagcttgacatgcgcaccgacttggccaccctccgtgaactcagcaaacagcgtctcatccctgtgacccatgagcaggggactgtgctggctaaacaagtaggggctgtatcatatgttgagtgctccagtcggagctccgagcgcagtgtgcgcgacgtgtttcacgtggctacggtggctagtctgggtaggggacaccgtcagttacgccgcactgactccagacgcggcatgcaacggtcggcccaactttccggccgccccgatcgcgggaatgagggtgagatacacaaagatcgggccaagtcttgtaatctaatgtag

SEQ ID NO: 120020 - DNA, 3114 bp, synthetic construct
  misc_feature 1..3114: note = Description of Artificial Sequence: Synthetic coding sequence
  source 1..3114: mol_type = other DNA
atgaacagccctaacgaaagtgatggaatgagcggacgcgaaccaagccttgaaatcctcccccgtacctcactccacagcattccagtaaccgtggaggtgaagcccgttctaccacgcgccatgccgtcatcaatgggaggaggcggcggcgggtcccccagtccggtggaactgaggggcgcactggtgggcagtgtggatccaaccctgagggaacagcaattacagcaagaactgctggccctaaagcagcagcagcaattgcagaagcaattactgttcgccgagtttcagaagcaacacgaccatctcactagacagcacgaagtacaactccagaaacatcttaaacaacaacaagagatgctggcagccaagcaacagcaagagatgcttgcagctaagcgccaacaggagctggaacaacagcgacagagagagcagcagcgccaggaggagttggagaaacaacgactagagcaacaactgctgatactgagaaacaaggaaaagtcaaaagaaagcgctatagcctcaactgaagtcaagctgaggctgcaagagtttttgctttccaaatccaaggaaccgactccggggggcctgaaccatagcctgccacagcatcctaaatgctggggggcacatcatgcgtcacttgatcagtcttcacctccacaaagcgggccacccggcacccctccgtcgtataagttaccactccctggcccttatgacagccgcgatgacttccctttgagaaaaacagccagtgagcccaacctgaaagttcgttctaggctaaagcagaaagtcgcagaacgaaggtcatcccctctcctccggcggaaggatggaacagttatttcaacatttaagaaacgcgcggtggaaatcaccggggctggacccggtgctagcagtgtttgtaactccgcccctggcagcggccctagctcgcccaacagttcacacagcacaattgcagaaaacggtttcacgggatccgtgccaaacatccccaccgaaatgttaccacagcatcgagcactgccactggattcctcaccgaatcagtttagcctctacacctcccccagcttgcctaatatcagcctggggctacaggctacagtgacagtcacaaatagccacctgactgcttctcccaagctcagtactcaacaggaagccgaaaggcaggctctgcaaagcctgagacaggggggaacacttactggcaagtttatgtctacgtcaagcattccgggatgcctgctcggcgtggcactcgaaggcgatgggtctcctcacggtcatgccagtttgctgcagcacgtgttactcctggaacaggcacgacagcagtcaactcttatcgccgtgcctctgcacggccagagccctttggtgactggtgagcgcgtagccacgagcatgagaaccgtaggcaagctccctaggcatagacctctgtcgaggacgcagtcttctccacttccccaaagtcctcaggctctccagcagctcgtgatgcagcagcagcatcaacaatttctggagaagcaaaagcagcagcagttgcagctggggaagatattaactaaaacaggagagctacctcgtcagccgacgacacatcctgaggagactgaggaggagctaacagaacaacaggaggtgttgctgggcgagggcgcactgacgatgccccgggagggatctaccgagtccgaatctacccaagaggatctcgaggaagaagatgaggaggatgacggtgaagaagaggaggattgtatccaagtgaaagatgaggaaggcgaatcaggggccgaagaaggccctgacctggaagagccgggggccggctataaaaagctgttctcggatgcgcagccattgcagcccttacaggtctatcaggccccccttagccttgccactgtacctcaccaggctctaggtcggacccagtcatccccggccgcaccaggcggaatgaagagtcctcccgatcagcctgtgaagcacctgttcacaacaggcccaatatcacagaaaatgtacgcagtgcttccttgcggcggtatcggtgtcgactccgacactgtttggaatgagatgcactccagtagcgcggttcggatggccgttggttgtctgctagagttggctttcaaggtggccgcgggcgagcttaagaatggctttgcaatcatacgaccccccggtcatcatgccgaggagtctaccgcgatgggattctgcttttttaactctgtggccatcacagccaagctgctgcagcaaaaacttaacgttggaaaggtcctgattgtggattgggatattcaccatggtaatggaacccagcaggctttctacaacgatccttctgtgttgtacatctccctccaccggtatgataatggtaatttctttccagggagtggggcacctgaagaagtgggaggcggaccaggcgttggctataatgtgaacgtcgcctggaccggtggtgtggatccgcccatcggggacgtagagtacctgactgcctttcgtacagtggtgatgcccatcgcacatgagtttagcccagacgttgtcctggtgtcagctggctttgatgccgtggaaggccacctatctccactgggaggctattccgtcaccgcacgatgttttggacacctcacacgccagctgatgaccctagctggtgggagggtggttctggctctggaaggcggccatgaccttacagcgatctgcgatgcctctgaagcctgcgttagcgctttgttgagcgtggaactgcagcccctcgatgaggccgtgctccagcagaaacctaacatcaatgccgtcgccactctggaaaaggtgattgagattcagtctaagcactggagctgcgtgcagaagtttgctgctggactggggcgttccctaagggaggcccaggccggggaaacggaagaggcagagacagtctccgccatggctctgctgagcgtcggggctgagcaggcccaggccgccgctgcccgggagcactcccctaggcctgcagaggagccaatggagcaggaaccagctctgtag

SEQ ID NO: 120021 - DNA, 3369 bp, synthetic construct
  misc_feature 1..3369: note = Description of Artificial Sequence: Synthetic coding sequence
  source 1..3369: mol_type = other DNA
atgaactctccgaacgagtcagatggcatgtccgggagggagccttccttggagatcttacccaggacctctttacattcgatacctgtcaccgtggaagttaaaccagtattgccccgggcaatgcctagctcaatgggaggcggcggtggcggcagcccatcccccgtcgagctacgaggcgcgttagtcggatcagtggatcccacactgagggaacaacaattacagcaggaactgctcgctctaaagcagcaacaacagttgcaaaaacagttgctctttgccgaattccagaagcaacatgaccatctcacacgacaacatgaggtccaactacagaagcatctcaagcaacagcaggaaatgctggccgccaaacaacaacaggagatgctcgctgcgaagagacaacaggagctggagcaacagaggcaacgagaacaacagcgacaggaagagctggagaagcaacggctcgagcagcagctgctgattttgcggaacaaggaaaaatctaaggagtctgccatcgcaagcactgaagtcaaacttaggctccaggagttcctactgagcaaatccaaagagcccaccccaggcggcctgaaccattcccttccacagcatcccaagtgctggggcgcccatcacgcgagtctcgatcagtcgtccccaccgcagtcaggacctcccggcacccctccaagctacaagctgccacttccgggcccatatgattccagggacgatttccccctgcggaagaccgcatcagagccgaacttgaaagtacgctctagactgaagcagaaagtggctgagcggagatccagtccccttttacgcagaaaggatggcaccgttatctccacttttaagaaacgagcagtggaaatcacgggggctgggccaggcgcatccagtgtgtgcaacagtgcaccgggctctggaccctcctcccccaactcctcacattcgactattgccgaaaacggctttacaggcagcgtgcctaacatcccaacagagatgctgccgcagcaccgcgccctacctctggattcttcccctaatcagttcagtctgtacacctcccccagtttgccaaacatttccttgggtctgcaagccaccgtcaccgtgaccaatagtcacttgactgcttccccgaagctctctactcagcaagaagcagagaggcaggccctgcagtcactcaggcagggcggtaccctcacggggaagtttatgagtacttccagtattcctggctgtctactcggagtcgccctggagggcgacggcagcccacatggacacgcttccctgctacagcacgtcttacttttggaacaggcaaggcagcagagcacgttgatcgccgttcccctgcacgggcagagccccctcgtgaccggggagcgggtcgccacatccatgaggacggtggggaagctcccacggcataggccgctttctcgcacacagagttccccattgccacagtcacctcaggccctccaacagttagttatgcagcagcagcaccagcagttcctcgaaaagcagaagcaacaacagctgcagttgggaaagatattgacgaagacaggcgagttgccccggcagccaacgacccatcctgaggagaccgaggaggaactgaccgagcagcaggaagtgttactgggagagggcgcgttaaccatgcctcgggagggcagtaccgagtctgaaagtacacaggaagacttggaggaagaagacgaggaggacgacggggaagaggaagaagattgtatacaggtgaaggacgaagaaggcgaaagcggagcggaggagggccccgatttagaagaaccaggcgccggctataaaaaactgttttccgacgcacaacccttgcagccccttcaggtataccaggcacccctgtctctggcaactgtgcctcaccaggctctgggaagaacacaaagctctcccgctgctcctggtggcatgaagagtccgcccgatcagcccgtgaagcacctcttcacaaccggagtggtgtacgacactttcatgctgaaacaccagtgtatgtgcggaaatactcacgtgcaccccgagcacgccggtcgaatacagagcatttggagcagacttcaggagaccggacttttgtccaaatgtgagcggattaggggacgaaaggccacactggacgaaatccaaacagtgcattctgagtaccacacgctcctttacggcaccagccccctgaacagacagaaacttgactccaaaaagttgctcgggccgatcagccaaaagatgtatgccgtcctcccctgtgggggaatcggggtggactctgatactgtttggaacgaaatgcactcttccagcgccgtgcgaatggctgtcgggtgcctgctcgagctcgcctttaaagttgctgctggcgagctgaagaacgggtttgctatcatcaggccccccggacaccacgctgaggaaagtactgctatgggtttttgtttcttcaacagtgttgccatcacagccaagctactgcaacagaaactgaacgtgggcaaggtgcttattgtggactgggacattcaccacggaaatgggacacagcaagctttctacaatgatccctccgttctctacatatccctacatagatatgataacggaaatttcttcccaggcagcggcgcacccgaagaggtggggggcgggcctggcgtaggttacaatgtgaacgtcgcgtggacaggaggcgttgaccctccaatcggcgatgtggagtacctcacggcttttcgcaccgtagtcatgcctattgctcacgagttttctccggatgtcgtgctggtgtccgccggctttgatgctgttgagggacacctttcacccctgggcggatacagcgtcactgccaggtgcttcgggcacttaaccaggcaactcatgaccctggcaggcggccgggtggtcctggcgcttgaagggggtcatgaccttactgctatctgcgacgcctcagaggcatgcgtctcagctttgttgtccgtcgaattacagccacttgatgaggcagtgttgcaacagaaacccaacatcaacgctgtggcaaccctcgaaaaggtgatcgagattcagagtaaacactggtcgtgcgttcagaaattcgccgccggactcggtcggtctctgcgggaagcacaggctggagagaccgaagaagccgaaaccgtctctgcgatggccctactgtctgttggtgccgagcaggcccaagctgctgccgcccgcgaacatagccctcggccagcagaggaaccaatggaacaggaaccagccctctag

SEQ ID NO: 120022 - DNA, 1776 bp, synthetic construct
  misc_feature 1..1776: note = Description of Artificial Sequence: Synthetic coding sequence
  source 1..1776: mol_type = other DNA
atgatgtccagtcctgcacagtccagatccccggacctgatgtggaatctcgtgccctgggtacttttctgcggctgttgcaggatctttcccgatggggttgcgggccgcgaacagctcctcgcccaacagagaatgcatagcatgattagctccgtggacgtcaaatcagaggtgcctgtaggcctggaacccattagccctctcgacctgagaacagacctgaggatgatgatgccagttgtggatcctgtggtcagggagaaacagctgcagcaggagctgctcctgatccagcagcagcagcagattcaaaagcaattacttatcgcagaattccagaagcaacacgagaaccttactcgacagcaccaggcccaattgcaggaacatattaaggaattactggcgatcaagcagcaacaggagctgctcgaaaaagaacagaagttggagcaacaaagacaggagcaggaggtggagcgccaccggcgcgagcaacagttgcccccgctcagaggaaaggaccgcgggagagaaagggccgttgcctcgaccgaagtcaagcagaagctgcaggaatttctgttgagcaaaagcgcgacgaaagacactcccactaacggaaagaaccactccgtgtcaaggcatccaaagctctggtacaccgccgcccatcacacgtcactcgatcaatcctctccccccctttccggtacgtctccctcctacaaatacaccttgccaggagcacaagatgcaaaggacgactttccgcttcgcaaaactgagagctcagtgtcttcttctagccccggatccgggccaagctctccaaacaatggaccaaccggcagtgttacagagaatgagaccagcgttttgccccccactccacacgccgagcagatggtgtcccagcaaaggatattaattcatgaggattccatgaatttgctaagcctttacacgtcaccctcacttcccaatatcacattagggttaccagctgtgcccagtcagctgaacgccagtaactcgctgaaggaaaagcagaaatgtgagacacagacacttagacaaggagtgccgcttcctggccagtatggcggtagtatcccggcaagcagttcccacccccatgtgacactggagggtaagccccctaacagtagtcaccaggctttgttgcagcatctcctgctgaaggaacagatgcgacagcagaagttattagtcgccggtggggtccccctgcatccacagagcccactggctaccaaagagaggatctctccagggattcgaggaacacacaagttacccaggcatagacctcttaacagaactcagagcgccccgctgccccagagtaccctcgcccaactcgtcattcagcagcagcaccagcaatttttggagaagcaaaaacagtatcagcaacagatccatatgaacaaactgttaagtaaatcaattgagcagctaaagcagccgggatcccacctcgaggaggcagaggaggaactgcagggggatcaagctatgcaggaagatcgtgcaccctcaagtggtaactctaccaggagtgactcatcagcttgcgtggacgacaccctaggacaggtcggcgccgtgaaggtaaaagaggaaccggtcgatagcgacgaggacgcccagatccaggaaatggagagcggcgagcaagctgcctttatgcaacaagtgatcgggaaagatctagctccaggatttgtgattaaggtcataatctag

SEQ ID NO: 120023 - DNA, 2772 bp, synthetic construct
  misc_feature 1..2772: note = Description of Artificial Sequence: Synthetic coding sequence
  source 1..2772: mol_type = other DNA
ctgcacaagctctctagtcttgttgacgtgaagagcgaagtgcccgtcgggctggagcctatatcacccctggacttgcgcaccgacctccggatgatgatgccagtcgtggatcctgtggtccgggaaaagcagctccagcaggaacttttgctgattcagcagcagcaacaaatccagaaacagctgctgatcgcagagtttcaaaaacaacacgaaaatctcaccagacaacatcaggcccagctgcaggagcacatcaaagagctgctggcaattaagcagcagcaagaattgctagagaaagaacaaaagctggaacaacagcgccaagaacaagaagtggagcgtcacaggcgggaacagcagctaccaccgctccgggggaaggacagaggcagggagcgtgccgttgcgagcacggaggtaaagcagaagctgcaggagttcctactctctaaatccgccactaaggacacccccacgaatggtaaaaaccactctgtgagccggcatcctaaactctggtataccgccgcccatcatactagtctcgaccaatcttcgccgcctctgtcaggtacttctcctagctataagtacacccttcctggagcccaggatgccaaagacgactttcctttgagaaagaccgcaagcgagccaaatctaaaggtccgctcccgactaaaacaaaaagttgccgaacgacgatcatctcctctcctaaggcggaaggatgggaatgtggtgacatcttttaagaaacgcatgtttgaggtgacagaatcgagcgtgtcatcatctagtccaggcagtgggcccagcagcccaaacaatggacccacaggaagcgtaacagagaatgagacctcagtgttgcctcccacaccacacgccgaacagatggtgtctcagcaaagaatcttaatccacgaagatagcatgaatctgctatcactgtacacatcaccaagtctccctaacatcaccctgggactcccagccgtgcccagtcaactgaacgcatcaaactcactgaaagagaagcagaagtgcgagacccaaacacttcgccaaggggtgccactaccagggcagtatggaggcagcattcctgcatcctcaagtcatccacacgtaactcttgaaggcaagccacctaatagcagtcaccaagcactattgcaacacctgctgcttaaggaacagatgaggcaacagaagttgctggtcgcgggcggcgtgccactgcaccctcaatcccctcttgctactaaggagagaatctctccgggaattcgtggtacacacaaactccctcggcatcgccccctaaatcgcacccagagcgcaccgcttccacagtctactctcgctcagctggttattcagcagcagcaccagcaatttcttgaaaagcagaagcaataccagcaacaaatccacatgaacaagccctttctggagccgactcacacgcgggcgctctcggtccgacaggccccactagccgcagtggggatggacggactggaaaagcaccgactggttagtcggacccactctagtccggccgcatccgtgctgcctcaccctgctatggaccgaccactgcagccaggctcagcaaccgggatcgcctacgatcctctgatgttaaagcaccaatgcgtctgcggaaattccactacccatcctgagcatgcaggccggattcagagcatttggtcgcggttacaggagacaggactgctcaataagtgcgaacgaattcagggacggaaagccagtctagaggaaatccagcttgttcattctgaacatcattctcttctctacgggacaaatcccctggacggccaaaagctagaccctcgcattctgctgggggacgattcccaaaaattctttagtagtttaccttgcggcggcctcggggtggattcagacaccatatggaacgagctgcacagctccggggccgcacggatggccgtgggttgtgtgattgagttggcatccaaagtggctagcggcgagctcaagaacgggtttgctgttgtaagacctccaggccaccatgctgaagagagcacggcaatgggcttctgttttttcaactcagtcgccattacagccaaatacctcagggaccaactgaatataagcaagattcttatagtggacctggacgttcatcatgggaatggcacccagcaggctttttacgctgatcctagtatcctttatataagcctgcaccgctacgatgaaggtaacttctttccagggtccggtgctcccaacgaggtggggaccggtctgggggaaggttacaacattaacatagcttggacggggggactagacccccccatgggcgacgtggaatatttggaagctttcaggaccattgtgaaaccagtcgcaaaggaattcgatccagatatggttcttgttagcgctggatttgatgccctcgagggccatactccaccacttggcggctataaagttacggccaaatgcttcggccacctcacgaaacagttgatgaccctcgctgacggcagggtggtgttagccttggagggggggcatgatctgaccgcgatttgtgacgcatcggaggcttgtgttaatgccttattgggaaatgaattagaacctctcgcggaagacatcctccatcagagtcccaatatgaatgctgtcatatctctacagaaaataatcgagattcagtctatgtcgctgaagttttcatag

SEQ ID NO: 120024 - DNA, 3078 bp, synthetic construct
  misc_feature 1..3078: note = Description of Artificial Sequence: Synthetic coding sequence
  source 1..3078: mol_type = other DNA
atgcatagcatgattagttccgtggatgtcaagtcagaggtcccggtgggcttggagcccatctccccgctcgatcttagaacagacctccgcatgatgatgcccgtggtggacccggtggtgcgggaaaagcagctgcagcaggagttgctcctgatccagcagcagcagcagatacagaagcagctgcttattgccgaattccagaaacagcatgagaatttgactcgtcagcaccaggcccagttgcaggagcacatcaaactgcaacaggagctgttagcaatcaagcaacagcaggagcttctggagaaggagcagaagctggaacagcagaggcaggaacaagaagtcgagcgccataggcgcgaacagcagcttcccccactgcgcggcaaagatagagggcgtgagagggcagtggccagtacagaggtaaagcagaaactgcaggagttcctcttgtcaaaatcagcaactaaagacacacccacaaacggaaagaatcactcggtgtcacgccacccaaagttgtggtacactgccgctcatcacacgtcactcgatcagagttcaccgcctctctccggtacatccccaagttataagtacacactccccggcgctcaggacgcaaaggacgatttccccttgaggaagaccgaatccagcgtctcctcgagcagtccaggctctggtcctagttccccaaacaatggtcctacaggtagcgtcaccgaaaacgaaacgtcggtccttccaccaactcctcacgccgaacagatggtgtctcaacagcggatcctaattcacgaggatagcatgaatttgttaagcctctacacttccccaagtctgcctaatattaccctgggtctgcccgctgtgccctcacagctgaatgcttccaattccttaaaggaaaaacagaaatgcgagacacagaccctcagacaaggcgtcccattacccggccagtacggcggctctatcccagcctctagttcacacccccatgtcaccctcgaaggaaagccacccaacagtagtcaccaagccctgcttcagcatctcctgctgaaagagcagatgcggcagcagaaactgctcgtggccgggggagtaccactgcacccccagagtcccctggcaaccaaagagaggatttcccctggaatcagaggcacacacaagctcccccggcacaggccgctgaataggactcagtctgccccactgccgcaatcaactctcgctcagctagttatccagcagcaacaccaacaattcttagagaaacaaaaacagtaccaacaacagatccacatgaataaactgctttcaaaatctatcgaacagctgaaacaacccggcagccatctggaggaggctgaagaagaactacagggggaccaggccatgcaagaggatagagccccaagcagcggaaacagcaccaggtctgattcttccgcctgtgtggacgacacactcgggcaggttggtgccgtgaaagtgaaagaggagcccgtagacagtgacgaggacgcccaaattcaggagatggagagcggggaacaggccgcattcatgcaacagccctttctagaacctacccacactagggcactcagtgtgcgtcaggcacctcttgccgcggtcggcatggacgggcttgaaaagcaccgactggtctcccgcacacattctagtccagctgcctctgtgctgccccatcccgctatggaccgtcccctgcagcccggttccgcaacagggatcgcttatgacccactaatgctgaaacaccagtgtgtatgcgggaactccactacccatcccgagcacgctggcagaatccagtccatctggtctagattgcaggagacagggctgctaaacaaatgtgaaagaatccaggggcgtaaggcctctctggaggaaatccagttagtgcactctgaacaccattccctgttgtatggaactaaccccctggacggccaaaagcttgatcctagaatcctgttaggtgatgatagccaaaaattttttagtagcttgccatgtgggggactcggagtcgacagcgacacaatttggaacgagttacactccagtggagctgctcgaatggcagtcggctgcgttattgagctagccagcaaggtggccagcggggaactcaaaaacggctttgcagtggtgcgacccccagggcatcatgcagaagagagtacagctatggggttctgcttctttaacagtgttgcaatcactgctaaataccttcgtgaccagctgaacatcagtaagatcctgatcgtggacttagatgtgcaccatggaaatggaactcaacaggcattctacgccgatcccagcatactatacatctcacttcaccggtacgacgaggggaatttcttccccgggtcaggagctcccaatgaagtcggcactggcctgggggagggttacaacataaacatcgcttggaccggaggactcgatccccctatgggcgatgtggagtacctggaagcgtttcggaccatcgtcaagcccgtcgcgaaagagtttgaccctgatatggtcctggtctctgcaggatttgacgcacttgagggccacacaccgcccctgggaggctacaaggttacggccaaatgctttggtcacctgacaaagcagctcatgactctcgccgacgggcgggtggtgctggccttagagggggggcacgacctgactgcaatttgcgacgcatccgaagcctgcgttaacgcacttttagggaacgagctggagcccctggcagaggatattctgcaccagagtcctaacatgaacgccgtgatctctctacagaagataattgagatacagtctaaatattggaagagtgttagaatggtggccgtcccgcggggatgtgctctggccggagcgcagcttcaagaggagacggaaactgtctcagccctggcttcactgacagtggatgtggaacaacctttcgcacaggaagattcgagaacagcgggcgaaccgatggaagaggagcccgccctttag

SEQ ID NO: 120025 - DNA, 1773 bp, synthetic construct
  misc_feature 1..1773: note = Description of Artificial Sequence: Synthetic coding sequence
  source 1..1773: mol_type = other DNA
atgcattccatgatctcgtccgtggatgtaaaatctgaagttcctgtcggcttggaaccaatctctcccctcgacctgaggacagacctgcggatgatgatgcccgtggtagatccagtggtgagggagaagcaattgcagcaagaattattactcatccagcagcaacaacaaatccaaaagcagttactgatcgctgaattccagaagcagcatgagaaccttacaagacagcaccaggcccaacttcaggagcatattaaagagctgcttgccattaagcagcagcaggaactgttggagaaggagcaaaagctcgagcagcaacgccaggagcaggaagtggagaggcataggagggagcagcagcttccacctctgcgaggcaaagaccgcgggcgcgagagagccgtggccagtaccgaggtaaaacagaaactgcaagagttcctcctaagcaaatctgctacaaaggacacgccaacaaatggcaagaatcattcagtgtcccggcaccccaaattatggtacactgctgcgcaccatacaagtcttgatcagagcagcccaccactgtctggcactagtccttcttataagtatacgcttcccggcgcacaggatgctaaggatgattttcccctgagaaaaaccgcgtcagagcctaatctgaaggtgaggtcacgattgaaacaaaaagtcgcggagcggcgctctagcccactgttacgccggaaggacgggaatgtggtgacttcttttaagaaaaggatgttcgaggtgaccgaatcgtccgtgtcatctagctcacctggctcaggaccttcgagccctaataacggtcccaccggctccgtgactgaaaacgaaacctcggtcctacctcccaccccccatgcagagcaaatggtcagccagcagagaatattgatccacgaggactccatgaatctcctgagtttgtacacatccccttccttaccaaacatcacactggggctgcccgcggtgccttcccaactcaacgcatccaattccctgaaggagaaacaaaagtgcgagacgcagacactgcgccagggggtgccactacccgggcagtatggagggagcataccagcctccagctcccaccctcatgtaactctggaagggaaacctcccaacagcagtcaccaagcactgctacagcacctgctgctaaaagagcagatgcgtcaacagaaactgctggtggccggaggcgtaccattgcatcctcagtccccacttgctacaaaggaacgcatttctcccggcattagaggcacacacaagctgcctcggcaccggcccctgaacagaacgcaatctgcacccttgccccaatcgacactagcccagctcgtgatccagcagcaacaccaacaattcttagagaaacagaaacaataccagcaacaaatccatatgaataagctactatcaaagtcaatcgaacagctgaaacagccaggcagtcacttggaagaagcagaagaggagctgcaaggcgatcaggcaatgcaagaggatcgtgctcctagtagcggcaatagcacccgatccgatagcagcgcatgcgtagatgatacactgggacaggtcggagctgtgaaagttaaggaagagccagtagactctgatgaggacgcacagatccaagagatggagtccggagaacaggctgcatttatgcagcaggtgattggcaaagacctggcacctggtttcgtgatcaaagttattatctag

SEQ ID NO: 120026 - DNA, 1734 bp, synthetic construct
  misc_feature 1..1734: note = Description of Artificial Sequence: Synthetic coding sequence
  source 1..1734: mol_type = other DNA
atgcttcagactatttacgaaagtgacagctgtttctcgtccgacggagtcgctggccgagagcagctcctggctcagcaacggatgcatagcatgattagttcagtcgacgttaagtcggaggtgcccgtcggactggaaccaatctctccgctggacctccggacagatctccggatgatgatgcccgtggttgatccagttgtgcgcgagaaacagttacagcaggaattgctgctgatccagcaacagcagcaaattcagaaacagctgctgattgcagaattccaaaagcagcacgagaaccttacacggcagcaccaggcccaattgcaggaacacataaagctgcagcaggagctgctcgctatcaagcagcagcaggagctgttggagaaagagcagaagctggaacagcagcgccaggaacaggaggttgaacgccacagacgagagcagcagctgccccctttgcggggcaaagataggggcagggagagagctgtcgcatccactgaagtcaagcagaaattgcaggagttcctcctgtcgaagtctgctacaaaggacactcccactaacggaaagaaccattccgtctccaggcaccctaagttatggtacacagctgctcatcatacctctctggaccaatccagtcccccactttccggaacctcgccctcttataaatacacactcccaggggcccaggatgcaaaggacgacttcccactgaggaaaacggaaagctctgttagctcctcgagtccaggttcggggcccagcagtcccaacaatggcccaacggggtctgtcaccgaaaacgagaccagtgtcctgccaccgaccccccatgcagaacagatggtttcgcaacagcgaattctcatccacgaagactctatgaaccttctctccttatacacctcgccaagccttcccaacatcactcttggattacccgcagtccccagtcagctgaatgcttctaacagcctcaaagagaaacagaagtgtgagacacagacacttcgccaaggcgtgccattaccagggcaatacgggggaagcattcccgctagctcttcccatccgcatgtcacactggaaggaaaacctccaaattcatcacaccaggctctattgcagcacctgctgctcaaggaacagatgagacaacaaaaacttctcgtagctggtggcgtaccgttacacccacaatcacccctggctactaaggaacgcatttccccaggcattcgaggcacacacaagcttccaagacacaggcccctgaatcggacgcagtctgctcccctcccacagtcaacactggcccaactggtcatccagcagcagcaccagcagttcttggagaagcagaagcagtaccaacagcaaatacacatgaacaagctgctgagtaagagcatcgagcagttgaagcaacctggcagccaccttgaagaagctgaagaggaactgcagggggatcaggcaatgcaggaggaccgcgccccttccagcggtaatagtactcgaagcgactcttccgcttgcgtggatgacacccttggacaggttggggctgtaaaagtaaaagaagaacccgtggacagcgacgaagacgcccagatccaggagatggagagcggcgaacaagccgccttcatgcaacaggtgatagggaaagatctcgcacctggcttcgtaatcaaggtcatcatctag

SEQ ID NO: 120027 - DNA, 3201 bp, synthetic construct
  misc_feature 1..3201: note = Description of Artificial Sequence: Synthetic coding sequence
  source 1..3201: mol_type = other DNA
atgcacagtatgatcagttcagtggatgtaaagagcgaggtgcctgtgggtctggagcctattagccccctcgacctgcgcactgatctgcggatgatgatgcccgttgtggatcctgtagtgagagagaagcagctgcagcaagagctgctgctcattcagcaacagcaacaaatccaaaaacagctcctgatcgcagagttccagaagcagcacgagaacctgactcggcagcaccaagctcagctgcaggaacatataaaggagctcttggcaatcaaacaacagcaggagctgctggaaaaggaacagaagctggaacagcaacgacaagagcaagaagttgagcggcatagaagagagcagcaattgccacctcttaggggcaaggatcgcggaagggagagggcagtcgctagcaccgaggttaagcagaaacttcaggaatttctgctgagtaaaagtgctacaaaggatactcccaccaatggcaaaaaccacagcgtgtcgcggcaccccaaactgtggtataccgctgcccatcataccagcctcgaccagagctctccccccctgagtggtacaagcccatcatacaagtacaccctgccaggagcacaggacgccaaggacgattttccgctgcggaagaccgcctcagaacctaatctgaaagtgcggtcccgactcaaacaaaaggtcgcagaacgccggtctagcccccttctgaggcgcaaggacggtaatgtagttaccagcttcaagaagcgaatgttcgaggtgacagagtcctcagtctctagttcgtctcccggctccggaccatcaagtccaaacaatgggcccactggttccgtgacggagaatgagaccagcgtcctgcctccaactccccatgccgagcagatggtatcccagcaacgcatcctcattcatgaggattcaatgaatctgctgtctctctataccagcccatctctgcctaacatcactttgggacttcctgccgttccatcccaactgaacgcttctaattccctgaaagagaagcaaaagtgcgaaacccagactctgcgacagggcgtccctctccccggtcagtacggcgggtcaatccctgccagctcctcgcatccccatgtcacccttgagggtaagcccccgaattcttcccaccaagcgctcctgcagcatcttctcttgaaggaacagatgaggcagcaaaagctgctggtggctggcggggttcctctccaccctcagtcacccctagctacgaaagagcggatttctcctggcataaggggaacacacaagcttccccgccacagaccccttaatcgtacacaatcggcccctcttccccagagcactctggcgcagctcgttattcagcaacaacaccagcagttcctggagaaacaaaagcagtatcagcagcagatccacatgaacaagctgttgtctaaatccatagaacaattgaagcagcccggatcacatctggaggaggccgaggaagagcttcagggggaccaggccatgcaggaggacagagcacctagcagtggaaactccacacgcagtgatagcagtgcctgcgtggatgatactttgggccaggtcggagcagtgaaggttaaggaggagcccgtggattcggacgaggatgctcaaatccaagaaatggagtccggggagcaggccgcttttatgcaacaacctttccttgagcccacccacacccgcgctcttagtgtgcggcaggcccccttggccgctgtgggcatggacggcctggagaaacatcgcctcgtatcccgaacccacagtagtcctgcagcttctgtgttacctcacccggctatggataggccactgcagcccgggagcgcaacagggattgcgtacgatcctctcatgctcaagcaccaatgcgtgtgcggaaactctacaacccaccccgagcacgccggccggatacagagcatctggagccgattgcaagagactgggctgttgaacaagtgcgaaaggatacaaggcaggaaagccagtttggaggagatccagctggttcattcagagcaccatagcctcctctacggtaccaacccactggacgggcagaagctggaccctcggattctgctgggcgacgattctcagaagttctttagttctctgccatgtggcggccttggagtcgattccgacacaatctggaacgagctgcacagttccggggccgccaggatggctgtgggctgtgtcatcgaacttgcaagcaaagtcgcctcaggagaactcaaaaatggcttcgctgtggtgcggccaccgggccatcatgccgaagagtcaacggctatgggattttgtttcttcaactccgtggccatcactgcaaagtatctccgcgaccagctgaacattagcaagatactcatcgtcgacctggacgtgcaccacggcaacgggacacagcaagcgttctacgctgatcccagtattctgtacatctcactgcataggtatgacgaggggaatttctttcctggctcaggtgctccaaacgaggtgggcactggccttggcgagggttacaatatcaacatagcatggacggggggtctggacccccctatgggagatgtggaatacctggaggcgttccgcacaatagtcaaacccgtggccaaagaattcgacccggacatggttctggtttccgctggatttgatgcactcgagggacatacgcctcctttgggcggttacaaagtgacagccaaatgcttcggacacctgactaagcagctcatgacattagccgacggcagggtcgtgttggccttggaaggagggcatgacctgactgcaatttgtgatgcatccgaggcttgcgtgaacgcgttattgggaaatgaacttgagcccctcgcggaggatattctgcaccagtctcctaatatgaatgccgtgatctctctacagaagataattgagatccagagtaagtactggaaatcagtaaggatggttgccgtccctcggggctgtgcactggcgggtgctcagctgcaggaagagacagagaccgtgtcagcactcgcttccctaacggtggacgtcgagcagcccttcgcacaggaggattcccgtacagccggggagcccatggaagaggagccagccctgtag

SEQ ID NO: 120028 - DNA, 447 bp, synthetic construct
  misc_feature 1..447: note = Description of Artificial Sequence: Synthetic coding sequence
  source 1..447: mol_type = other DNA
atgcactccatgatctcaagtgtagatgttaaaagtgaggtgcctgtgggccttgagcccatctcccccctagatttacgaactgatctaaggatgatgatgcctgtggtcgatccagtggtccgggaaaaacagctgcagcaggagttgctgctcatccaacaacaacaacagatccagaagcaacttcttattgccgagtttcagaagcaacatgagaatttaacccgtcagcaccaagcccagctgcaggagcacatcaagctgcagcaggaactgctagcaattaagcagcagcaagagctgctcgaaaaggaacagaagttagagcaacagcggcaggagcaggaagtggagaggcacagaagagagcagcagctgccacctctgcgcggtaaagaccgcggccgagaaagagccgtggcatccacagaagtcaagcaatag

SEQ ID NO: 120029 - DNA, 417 bp, synthetic construct
  misc_feature 1..417: note = Description of Artificial Sequence: Synthetic coding sequence
  source 1..417: mol_type = other DNA
atgcattcaatgatctctagcgtggacgttaaatccgaagtgcccgttggccttgagccaatatccccattagacttacgtactgacctcagaatgatgatgcccgtggtcgacccagtcgttcgcgagaagcagctgcagcaggagcttctgctgatccagcagcagcagcagattcaaaaacagctcctgatcgcagaatttcagaagcagcatgaaaaccttacaagacagcaccaagcccagttgcaggagcacattaagctgcagcaggaactcctcgccatcaaacagcagcaggaactactggaaaaagaacaaaaactcgaacagcagcgtcaggaacaggaggtagagcgccatagacgggagcaacagctcccgccacttcgcggcaaagacagaggcagagaatag

SEQ ID NO: 120030 - DNA, 1767 bp, synthetic construct
  misc_feature 1..1767: note = Description of Artificial Sequence: Synthetic coding sequence
  source 1..1767: mol_type = other DNA
atgatgtcttctccagctcagccagatctgatgtggaacctggtcccatgggtgctgttctgcggatgctgccggattttccctgacggcgtggctggacgggagcaactgctggcccagcagagaatgcacagtatgataagttccgttgatgtgaagagtgaagtacccgtcggcctggaacctatctcccctctcgatctgcgaacagacctgcggatgatgatgcccgtggttgaccctgtggtgagagagaagcaacttcaacaagaactcctcctaatccagcagcagcagcagatccagaagcagctgctgatcgctgaattccaaaagcagcacgaaaacctgactcgccagcatcaggcccagctgcaggagcatatcaaggaactactggccatcaagcagcaacaggagctcctggaaaaggagcagaagctggagcagcaaaggcaagaacaggaagttgaaaggcaccggagggagcagcagctgcccccactgcgtggcaaggaccgaggcagggagcgggctgttgcctcaactgaggtgaagcaaaaactgcaggagttccttcttagcaagagcgcgaccaaggatacccccaccaacggcaagaatcactctgtctctcgacaccctaagctctggtacaccgccgcccatcacacatcactcgatcagagctctcccccattgagcggtaccagcccctcttataaatatacactgccaggagcccaagacgccaaggacgacttccctttgagaaaaactgaatccagcgtcagctcctcctcccccggctccgggcctagcagccccaacaacggacccaccggtagtgttaccgagaacgagacttcggtcctgcctcccacaccacacgcagaacaaatggtctcgcagcagagaatcctgatacacgaagattcaatgaaccttcttagcctgtacaccagcccatcgctcccaaatatcaccttggggctgcctgccgtgccttctcagctcaacgcctccaactctctaaaggagaaacagaagtgtgagactcaaaccctgagacagggggtgccactgccaggacaatacggcggctccattccggctagctcatcacacccacacgttaccctggaggggaaaccacctaactcaagtcaccaggccttattacagcatctattactgaaagagcaaatgcggcagcagaaactcctcgtggctgggggggtcccactgcacccacagtcgcccctggccacaaaggaaaggatcagccctgggattagagggacacacaagctacctagacaccgccccctaaacaggacacagagcgcaccactccctcagagcaccctcgcccagctggtgattcagcagcaacaccagcagtttctggagaaacagaagcagtatcaacaacaaattcacatgaacaagttgttaagcaagagcattgagcagcttaagcagccggggagccacctggaagaggctgaggaggaactgcagggcgaccaggccatgcaggaggacagagcccccagctcgggcaattcaactcgctccgatagttcagcctgcgttgacgatacgctcggccaggtgggcgcagtgaaagtcaaggaagaacctgtggacagcgatgaggatgcgcaaatacaggaaatggaatccggcgagcaggccgcattcatgcagcaggtgataggtaaagatttggcgccaggctttgtgatcaaagtaataatttag

SEQ ID NO: 120031 - DNA, 1641 bp, synthetic construct
  misc_feature 1..1641: note = Description of Artificial Sequence: Synthetic coding sequence
  source 1..1641: mol_type = other DNA
atgcattctatgatttcatcagtggacgttaaatcagaagtgcctgtagggctagaaccaataagccctctagacctgagaaccgacctgcgaatgatgatgccggtggttgaccccgtggtgcgcgaaaaacagctgcagcaagaactcctgctcatccagcagcagcaacagatacaaaagcagctgttgatagctgaatttcaaaaacagcacgagaacctcacccgccaacatcaggcccaactccaagaacatataaaggagttactggcgatcaaacagcaacaagagctcctggaaaaagagcagaagttggagcagcagaggcaggaacaggaggtcgagcgacataggcgggagcagcaactgcctcccttgagagggaaagatcgaggccgcgagcgggctgtggcctctaccgaagtgaagcagaagttgcaggaatttctactgtctaagtcggctactaaggatacccctacgaatggcaagaatcattcggtaagtcgacatccaaagctctggtatactgccgctcatcacacgagcctcgatcagtccagccctccactgagtgggacctctccctcttacaaatacacactgcctggcgcccaggatgctaaggacgatttccctctgcgaaagaccgagagttccgtctcatctagttctcctggctccgggccgtcatcacccaacaatgggcccactggttccgtgactgagaacgagacaagtgtgctgccgccgactccccacgcggagcagatggtaagccagcagcgaatcctgatccacgaagatagtatgaacctgttgtcgctgtatacctccccctctttacctaacattacgctgggattacccgccgtcccaagtcagcttaatgctagcaactccctcaaagagaaacagaagtgcgagacccagaccctcaggcagggagtgcccttgccgggccagtacggcggttccatcccggcctcatcttcccacccgcatgtgaccctggaaggcaagccaccaaactcttcgcaccaagctctgctacagcacttactcctgaaggagcagatgcgacaacaaaaattactggtcgctggcggcgtacccctgcatccgcagagccccctggccacaaaagagaggattagccctggcatacgcggcactcataaactccctcgacataggccactgaatcgtacacagtcagcccctcttccccagtcaacccttgcacagctggtgattcagcaacagcatcaacagttcctggagaagcagaagcagtatcaacagcagatacatatgaacaaactgctctctaagagtatcgaacagttgaagcagccagggagccatctggaggaagccgaagaggaactgcaaggagaccaggccatgcaggaggatagggctccttcctctgggaattctactcggtctgactcctcagcctgcgtggatgacactttaggtcaagttggggccgtgaaggtaaaagaggaacctgtggactcagacgaggatgcgcagatacaggaaatggagagtggcgagcaggcagctttcatgcaacaagtgattggcaaggacctggcacccgggttcgttatcaaagttatcatatag

SEQ ID NO: 120032 - DNA, 3036 bp, synthetic construct
  misc_feature 1..3036: note = Description of Artificial Sequence: Synthetic coding sequence
  source 1..3036: mol_type = other DNA
atgcattctatgataagctcagtggacgtgaagtctgaggtcccagtgggactcgaaccgatttccccattagatctcagaacagaccttagaatgatgatgcccgtcgtggatcccgtcgtacgtgagaagcagctgcagcaggagctgttgctgatccagcaacagcagcagatccagaagcagctgcttatagcagagtttcaaaagcagcatgagaaccttactagacagcaccaggctcaactgcaggagcatataaaggagctgttggccattaagcaacaacaggaattactggagaaagagcagaagctggagcagcagagacaggagcaagaggtcgagagacatcggagggagcagcagcttccacctcttcgaggcaaggaccgtggcagggagcgggccgtggctagtaccgaggtgaaacagaagctgcaggagttcttactgtcaaagagtgccactaaggacacaccgacaaatgggaaaaaccatagtgtgtcccgtcatcccaagctgtggtacacagccgcacatcatacatctctcgatcaatccagtccaccactgagcgggacatcccccagttacaaatataccctgcccggagcgcaggatgctaaggacgacttcccactgaggaagactgcttccgagccgaacctaaaggtcaggtctcgccttaagcagaaagtggccgaacgccgatcttcaccactgctacggcggaaggacggtaacgtagtcacatccttcaagaagcgaatgtttgaggtcactgagagcagcgtgtcttcctcatctcctggttctggccctagttcgccaaataacgggcccacagggtcagtcacagagaacgaaacctctgttctacctcctacacctcacgccgaacaaatggtttcgcagcagcgtattctcatccacgaggatagcatgaacctactgagcttatatacatcacccagcctaccaaatatcacactgggcctacccgcagtgccttctcagcttaatgcatctaactcgttgaaggaaaagcaaaagtgcgagactcagactcttagacagggcgtgcccttgccaggacagtatggaggcagcatcccggcatccagcagccacccccatgtgacactcgagggaaaaccgcccaattccagtcaccaggcattacttcagcatctgcttttaaaagagcagatgcggcagcaaaagcttctagttgcagggggtgtgcccctgcatcctcagagcccactggcgactaaagaacgtatttcacccggcattaggggtacccacaagctgcctcgccatcgtcccctgaataggacgcaaagtgcgcctcttcctcagtcaaccctggcccagttggtcatccaacaacagcatcagcagtttcttgaaaagcagaagcagtaccagcagcaaatccacatgaataagctcctgagtaaatctatcgagcaactgaaacagccgggatcccacttggaagaggcggaagaggaactccaaggggatcaagcaatgcaggaggatagggctccctcctctggaaactctactcgctcagattcaagcgcctgtgtcgacgatacactggggcaggtcggggcggttaaggtcaaggaagagcccgtcgattcagacgaggatgcccagatccaggagatggagtcaggcgagcaagctgccttcatgcaacaaccattccttgagcctacccatactcgcgcactctctgtgcggcaggcccccttagccgccgtggggatggacgggctcgaaaaacaccgacttgtatcccgaactcactcctccccagccgcgtcggtgctgccgcaccccgctatggataggccactgcagccgggctcagcgacgggcattgcttacgatcctcttatgctgaagcatcagtgtgtgtgcggaaactccacaacccaccccgaacacgcaggccggatacaaagcatttggtctagattacaggaaaccggtctgcttaataaatgtgaacgcatccagggtaggaaggcgagcctggaagagatccagctcgtgcactcagagcatcactccttgttgtatggtaccaaccctctcgatgggcagaaactggatccaagaattctactcggtgacgactcccagaaattcttctctagcctgccgtgcggaggactcggggtcgactccgacactatctggaacgaattacattcttctggggcagcccgcatggctgtgggatgcgtaattgagttggcatccaaggtggcctctggggaattgaaaaatggtttcgcggtggtgcgccccccaggtcatcatgccgaggaatcaactgctatgggattttgcttcttcaattccgtagcaatcacagccaagtatctgcgggaccagttgaacatatcaaaaattctgattgttgaccttgatgtgcaccatggcaacggaacccagcaagccttctatgccgaccccagcattctatacatttccctccacaggtatgacgaaggcaatttttttcccggatccggagcacccaacgaggtgggaaccggactgggggagggctataacataaacattgcctggacaggcggtctggaccctcctatgggcgacgtggaatatctcgaggcgttccgcacgatcgtcaagcctgtcgcgaaggagttcgacccggacatggtgctggtgagtgcgggttttgacgctcttgagggacacacaccgcctctcgggggatacaaggtgacagctaagtgttttggccatctgactaaacagttaatgacactcgccgatggccgtgtggttctggccctggaaggtggccacgatctcaccgctatttgcgatgcaagcgaggcatgtgtcaacgcacttttaggcaacgaattggagcccctagccgaggacattctccatcagagcccgaatatgaatgccgtgatatcccttcagaaaatcatagaaatccagtctatgtccctgaagttttcgtag

SEQ ID NO: 120033 - DNA, 72 bp, synthetic construct
  misc_feature 1..72: note = Description of Artificial Sequence: Synthetic coding sequence
  source 1..72: mol_type = other DNA
atgcactcgatgatttcctccgtagacgttaagtcggaagtacccgtgggactggagccaataagtccttag

SEQ ID NO: 120034 - DNA, 3210 bp, synthetic construct
  misc_feature 1..3210: note = Description of Artificial Sequence: Synthetic coding sequence
  source 1..3210: mol_type = other DNA
atgcatagtatgattagcagcgtcgacgtgaaatcagaggttcccgtcgggctcgaacccattagtcctctggatctgcgaacagacctcaggatgatgatgcctgtggtggatcctgttgtcagagagaagcagttgcagcaagagctcttactgattcaacagcagcaacagatccagaagcagcttctaattgcggagttccaaaaacaacatgagaatttgaccaggcagcatcaagcacagctgcaggaacatatcaaactacaacaggaactcttggccataaaacaacagcaggaactgttagagaaggagcagaaactggagcagcagcgccaggagcaagaagtggaacggcacagacgagaacaacaactgcccccgttgcgagggaaggacagagggagggagcgagccgtcgccagcaccgaagtgaagcagaaactgcaggaattcctattgagcaagagtgctaccaaagatacccccaccaacggaaaaaatcacagcgtaagccgccaccctaagctgtggtatactgccgcccatcatacttccctggatcagagctctccccctctgagtgggacttctccgagttataaatatactctccccggagcccaggatgccaaggacgatttcccactccgcaagaccgcctctgagcccaacctcaaggttcggtccaggctgaaacaaaaagtagctgagagaagaagtagccccctgctgcgacgaaaggatggtaacgtagtcacgtcattcaaaaaaagaatgtttgaggtgaccgagagctccgtgagctcttcaagtcccgggagtggtccttctagcccaaataacggtcctactggttctgttactgaaaatgagacgagcgtgctacctcccactccccatgctgaacaaatggtgtcccagcagcgcatcctcatacatgaagatagcatgaatctgttatcgctctatacatcaccgtcactccctaatataactctggggctcccagctgtgccttcacagctgaacgccagcaattctctcaaggaaaagcagaagtgcgaaactcagaccctgcgacaaggggttcccttgcctgggcagtacgggggatcaatacctgcctcctcatcgcatccccatgtaacactggagggaaagccgcccaactcctctcaccaggcgctgcttcaacacttgctcctcaaggagcagatgagacagcagaaactgctcgtagcgggaggggtgccccttcatccacagagcccgctggccactaaggaacggatatccccaggcattcggggcacccacaaacttcctcgccacaggccactgaatcgaacacagtcagctcccttgccacaatcaaccctggcacagctcgtgatacagcagcagcatcagcagtttctggaaaaacaaaaacagtaccaacagcagattcacatgaataaactgctatccaagtccattgaacaactaaagcagccagggtcccatctcgaggaagccgaggaagagctacagggtgaccaagcaatgcaggaggacagggcgccctctagcggcaactccactcgctcagactcctctgcgtgcgtcgatgataccctgggacaggttggagctgttaaagttaaggaggagcccgtagactccgatgaagatgctcagatacaggaaatggaaagcggggaacaagccgccttcatgcagcagcctttcctcgagcccacacatactcgcgcccttagcgttaggcaagctcccttggcggccgtgggcatggacgggctggagaaacatagacttgtgtcaaggacccattcgtcacccgcagcttcagtgctgcctcacccggccatggacagacccctgcaacctggcagcgccacgggaattgcgtatgacccccttatgctgaaacaccagtgtgtatgcggtaacagcaccactcaccctgagcatgcgggaaggatccagtcgatttggagtcggctccaagagacaggattactaaacaagtgtgagcgcattcaggggcgcaaagcttcactggaggagatccagttggtgcactccgagcaccacagcctcctgtatgggactaatccacttgatggccagaaattggaccctagaatcctcctgggcgatgactctcagaagtttttcagtagtctgccttgtggcggattgggcgtggacagtgacactatctggaatgaattgcatagttcaggagcggctaggatggccgtggggtgcgtcatcgaattggctagcaaagtcgcttcgggcgaattaaaaaatggatttgccgtggtgcgaccacccggacaccacgctgaagagagtacagctatgggtttttgtttctttaactcggttgcaattaccgccaagtatcttagggaccaactgaatatctctaaaattcttattgtagacctggatgtgcatcatggcaatggaacccagcaggccttctacgcagacccaagtattttgtacatctcacttcatcgatatgacgaaggcaattttttcccgggaagtggtgctcctaacgaggtaggtacaggcttgggtgaagggtacaatattaatattgcctggacgggagggctcgaccccccaatgggagacgtggagtacctggaagctttcagaacaatcgtcaaaccagtagcaaaagagttcgatcctgacatggtcttggtgtcggccggattcgatgccctagagggccacactcctcctctggggggctataaggtgacagccaagtgcttcgggcacctgactaagcagttgatgaccctggctgacgggagagtcgttctcgccctagagggagggcatgacctgacagccatctgtgatgcctccgaagcgtgtgtgaatgctttgctgggtaacgagctggagccgctcgcggaggacatactgcaccagtctccgaatatgaacgctgttatcagcctccagaaaatcatcgagatccagtctaaatactggaaatccgtgcggatggtggcagtgccgcgaggttgtgcgctggccggagcccaactacaagaggagaccgagaccgtgtccgcgttggcaagcttgactgttgacgttgaacaaccttttgcccaagaagacagccgtactgccggtgagccaatggaggaagagccagccctgtag

SEQ ID NO: 120035 - DNA, 1689 bp, synthetic construct
  misc_feature 1..1689: note = Description of Artificial Sequence: Synthetic coding sequence
  source 1..1689: mol_type = other DNA
atgatgatgccagtcgtcgatccagtcgttcgcgaaaagcagctgcagcaggaactgctgctgatccaacagcagcagcagattcagaagcagttactcattgcagaattccagaagcagcacgaaaacctaacccggcaacaccaggcgcaattgcaagagcacatcaaattacaacaggagctgttggccatcaagcaacagcaggaactgctggagaaggagcagaaattggagcagcagaggcaggagcaggaagtcgaacggcaccggagagagcaacaactgccaccacttcgcggcaaggaccgtggcagagagagggccgtggcttctaccgaggtgaagcagaaactgcaggagttcttactatcgaagtccgcgaccaaggacacccccaccaacggcaagaatcactcagtgtcaagacaccctaagctgtggtataccgccgctcaccacaccagcttggatcagagttctcctccactgagtggcacctcaccctcatataagtacaccctccccggagctcaggatgccaaggacgactttcctctgcggaaaaccgcctccgagccaaatcttaaagtgcgcagtaggctaaagcagaaagtggctgagcgaagatcctctcctttgctcagacgcaaagatggaaacgtggtgacatcgtttaaaaagaggatgtttgaagtgacagaaagttctgtgtccagttcatcacccggatcaggaccctcctcccctaataacggcccaaccggctccgtaactgaaaacgagactagcgtgcttcctccgaccccccatgcagaacaaatggtgtcccagcagcggattctgatccatgaggactcgatgaatctcttgtccttatacacctcgcccagtctccctaacataactctgggcctgccagccgtcccaagccaattaaacgccagtaattctttgaaggagaaacagaaatgcgaaacacagacacttagacagggtgttcctctgcctggccagtacgggggcagcattcctgctagtagcagtcacccacacgtgaccctggagggaaagcctcctaactctagtcaccaggccttacttcagcacctgctcctgaaggaacagatgcgccagcagaagcttttggtcgctgggggcgtaccgctgcatccacagagcccgctggccaccaaggagcgcataagcccagggatcaggggtacccacaagttacccagacaccggcctctgaacaggacccaatcggcgcctctgccccagtctaccctggctcaactagtgatccaacagcagcatcagcagttcctggaaaagcagaagcagtatcagcaacagatacacatgaacaaattactgagtaagagtatagagcagctcaagcagccagggagccatctcgaggaggcagaggaggaactgcagggagatcaggcaatgcaggaggatcgcgcacccagcagcgggaactcaacgcgcagcgatagcagcgcttgtgttgatgacacgctcggacaggtaggtgccgtgaaggtgaaggaggagcctgtagactctgacgaagatgctcaaattcaagaaatggagtcaggtgagcaagcggccttcatgcagcaggtcataggcaaagatttagctccaggattcgtcatcaaggttatcatctag

SEQ ID NO: 120036 - DNA, 1542 bp, synthetic construct
  misc_feature 1..1542: note = Description of Artificial Sequence: Synthetic coding sequence
  source 1..1542: mol_type = other DNA
atgatgatgccagtagtggacccggtggtccgagaaaagcagttgcagcaagagctgctgctgattcaacagcagcagcagatccagaaacagttactgatcgctgagttccagaagcagcacgaaaacctgactcggcagcaccaagcccagttgcaggaacatatcaaagagttgttggcaataaagcagcagcaggaattgctcgagaaagagcaaaagctagaacagcaaagacaagaacaagaggtggagcgccatcggagggaacagcaattgccgcccctgcgaggtaaggaccggggcagggagcgcgctgtggcgtccactgaggtgaagcaaaagctgcaggaattcctattatctaagtcagccactaaggacactccgaccaatggtaagaatcactctgtaagccgacatccaaagctgtgggccgcccaccacactagcttggaccagagcagtccccccctctcaggaacatctccgagctataaatacaccctacctggggcccaggacgcaaaagacgatttccccctgcgcaagaccgagtctagcgtttcgtcttcatctcccggatcaggcccctcatccccaaataacggtcccacgggaagtgtgacagagaatgagacaagcgttttgccacccacaccccacgccgagcagatggtgagtcaacagagaattctcattcacgaagattccatgaatctgctgtctctgtatacttctcccagcttacccaacataactttgggtttaccagcagtcccctctcagctcaacgcaagcaactccctgaaggaaaagcagaagtgcgaaactcagacgttgaggcagggtgtgcccctgccgggacagtatgggggctcaattcctgccagtagctcacacccacatgtcaccctggagggtaaacctcctaattcttctcatcaggcgctgctgcaacacctgctgctgaaggaacagatgcgacagcagaaattgctcgttgctggtggagtcccccttcatccacagagccccctggcaactaaagagaggataagtcccggaattcgcgggactcataagcttccccgccaccgccccctcaaccgcacgcagagtgccccgttgcctcagagtactctcgctcagctggtgattcaacagcagcatcagcagtttctcgagaagcaaaagcagtatcaacagcagatacacatgaataaactgctgtctaaatccatagagcagttaaagcagcctggcagccatttggaggaagctgaggaagagttgcagggcgatcaagctatgcaggaggaccgggccccgtcaagcggaaattctacacgcagcgactcaagtgcttgcgtggatgacaccttagggcaggtcggggctgtgaaagttaaagaggaaccagtcgacagcgacgaggacgcccaaattcaagagatggaatctggtgaacaagcggcctttatgcagcaggtaataggcaaggatttggctcccggatttgtgatcaaggtgattatatag

SEQ ID NO: 120037 - DNA, 1980 bp, synthetic construct
  misc_feature 1..1980: note = Description of Artificial Sequence: Synthetic coding sequence
  source 1..1980: mol_type = other DNA
atgcgagtcaatcacactgtatccactatgctgccaacctgcatggtgcatcgccagacaatgtcatgcagtggagcaggggggattacagcctttgtcgcatttagagatgttgccgtctactttacacaggaagagtggagattattgagccccgctcagaggacactccatcgggaagtgatgttggaaacctacaaccacctggtttctctggagatcccttcatccaaaccaaaactaattgcccagctggagaggggcgaagccccttggcgtgaagaaagaaaatgtccactggatttatgtccagagtctaagcctgaaattcaactgtcaccatcttgtcccctgatcttttcatcccaacaggccctctcgcaacatgtgtggctcagccacttgagccaactgttcagctcactgtgggccgggaatccactacaccttggcaagcattatccagaggaccagaagcaacaacaggatcctttctgctttagcggcaaggcagagtggatccaggagggagaagatagccgtctgttgttcggacgcgtcagcaagaacggcacctcaaaggcattgtccagtcctccggaagaacaacaacctgctcagtctaaggaggacaataccgttgtcgatattggcagctctcccgagaggagggcggacctggaggagactgacaaggtcctgcacggcttggaggtaagcggatttggggagataaagtatgaggagtttggcccaggatttattaaggaaagcaatctgctgagcctccagaagacccagacaggagagaccccgtatatgtacaccgagtggggggatagtttcggaagcatgtccgtgctgatcaagaacccccgcactcacagtgggggcaaaccttacgtgtgccgggaatgtggtagagggtttacatggaagtctaatttgattacccaccagcgcactcattcaggggagaagccttatgtctgtaaggactgtgggcggggtttcacctggaagagcaacctgtttacacatcaacggacccactcggggctgaagccatatgtatgcaaggagtgtggccaatcattttctctgaagtccaacctgatcacacaccagagggcgcacaccggagaaaagccttatgtctgtagggaatgcggtagaggcttccgccagcatagtcacctggttcgacacaagagaactcacagtggcgagaagccttacatttgccgggagtgcgagcaaggttttagtcagaagtctcatttgatcagacatctgcgtacacatactggagaaaagccgtacgtgtgtaccgagtgtggtaggcacttcagctggaagagcaatttgaagacccaccagaggacccacagcggggtgaaaccctatgtgtgcctggaatgcgggcaatgtttttccctcaaaagcaacctaaataagcatcagagatctcacacaggggagaagccctttgtgtgtacagaatgcggaagaggtttcactcggaagagcactcttagtactcatcagcgcacacacagtggggagaaaccgttcgtgtgcgccgaatgcggtaggggctttaatgataaaagtaccctaattagccaccagcgcacccatagcggcgagaagccctttatgtgtcgcgagtgcggacgacgattccgtcaaaagcctaacctgttcagacacaaacgcgctcatagcggagcattcgtttgtagagaatgcggccaaggattctgtgccaagctgactctgattaagcatcagcgggcacacgccgggggtaaaccgcatgtgtgcagggaatgcggacaggggttctctcggcagagtcatctcatccgtcaccaacgcactcactccggcgagaagccctacatttgccggaaatgtggaagagggttctctcgcaaaagcaacttgattcgccaccagcggacccacagtggttag

SEQ ID NO: 120038 - DNA, 1923 bp, synthetic construct
  misc_feature 1..1923: note = Description of Artificial Sequence: Synthetic coding sequence
  source 1..1923: mol_type = other DNA
atggcaactgggctattaagggcaaaaaaggaggcatttgtcgcctttcgcgacgtggccgtgtactttactcaggaagagtggagactcctgtcacccgcacagcgaaccctgcaccgcgaagtgatgctggaaacctacaatcaccttgtctccttggagatcccctctagcaagccaaaactgatcgcccagctggagagaggcgaagcaccatggcgggaagaacggaagtgtccactggacctatgcccagaatctaagccggagatacagctgtctccctcatgccctctcattttttcctcacagcaggctcttagccagcacgtctggttgtcccatctgtcacaattattcagttctctttgggccggcaaccccctgcatctcggaaaacactacccagaagaccagaagcagcagcaggaccctttctgcttctccggaaaggcagagtggattcaagaaggagaggactcccgcctgctctttggccgggtgtctaaaaatggcacgtcgaaggccttaagctccccacccgaagaacaacagcctgctcagtctaaagaggacaacaccgtcgtagacatcggaagctcccctgagcggagggccgatctggaagagactgataaagtgctgcacggactggaggtgagtggcttcggagagattaagtacgaagaattcggtcctggcttcattaaagaaagcaacctgctgtcgctgcagaaaacccagactggagaaaccccatacatgtacaccgagtggggcgactccttcggatctatgtcagtcctcattaaaaatcccaggacccattccggcgggaaaccttacgtatgtcgcgagtgtggcaggggattcacttggaaatccaacttgattacacatcaaaggacccactctggtgaaaagccttacgtgtgtaaagattgcgggcgagggtttacctggaagagcaacttgtttacacaccagagaacccatagtggtctgaagccgtatgtgtgcaaggaatgtgggcagagttttagtctgaagtcaaacctgatcacccaccagcgagctcacacgggcgagaaaccctacgtttgccgggagtgtggtcggggttttcggcagcacagccacctggtgaggcacaaacgcactcacagcggcgagaagccctacatctgtagagaatgcgagcaagggttcagtcagaaatctcacttgattcgacacttgagaacccataccggcgaaaaaccctacgtttgtacagagtgtggcagacatttctcctggaaaagtaatctcaagacccaccaacgtactcacagtggagtcaagccttacgtgtgccttgaatgcggtcagtgttttagtctcaagtccaacctgaataaacaccagcgaagtcatacaggagagaaaccatttgtctgtaccgaatgcggccgcggattcacgcggaagtccacattatccacccaccagcgcactcactctggggaaaaaccattcgtatgtgctgagtgcggccgaggatttaatgacaaatcaaccctcatcagccaccagcggacgcactcaggcgagaaacccttcatgtgcagagaatgtggacggagattccgacagaagccaaacctgttcagacataaacgggcacactcaggtgcatttgtctgtcgggaatgcgggcagggattctgtgccaagctgactctgatcaagcaccagcgagctcatgccggcggcaaaccgcacgtgtgcagagagtgcggccaagggttctccaggcaatcacatctcatccgccatcaaagaactcactctggtgagaaaccttatatatgccgaaagtgtgggcgtggctttagtaggaagagcaacctgattcgccaccaacgcactcattctggatag

SEQ ID NO: 120039 - DNA, 1317 bp, synthetic construct
  misc_feature 1..1317: note = Description of Artificial Sequence: Synthetic coding sequence
  source 1..1317: mol_type = other DNA
atgctcgagacctacaaccatctggtctccttagaaatccccagctccaagcccaagctgatcgctcagttggagaggggggaagccccctggcgcgaggaacgtaagtgtccactggacttatgccccgagagtaaacccgagattcaactgtccccttcttgcccgttgatcttctcttcacagcaagccctgagtcagcatgtctggctgagccacttgtcacagctgttctctagcttatgggccggaaatccactgcacctcggtaagcattacccggaagaccagaagcaacagcaggatcctttttgcttctccggtaaagctgaatggattcaggagggagaagattcacggcttctgttcggcagggtctccaagaatgggacgagtaaggcgttatccagccctcctgaggagcaacaacctgctcagtctaaagaggataacaccgtcgtagacatcggtagttcacctgaaaggcgcgcggatctcgaagagacggacaaagttttgcacgggctggaggtgtctggctttggcgaaatcaagtacgaagaattcggtcctggttttatcaaggaaagtaacctattatcactccaaaaatcccaccttattaggcacttgcgcacgcatactggagagaagccctatgtttgtacagagtgtggcaggcacttcagctggaaatctaatctcaaaacacatcaacgaacacactccggagtgaaaccatacgtgtgtctggaatgcggccagtgcttttcactgaagagtaacctcaataaacaccaaagatcgcacacgggagaaaagccctttgtgtgtacggaatgtgggagaggcttcacccgcaagtctactctgtcgactcaccagcgaacccacagcggagagaaacctttcgtttgcgccgagtgtggcaggggcttcaacgacaagtcaactctaatatcgcaccaaaggacccatagcggggaaaagccctttatgtgccgagagtgcgggcgaaggtttagacagaagccaaaccttttccgtcacaaacgggctcatagtggagcgttcgtgtgcagagaatgcgggcagggattctgcgctaaattaactcttattaagcaccaacgggctcatgcaggcgggaagccacacgtgtgcagggagtgcggccaaggcttttcccggcagtcccacctcattcgccatcagagaacacacagcggcgaaaagccctatatctgccggaaatgcggcagaggattctctcgcaagtcaaacctgatcaggcatcagcgaacacacagtggctag

SEQ ID NO: 120040 - DNA, 1797 bp, synthetic construct
  misc_feature 1..1797: note = Description of Artificial Sequence: Synthetic coding sequence
  source 1..1797: mol_type = other DNA
atgttggagacgtataatcacctcgtctccttagagatcccatccagtaaacccaaacttatcgcccagctcgaaagaggagaggcaccctggagagaagaacggaagtgcccgctggacctgtgtccagagagtaaaccagaaattcagctcagcccatcatgcccactgattttttcatctcagcaggccctgtctcagcatgtgtggttaagtcacctatctcagctgttctctagcctgtgggcagggaaccctctccatcttggcaagcactaccctgaagaccagaagcagcagcaggacccattctgcttttctggaaaggcagagtggattcaggagggagaggactcaagactactcttcggaagagtgtctaaaaacgggacgagcaaggccctgtctagtccacccgaggagcagcagccggcccagtccaaggaggataataccgtggtcgacatcgggagttccccggagaggagagctgacctggaagaaacagataaggttctacatgggttggaggttagtggatttggggagattaagtatgaggagtttggcccagggtttataaaagaatcaaacctactgtccctgcaaaaaacccagacaggcgagactccttacatgtatactgagtggggcgattcttttggcagcatgagcgtcctgattaaaaacccaaggacacactccggcggtaagccctatgtgtgccgggaatgtggacgaggattcacatggaagtctaatttgatcacccatcagcgcacccattccggagaaaagccttacgtgtgcaaggactgcggccgggggtttacatggaaatccaatctcttcacccaccagagaacacatagcggcctaaaaccgtatgtgtgcaaggaatgtgggcagtctttttctctgaagtctaacctgataacgcaccagagggcccatacaggcgagaagccgtatgtttgtcgcgagtgcggtcggggcttccgccagcactcacacctagtacgccataagcgcacacattccggagagaaaccgtatatatgcagagaatgcgagcagggcttctcccagaagtcccacctaattagacatcttagaacccacacaggggaaaagccctatgtgtgcactgaatgcggaaggcatttttcatggaaatctaacttgaaaacgcaccagaggacgcatagtggagttaagccttatgtgtgtctggagtgtggccagtgcttctcccttaaatccaatctaaacaaacaccaacgaagccacactggcgaaaaaccattcgtgtgcacagagtgtgggcggggtttcacccggaaatccaccctgagtacccatcaacgtacacactcaggcgagaagcctttcgtatgtgcagaatgtggtagagggttcaacgacaaatccacactgatctcgcatcagcgcacccactccggagagaagccctttatgtgtcgcgaatgtggaagaaggtttaggcagaaacctaaccttttccgccacaagagagcgcacagtggggcatttgtttgtcgggaatgtggacagggtttttgtgccaaactgaccctgataaaacaccagcgtgctcacgcaggtggaaaaccacatgtctgccgggaatgtggacaggggttctcaagacaaagccacttaatcagacatcagagaacccacagcggggaaaagccttacatctgtcgcaaatgtggtagaggattcagtcgcaagtcaaatctcatacgtcatcagcgtacacattccgggtag

SEQ ID NO: 120041 - DNA, 2190 bp, synthetic construct
  misc_feature 1..2190: note = Description of Artificial Sequence: Synthetic coding sequence
  source 1..2190: mol_type = other DNA
agttggctgggacccgggaaggccagcttgctacgtagtttccctcacctctgtacacttttacccgatttccgcctccaggacccccagcgcgctcctgcgttccacctatcttctgaaaccctgccgttcagcaggaaatcaacacaagagacgcgaaaaatggccactggacttctaagagccaaaaaagaggcattcgtggcatttcgagatgtggctgtctattttactcaagaagagtggcgtctgctgagccccgcccagcgtacactccaccgagaggtcatgctggaaacatacaatcacttagtgtctctggagatcccttcctcaaagcctaagcttatagcacagctggaacgcggggaggctccctggcgagaggagcgaaagtgcccccttgatctgtgccccgctgagagcaagcccgagatccaactctcgccctcctgccccctcattttttcatcccaacaagctttgtctcagcacgtgtggttgtctcacctttctcagctatttagctccctgtgggctgggaaccctcttcatctggggaaacattatcctgaggatcagaaacagcagcaagatccattctgtttttctggcaaggcggagtggattcaagaaggagaggatagcagactgcttttcgggagagtctcaaaaaacggcaccagcaaggccttgagctctccccctgaggagcagcagccggcccaatcgaaggaggacaataccgtggtggacattggcagctctccggaaaggcgggcagacctggaagagactgataaggtcttgcatgggctagaggtgagcggcttcggtgaaattaagtatgaggaattcgggcccggcttcattaaggagagtaacctgttgtccctccaaaaaactcagactggggagacgccttacatgtacacggagtggggggattcctttgggtctatgtcagtactgattaagaatcctaggacgcactccggcgggaagccctacgtctgcagagagtgtgggagagggtttacatggaagagcaacctaattactcaccagcggacacattcaggcgagaagccctacgtctgcaaagactgcggccgaggatttacctggaaatccaacctttttacccaccaacgaacgcacagtggcttgaaaccatatgtgtgtaaggaatgtgggcagagtttctcccttaagagcaatctgataactcaccagagggcacacacgggggagaagccatacgtatgccgagaatgtgggcgcgggttccgccaacacagccacttggtcaggcacaagaggacacattcaggggagaagccctacatctgcagagagtgtgagcagggcttttcccagaagagtcatctgatccgacatttgcggacacacactggcgaaaagccatacgtgtgcacggagtgcggaaggcacttttcctggaagtcgaatctaaagacccaccagaggacccactccggtgtaaagccgtatgtgtgccttgaatgtgggcagtgcttctcccttaaaagcaacttgaacaaacatcagcggtcacacactggggaaaaacccttcgtatgtacagaatgtggaagaggattcactcgtaaaagtacactctccacccaccagaggacgcacagcggcgaaaaaccattcgtgtgtgccgagtgcggtcgtggattcaatgataagagcacactcatttcccatcaacggacccacagcggagagaaacccttcatgtgtcgcgaatgcggccggcgattccgacagaagcctaatttgttccgacacaagagggcccactcaggggcctttgtctgccgcgagtgcggacagggtttctgtgccaagctgacactgatcaagcaccagcgggctcacggtggaagtttgatgtgcgctggatctgtggggaaagcactggcgggtagccacacttctctggacaccaggggccatatacaggagaggtcactgatattcgcggagtctgtcgacggagcacttgtcggctcccctacgctctcagatatccgcggacacactcaagaccggaattttatgtgtattgggaatgtcgtccagcccctcgctcgctctcatacctcttctgataccagaggccatacacagtgctgcggatttttttcgcactgctag

SEQ ID NO: 120042 - DNA, 1161 bp, synthetic construct
  misc_feature 1..1161: note = Description of Artificial Sequence: Synthetic coding sequence
  source 1..1161: mol_type = other DNA
atgtatactgaatggggggattcctttggctcaatgtccgtacttattaaaaatccgcgcactcacagtggagggaagccctatgtctgccgcgaatgtgggagaggctttacttggaagtctaaccttatcactcaccaaagaacccactccggcgagaagccctacgtctgcaaggactgtggcaggggtttcacgtggaagagcaatttattcacacaccaaagaacgcactccggcttgaagccctatgtgtgcaaagaatgtggccagagcttttctttaaaatcaaatctcatcactcatcaacgggctcatacgggcgagaagccttatgtctgtcgcgagtgcggacgggggtttcggcagcactctcatcttgtccgccataaaagaactcattctggagagaagccgtatatatgtagggagtgtgaacaagggttctcccaaaaatcacacctcattagacacctaagaactcacaccggggagaagccatacgtgtgcacagaatgtggacggcacttttcatggaaatctaatctgaagactcaccagagaacacattctggcgtgaaaccctacgtgtgcttagagtgtgggcaatgtttcagtctgaaatcaaatctgaacaagcaccaacggagtcacacaggggagaagcctttcgtgtgcactgaatgtgggcgaggattcacacggaagagcacactctctacccatcaacgcacacactccggagagaagccctttgtatgcgctgaatgcgggagggggtttaatgataagagcaccttgataagccaccagaggactcattctggggagaaacccttcatgtgtagggaatgtgggcgcaggttcaggcagaaacctaacctttttaggcataagcgcgcccattcaggagcttttgtgtgtcgtgagtgcgggcaaggcttctgcgcaaaactgaccctcatcaagcaccaacgagcccatgccggcggcaaaccacacgtttgtagagaatgcggccaaggcttctctcgacagagccatcttatccggcatcagcgcactcactctggcgaaaaaccttatatctgccgtaaatgtggccgtggctttagtcggaagtcgaatttaatcaggcaccagcgtacacattcagggtag

SEQ ID NO: 120043 - DNA, 612 bp, synthetic construct
  misc_feature 1..612: note = Description of Artificial Sequence: Synthetic coding sequence
  source 1..612: mol_type = other DNA
atgggtggtagcctgcgcgtggccgtccttggggcacccggggttgggaagaccgctattatccgccagttccttttcggcgattaccctgaacgtcaccggcctacagatgggcctcggttgtaccgtccagcagttctgctggacggcgcagtgtacgatctgagtattcgggacggggatgtagctggacccggtagttcccccggcggcccagaagaatggcccgacgccaaagactggtccctccaggatacagatgctttcgtgctagtttatgacatttgctctccagatagcttcgactacgtcaaggcactgcggcagcggattgccgagactagacctgccggtgctccagaagctcctatactggtagttggcaataaacgagatcgccagcggctgagatttggaccgaggcgggcgctggccgccctggttcgccgagggtggcgctgcggttatttggaatgtagcgcgaagtacaattggcatgttttgaggctgttccgggagctgctccgctgcgcgctagtccgggcaaggcccgcacatccggctttacggcttcagggcgccttacatcctgcacgatgtagtttgatgtag

SEQ ID NO: 120044 - DNA, 1479 bp, synthetic construct
  misc_feature 1..1479: note = Description of Artificial Sequence: Synthetic coding sequence
  source 1..1479: mol_type = other DNA
atggacctcctgaaggctatcacatccccattggccgccggtagcaagccctccaaaaagaccggcgaaaagtcatctgggtcctctagccacagtgagtcgaagaaggaacaccatcggaagaaagtatctgggtcatctggcgagctgcctcttgaagacgggggctctcacaagtccaagaaaatgaaacccctgtacgtaaacaccgaaaccttgactctcagagaacccgacgggctgaaaatgaagctcatcttatcgcctaaggagaaagggtccagcagcgttgatgaggagtccttccagtaccctagccaacaggccactgtaaaaaaaagttcgaaaaagagcgccagggatgaacagggcgcccttctccttggtcatgagctgcagtcttttctgaagacagcccggaagaaacacaaaagctctagtgacgcccattcctctcctggacctgagggatgtggatctgacgcttcacaatttgccgagagccactccgccaatctggacctgtccgggctcgagcctatcctggtcgaaagcgacagctctagcggcggagaattggaagccggggagctggtaatcgatgattcataccgggaaattaagaagaagaagaaatctaagaagagtaagaaaaagaaagacaaggagaagcataaagagaagcgccattcaaagtctaaacgatctttgggtctgtcggctgtgcccgtcggtgaggtgacagtgacttccggccccccaccttccattccatacgctggcgcagcagctcctccccttcccctgcctggcctgcataccgatgggcattccgagaagaagaagaagaaggaagaaaaggacaaagaacgggaacgcggcgagaaacccaaaaagaagaacatgagtgcctatcaggtcttctgtaaggaataccgggtgaccattgtagccgatcacccaggcattgatttcggagagctctcaaaaaagctggctgaagtgtggaaacagctccccgagaaagataaactgatctggaagcaaaaggcccaatacttgcagcataagcagaataaggcagaagcaactaccgtgaagaggaaggcatccagttcagaaggctcaatgaaagtgaaagcaagcagcgtcggagtcttgagcccccagaagaagagtcctcccacaaccatgctattaccagcaagccctgccaaagccccagagacagaacctatcgacgtggctgcgcatctccaactgcttggcgagtcgctgtctctgataggtcacagactgcaggagacagagggcatggtggccgtctctggcagtctgtccgtgttgctggatagcatcatctgcgccttgggtccactggcatgtctgacaactcagctgccagaactaaacggctgtccaaaacaggtgcttagcaatacactggacaatatcgcatacattatgccagggctgtag

SEQ ID NO: 120045 - DNA, 1896 bp, synthetic construct
  misc_feature 1..1896: note = Description of Artificial Sequence: Synthetic coding sequence
  source 1..1896: mol_type = other DNA
atggtgtctaaattgagccagttgcagactgagctgctggcagccctgttagaaagcggcctgtcaaaagaggcactgattcaggcgctcggggagcccggaccctacctgctggcaggcgaaggccccctcgataagggcgagtcttgtggtggcggacgcggcgagttggctgagctgcccaatggactaggcgagaccagagggagcgaagacgaaacggatgacgacggcgaagacttcacaccgcccatcctcaaagagcttgaaaacctgagtccagaggaggcagcccaccagaaagcagtagttgagactctactgcaggaagacccctggcgggttgccaaaatggtgaaatcctatttacaacagcacaatattcctcaacgcgaggttgtcgatacaaccggccttaaccagtcacacctgtcccagcatctgaataaggggacaccaatgaagacccagaaaagggccgccctgtatacctggtatgtgcggaaacagagggaagtggctcaacagttcacacacgccggccagggaggcttgatagaggaacccaccggcgatgagctccctacaaagaagggcaggcgcaaccggttcaaatggggccccgcaagccagcagatcctgttccaagcatatgaaagacagaaaaatcctagcaaagaagaaagagaaacactcgtggaggagtgtaatcgggccgagtgcatccaacgcggagtctccccttctcaggcccaaggtttgggcagcaatctggtgaccgaagtgcgggtctacaactggttcgcaaatcggaggaaagaagaggcgtttaggcacaagcttgccatggacacatacagcgggcccccacccggcccgggtcctgggccggcgttgcctgcgcactcttctccagggctgcctcctcccgcattgagcccatccaaggtgcatggtgttaggtatggccagccagctacgtccgaaacggccgaggttccctcttcctctggaggcccattggtcactgtatcgactcccctgcatcaggtaagtcctaccggactagaaccctcacattccctcctctcgacagaggccaagctagtcagcgcggctggtggccccctcccccctgtatccaccctgactgccctgcacagtctcgagcaaacgtctccaggcctgaatcagcagcctcagaatttgatcatggcatccctgccgggcgtcatgacaatcggccccggggagcctgcctctctagggccaacgttcaccaatacaggtgcatctaccctggtgatcggcctggcttccacacaagcccaatctgtgcccgtgatcaactccatggggtcttccctgactactctacagcccgtccaattctctcagcccttacacccttcttaccaacagcccctcatgccaccggttcagtctcacgtgacccagagccccttcatggcaaccatggctcagttacagagcccccatgccttgtattctcataaacccgaggtagcacagtacacccacacaggactgctgccccagaccatgcttatcaccgacaccactaatttgtctgcactcgcgtctctcacccccaccaagcaagtcttcactagcgatacagaggcctctagtgagtctgggcttcacacacccgccagccaggctaccacattgcatgtaccttcccaggaccctgcctctatccagcacctccagccagcccacaggctttccgcctctcctaccgtctcttctagtagcctggttctgtaccaatctagcgactcaagtaacggccagtcgcatctcctccctagtaaccactccgtcatcgagacctttatctctactcagatggcctctagcagtcaatag

SEQ ID NO: 120046 - DNA, 1719 bp, synthetic construct
  misc_feature 1..1719: note = Description of Artificial Sequence: Synthetic coding sequence
  source 1..1719: mol_type = other DNA
atggtctcaaagctctcccagctgcaaaccgaacttctagcagcgctgctggaatccgggttgtcaaaggaggctctgatccaggcactgggtgagcctggtccttacctcttggctggagaaggtccactggataagggtgaatcatgtgggggcggccggggagagctggccgagctgccaaatggtctcggagagacacgaggaagcgaggacgagactgacgacgatggagaagattttaccccgcccatattgaaggaactggaaaatttatcgccagaggaagcagctcaccagaaagcggtagtggagacactgctacaggaggatccttggcgggtcgccaaaatggtgaaaagctatcttcagcaacacaacatcccccagcgcgaggtcgtggacacaaccggtctgaatcagagccatttgtcacagcatttaaacaagggcacccccatgaaaacccagaagagggccgctctgtatacatggtatgtaaggaagcagcgtgaggtggcccagcagtttacccatgcagggcaggggggactgattgaggagcccacaggggatgaactgccaacgaaaaaaggccgtaggaatagatttaaatgggggccagcatcacagcagattctcttccaagcctatgaaaggcagaaaaatccctccaaggaggagagagagacactcgtggaggaatgtaaccgagccgaatgtatccagcgcggcgtgtcaccctcacaagcccagggactcggctcaaacctggtgactgaggtccgggtctataactggttcgcaaaccgccgaaaggaagaggccttccgtcacaaattagctatggacacctatagtggtcctcccccggggcctggccctggacccgctctgccagcgcattcatcacccgggctccccccacccgccctgtccccgtctaaagtgcatggggtcaggtatggacagcctgccacgtccgagaccgcagaagtaccttcttcctcaggcgggcccctcgtgaccgtgtcgacgcccttgcatcaggtttcaccgaccggactcgaaccgagtcacagtttactgtctaccgaagccaaacttgtgtctgcagcaggaggtccactccccccggtgtccaccctaactgctctccatagtctggagcagaccagccccggactaaaccagcaaccccagaacctgattatggcgagcctcccaggtgtgatgaccatagggcccggggagccagcatccttggggcccaccttcactaacacaggagctagtactctggtgataggcctcgccagcacgcaggcacagagcgtccctgttatcaattccatggggtcctctttgactacgcttcagcctgtgcagttcagccagcccctccacccatcttaccagcagcccctcatgccccctgtgcaatcccacgtgacacaaagcccctttatggcaaccatggctcagctgcagtcaccacacggtgagagaccagtcccccacacagctggagacgatgacagggggtggttgtccatggacgctggcgaaaggggcgcttggcaggcattgcagagtgcatgcgtgtctggtacgtccgtgttcccttacagctcaaacggccaaagccacctgctgccctcaaaccactcagtgatcgagaccttcatttccactcagatggcgtccagtagtcagtag

SEQ ID NO: 120047 - DNA, 1566 bp, synthetic construct
  misc_feature 1..1566: note = Description of Artificial Sequence: Synthetic coding sequence
  source 1..1566: mol_type = other DNA
atggtttccaaacttagccaactccaaacagagttgttggccgccctgcttgaatccggtctgtcgaaggaggccctgattcaggcattgggcgaaccaggcccatatttgctggcaggagagggcccacttgataaaggtgaatcctgcggcggcggacggggggaactagcggaactgcccaacggcttaggagaaaccaggggtagcgaggacgagactgacgacgatggagaagattttacgccaccgatcctgaaagaactggaaaacctgtcacctgaggaggcagcccatcagaaggctgtggtcgagacgctcctgcaggaagatccatggcgcgtggcaaagatggttaagagctacctccagcagcataatataccgcagcgggaagtggtagataccaccgggcttaaccagtcacacctgtctcagcatcttaacaagggaacacccatgaagactcaaaaacgggctgctctatatacttggtatgtccgtaagcagcgggaggtagctcagcagtttactcatgccggccagggaggattgatcgaggagccaacaggagatgaattgccgacgaaaaaaggacgacggaaccgctttaagtggggccccgctagccagcagatcctgtttcaggcctacgagcggcaaaagaacccttcaaaggaggaaagagaaacactcgttgaggaatgtaacagggccgagtgcatccagcgcggagtgagcccctcacaggcccaagggcttggttcaaacctcgttactgaggtacgcgtttacaactggtttgcaaatcggcgaaaagaggaggccttccggcacaagctggctatggacacttactctggcccgccgcccgggccaggtccggggcccgctttgcctgctcactccagccccggcctcccacctccagccctgtcaccatctaaggtccatggcgtgcgatatgggcaacctgctacatccgagacagccgaggtcccatctagttccggaggccctctggtgaccgtcagtacccctctccatcaagtttcacctactggcttggagccctcacactctctgctctccacggaggccaaactggtgagtgctgcgggaggacccttacccccagtgagtacgctgactgccctgcactctttagagcagactagcccaggtcttaatcaacagccgcaaaacttgataatggcttccctgcctggggtcatgaccatcggtccaggcgagcccgcaagcctgggtcccacttttactaacactggcgcttcaactcttgttataggcaagcttgtcggaatgggaggtcatctgggggggcgattgatgggccagccccaaaaccccggcgccggtcgagccacagggacacactcttttatccatcagcacgtgttcattcagtgtctgctatggacgtctcactgtgcgactagcgtcatacctggggacagcagcaacggtcagtcccatctgcttccctccaatcatagtgtaattgagacttttatcagtacccagatggcatcctcatcccagtag

SEQ ID NO: 120048 - DNA, 1572 bp, synthetic construct
  misc_feature 1..1572: note = Description of Artificial Sequence: Synthetic coding sequence
  source 1..1572: mol_type = other DNA
atggtttcaaagctcagccaattacaaactgagttacttgctgcactgctcgagagcggcttatcaaaagaagccctgatacaggctctgggagagccggggccgtaccttctggccggcgaggggcctctggacaagggtgagtcgtgcggtggaggcaggggggagctggctgaactgcccaatgggctgggagaaaccaggggtagcgaagacgaaactgatgacgatggcgaggattttaccccccccattttaaaggaattagaaaatctttccccggaggaagcggctcatcagaaagccgttgtcgagactctattacaggaggacccctggagagtggcaaagatggttaaaagttatctccagcagcacaacattccacagcgggaggtcgtggataccacaggacttaatcagagccacctctcccagcacctgaataaggggacccctatgaaaacgcagaagagagccgccttgtacacctggtacgtacgcaagcagcgcgaggtggctcaacagtttacacacgcaggccagggaggcctgattgaggaaccgactggagatgagctgcccacaaaaaagggcagacgaaatagattcaaatgggggcccgcttctcagcagatccttttccaggcatatgaacggcaaaaaaacccttcaaaggaagaaagagagactctggtcgaggaatgtaaccgtgccgagtgcattcagcgaggagtgtccccctcccaggcacagggtttagggtcaaacctcgtcactgaagtcagcgccgctggggggccactgccccctgtgagcacacttaccgccctccattccttggagcagacatctccagggctgaatcagcagccccaaaatctgattatggccagcctgccgggcgtgatgaccattggaccgggtgaacctgcctcgctgggtccaacattcaccaatacgggggctagtaccctggttataggccttgcgtcaacccaagctcagtccgtcccagtgatcaattcgatgggctcttctctcacgacgttgcaaccagtgcaattcagccagcccctgcacccttcatatcagcagcctctgatgccacccgttcaaagtcatgtaacacagtctccttttatggcaacaatggcacaactgcagagcccacacgcactctacagccataagccagaagtagcacaatacacacatacaggccttttaccgcaaacaatgcttattacagacacaacaaacctctcagccctcgccagcctaactcctaccaagcaagtgttcacttcagacactgaggcctcgagtgagagcggcctgcatacacctgccagccaggcaaccacactgcacgtcccttctcaggaccccgccagtattcagcacctccagcctgcccaccgtctttccgcatcccctacggtgagcagctctagcctggtcctctatcagagctcggactccagcaacgggcaatcgcacctccttccatcaaatcactccgtgatagaaaccttcatcagcacccagatggcctctagctctcagtag

SEQ ID NO: 120049 - DNA, 1812 bp, synthetic construct
  misc_feature 1..1812: note = Description of Artificial Sequence: Synthetic coding sequence
  source 1..1812: mol_type = other DNA
atggttagcaagctgagtcagctgcaaaccgaactcctggcagctctgttagaatcagggttgtctaaagaggcactaatacaggcactcggggagcctgggccatatctcctggcaggcgaggggcccttagacaaaggcgagagctgcgggggtgggaggggagagctcgcggagctgccaaacggccttggcgagacaaggggcagcgaagacgaaacggatgacgacggcgaggacttcacacccccaatactgaaagagctcgagaacctgagcccagaggaggcagcccaccaaaaagccgtggtagaaacactgctgcaggaagatccctggcgagtcgctaagatggtcaagtcatacctacagcagcataacatcccacaacgggaggtcgtggacacaactggactgaaccagtcgcatctgagtcagcatcttaataagggcaccccgatgaagactcagaagagggctgccctttacacatggtacgtgagaaagcaacgcgaagtagcccagcagtttacccacgctggccaggggggcctgattgaggaacccaccggtgatgagctgcctaccaagaaggggcggcgcaatcggtttaaatggggcccagcctcccagcagattttgttccaggcttatgagcgtcagaaaaatccctccaaagaagagagagaaactttggtggaagagtgcaatcgtgcagagtgcattcaacgcggtgtgagtccgtcccaggcccaaggtctagggtctaacttagttacggaggtgcgagtgtataactggttcgccaacaggagaaaagaggaggcgtttcgccacaaattagcaatggacacctactccggccctcctcctggtcctggtcctggtcccgccctgcctgcccattcgagccctgggctgcccccacctgcgctgtcccctagtaaggtccacggcgtgagatatggacagccagcgacgtctgagaccgctgaggtaccttcctcttcagggggacccttagtcacagtttctacacccttacaccaggtgtcgccaacaggccttgaaccatcccattccctgttaagtaccgaggcaaagctggtaagcgcagctggcgggccacttccccccgtttcaacgctcactgcactccactcgctggaacagacttctcctggcctgaaccagcagccccagaacctcattatggcttcgctcccaggggtgatgacaatcggacctggagaacccgcgagccttgggccgacatttactaacaccggcgcctccactcttgtcatcggattggcatcaacacaggctcaaagtgttcctgttattaattcaatggggtcatctctgacgactttacagccagtgcagttctcccagcccctgcacccaagttaccagcaacccctgatgcctccagttcagtctcatgtcacccagtccccattcatggccaccatggcccagcttcaatctccccacgctttgtattctcataaacccgaagtcgcacagtatactcacactggcctattgccacagacgatgttaattaccgacactaccaatctgtccgccttggctagcctcacccctacaaagcaggtgttcacaagcgacacagaggcttcaagtgaaagcggcctgcacactcccgctagccaggccactacgctgcacgtcccctctcaggatccagcctcaattcagcatctacagccggctcaccgtctgtcggcctccccaacagtgagcagcagtagtttggtcctctatcagtcgctcgggctctag

SEQ ID NO: 120050 - DNA, 837 bp, synthetic construct
  misc_feature 1..837: note = Description of Artificial Sequence: Synthetic coding sequence
  source 1..837: mol_type = other DNA
atggtgtccaaactgtcccagctacaaacagagctcctggcagcgctgctcgagagcgggttgtcgaaggaggccttgatccaggcactgggcgagcccggcccgtaccttctggccggcgaaggccctttggataagggtgagtcctgtggcggcggaaggggggaactggcagagctgccaaatggtttgggggaaacccgcggaagtgaagacgagactgatgacgacggtgaagacttcaccccgccaattttaaaggaactggaaaatctgtcacctgaagaggcagcacatcaaaaggccgttgtcgaaaccctgttgcaggaggacccgtggcgcgtggcaaagatggtaaagagctacttgcagcagcataatattcctcagcgggaggtagtcgacacaaccgggttgaatcagtcacatttatcccagcatctcaataaaggaactccgatgaaaactcagaaaagagccgccctgtatacctggtacgtgcgaaaacagagagaagtggcccagcgtcgcaatgcttcacgggaaggatgtccccatcaccgccacagaggttgggctcctactagtagccggaggtgtgtctccactacagggctgcccactggggccaagaagaagccgtcgggcacctcttggccctggacccgcaccgcagggccaccacaggggcaggccagagatctcagatgcccactcactgccccactcgcctgccttcacctccccagcccaccagtccggagcactgtgtgtgccatggacagcctgcggcccgtgcggctgcaaaagtacccgcaggcggccgcggtgccatag

SEQ ID NO: 120051 - DNA, 360 bp, synthetic construct
  misc_feature 1..360: note = Description of Artificial Sequence: Synthetic coding sequence
  source 1..360: mol_type = other DNA
atggtgagtaagctctcccagctgcaaacagagctgctggctgccctgttggagtccgggctctccaaagaagccctgattcaggctttaggcgaacctggtccttacctcttagccggcgagggcccactggataagggagaaagttgtggggggggcagaggagagttggctgagcttccgaatggtcttggcgaaacaagggggtcagaggatgagacggatgatgacggggaggatttcacaccacctatcctgaaagagttggaaaacctttcacccgaagaggctgcacatcagaaagccgtggtggaaacattactgcaagtgcacccgtgtagggccggtagggccgactag

SEQ ID NO: 120052 - DNA, 1989 bp, synthetic construct
  misc_feature 1..1989: note = Description of Artificial Sequence: Synthetic coding sequence
  source 1..1989: mol_type = other DNA
atggttagtaaactgtctcagcttcagaccgaactgttggctgcgctgctagagagcggtctaagcaaagaggctctcattcaggcactgggggaacccggaccgtatctgctggccggcgagggcccattggataaaggggagtcatgcggcggaggccggggggagctagccgagctccccaatggtcttggcgagacccgtgggagcgaagacgagaccgacgacgacggagaggactttacgccgcccatactgaaagagctggagaatttatccccggaggaggcagcccaccaaaaagctgttgtggaaacgctattgcaggaggacccctggagagtcgccaagatggtgaaatcatacctccagcagcacaacatcccgcagagggaggtggttgacactaccggactgaatcaaagtcatctgtctcaacatctgaacaagggcacacctatgaagacccaaaagagagcagcgctttatacctggtatgttagaaagcagagagaagtggcacagcagtttacacacgctggccagggaggcttgatcgaggaacccaccggcgatgaactgccaacaaaaaagggcaggcgtaacagatttaagtggggccccgcttcacagcagatcttgtttcaggcttatgagcgccaaaaaaaccctagcaaggaggaacgagaaacacttgtagaagagtgcaaccgggcagaatgtatccagcgcggagttagtcccagccaggcacaaggtctgggaagcaatcttgtcactgaggttcgcgtatacaactggttcgcaaaccggcgaaaggaagaggctttccgccacaaactggcaatggacacttattcaggccctccaccaggtcctggacccggcccagctttgcccgcacattcttcaccaggcttaccgccccccgctctttctccgagcaaagtccatggtgtgagatacggacaaccagcaacgagtgagaccgcagaagtaccgagctcatccggaggaccattagtgaccgtgtccacacccctgcaccaagtaagtcccacggggctcgaaccaagtcactccttgttgtctacagaggcaaaactcgtgagtgccgcaggagggcccctccctccagtttcgacgcttaccgccctgcactccctcgaacagacctccccaggtcttaaccagcagcctcagaacctgataatggcttccctgccaggagtaatgaccataggcccaggcgagcccgcctctctggggcccacattcaccaacacgggcgctagtaccctcgtcatagggctggccagcacacaggctcagtctgtcccagtgattaattcgatgggctcttctctcactacactgcagcccgtccaattctcgcagcctttacatccttcctatcagcagcctctcatgcccccagtgcagtcccatgtgacccaatcaccattcatggctacaatggcccagctccagagccctcacgcgctgtactcacacaagccagaagtcgcacaatacacccacaccggcttgctcccccagaccatgctcataaccgacaccaccaatttatcagctcttgctagtctgacccctactaagcaagtccggagtcgtccggctggtcctccccttgcttgtgaccgggcacctcacccccacattccacgggcccaggaggcggccctgctgccgcaggtgttcactagtgatacggaagcttcatccgagtcgggtctacacactccagcgtcccaagcgacaaccctgcatgtgcccagccaagatccagcttctatacaacaccttcaacccgcacacaggctttccgcatctcccaccgtatcatcctcgagcttggtgctgtatcagagctccgattccagtaacgggcagtcacatttattgccctctaaccactctgtgatagaaacatttatatccactcagatggccagctctagccagtag

SEQ ID NO: 120053 - DNA, 744 bp, synthetic construct
  misc_feature 1..744: note = Description of Artificial Sequence: Synthetic coding sequence
  source 1..744: mol_type = other DNA
atggtgagcaagctgagtcagctccagaccgagctgctggctgccctccttgagagcggcctgtctaaggaggccttgattcaagctctcggcgagccaggaccttacctgctggccggagaaggcccgctggataaaggagaatcatgtggagggggcagaggagaactggccgagttacctaacggattgggagagactcgcggctcagaggacgaaaccgacgatgatggtgaggactttaccccacccatcctgaaagaacttgaaaacctgagcccagaggaggctgcgcatcagaaggcggtagtcgaaaccctgctgcaggaggatccctggagagtggcaaagatggttaagtcctacctccagcagcacaacattccacagcgcgaagttgtcgataccacaggcctgaaccagagtcacctgtcccagcaccttaacaagggcaccccgatgaaaacccagaagagggcggccctgtacacctggtacgtgcggaagcagagggaagtagcgcaacagttcactcacgccgggcaaggcgggctaatcgaggagccaactggggacgagctgccgactaagaagggcaggcggaatcgttttaaatggggcccagcgagtcagcagatcttgttccaggcctatgaaagacagaaaaatccatccaaagaggagcgggaaacactcgtggaggagtgcaacagatgtgctctgtggactgcttgtgatcaatag

SEQ ID NO: 120054 - DNA, 1359 bp, synthetic construct
  misc_feature 1..1359: note = Description of Artificial Sequence: Synthetic coding sequence
  source 1..1359: mol_type = other DNA
atggtctctaagttatctcagcttcagacagagttgctcgcagccctgctcgaatctggtctctccaaggaggcactgattcaggccttaggagagcccggtccgtatctgttagcgggtgagggaccactggataaaggagaaagctgcggggggggtaggggtgaattggccgaactccccaatggcctgggcgagacccgtggctctgaggacgaaacagatgatgacggagaagacttcactcccccgattctgaaagaactggaaaatctgagccccgaggaggccgcgcaccagaaggccgtagtggaaaccttactccaggaggatccctggagagtggccaaaatggtgaagtcgtacctgcagcaacataatataccacagagggaggtggtggacactactggcttaaatcagagtcacctgtctcagcacctgaacaagggaaccccaatgaagacacagaagagggctgcattgtatacatggtacgttcggaaacagcgagaagtggcccagcagtttacacatgccggtcaagggggactgattgaggagcctactggagatgagctccctactaaaaaagggcgtaggaaccgcttcaaatgggggcccgcttcacagcaaacttcaccaggcctcaaccagcagccacagaatctgatcatggcctccctgcccggagtgatgactattggaccgggtgagcccgcctcgctgggcccaacatttacaaatacaggggctagcacgctggtgatagggttggcttctacccaagcacaaagcgtccctgtcataaattccatgggtagttcccttactactctgcagcccgtgcaattcagccagccactacatccatcataccagcagccactaatgccacccgttcaatcacatgtcactcaatctcctttcatggcaactatggcccagttacagtcccctcacgccctgtacagtcataaacccgaggtcgctcagtatacccataccggattgcttccccagactatgttaatcactgacacgacgaatctgtctgccctggccagcctgactcccacgaaacaggtttttacaagcgacactgaagctagtagcgagtcaggccttcatacccctgcaagccaggccacaaccctgcacgtgccttcccaggacccagcatccattcagcacctgcagccagcacaccgcctaagcgcttctcccaccgtgtcttcctccagtcttgtcctgtaccagtcaagtgattcatcaaacggccagagtcaccttctgccatccaaccacagtgtgattgagacctttatttctacccagatggcttctagttcccagtag

SEQ ID NO: 120055 - DNA, 1212 bp, synthetic construct
  misc_feature 1..1212: note = Description of Artificial Sequence: Synthetic coding sequence
  source 1..1212: mol_type = other DNA
atggtgaaatcctatctgcagcagcataatatcccccagcgagaagtcgttgacaccaccgggcttaatcagagccatctctcacagcatctcaataaagggacgcccatgaaaacccagaagcgagcagcactgtatacttggtatgtcaggaaacagagagaggtggcccaacagtttacacacgccggccagggtggtctcattgaagaacccacaggcgatgagttgccaaccaagaagggaagacggaatagatttaaatggggacccgccagtcaacaaatcttgttccaggcttatgagcggcagaaaaacccttctaaagaggagcgtgaaaccttagtagaagagtgcaatcgggccgagtgcatccagcgcggggtgagtccgtcacaggctcagggcctgggcagcaatctggtgaccgaagttcgagtgtataactggtttgccaaccgccgcaaggaagaggctttcaggcacaagctcgcaatggacacctactccggtccaccccctgggcccggcccgggcccagccctgcccgcccatagcagcccaggacttccacctcctgcgctgagcccaagtaaggtccatggcgttagatatggtcaaccggccacatctgagaccgctgaggtgccatccagcagcggcggacctttggtgacagtgagcacacccctgcaccaggtgagccccaccggattagagcccagccactcactccttagtaccgaggccaagctggtgtctgccgctggcgggccccttccacctgtctcgacgttaacagctctacattcactcgagcaaacctcccccggactgaatcagcagccccaaaatctgattatggcttctctgcccggggtgatgacaataggccctggtgagcccgccagcctcgggccaactttcacaaataccggagcgtctacactggtgataggaaagctagtaggcatgggcggacacctcggcgggcgactaatggggcaaccccagaacccaggagccggaagggcaacgggtacacactccttcattcacaccacctgcatctatcccgtgcccacattggaccagagtttgtgttatatatcggacacatgggtgaatcagaccgaccagaatttgtcaaacagctctcgcgaggccgggacgaaacacaatacgagcatcctttggtacctgaggcggtag

SEQ ID NO: 120056 - DNA, 1185 bp, synthetic construct
  misc_feature 1..1185: note = Description of Artificial Sequence: Synthetic coding sequence
  source 1..1185: mol_type = other DNA
atggtgagcaaactttcacagctgcagaccgaattgctggcagccctacttgaatccggtttgtcaaaggaggccctcatccaggcattgggcgaacctggtccttacttacttgctggtgaggggccactggataaaggtgaatcatgtggcggcgggcgcggtgagctcgccgagctgcccaacggcctgggtgagacgagaggctcagaagatgaaaccgatgacgacggtgaggattttacaccaccaattttgaaggaactggaaaatctgagcccagaagaggccgcccaccagaaagccgtggtagaaaccctgctgcaggaagatccttggcgggtggctaagatggtcaagagctatttacagcagcacaacatcccccagagagaagttgtggataccaccggcctgaaccagtcccatctttcccagcatctgaacaaaggcacgcctatgaagactcagaaacgtgccgcactgtacacgtggtacgttcgaaagcagcgcgaagtggctcagcagttcacgcatgccggacaggggggcctgatcgaggagccaaccggcgatgagttacctaccaaaaaaggcagaaggaaccgcttcaaatggggccctgccagccagcagatcctcttccaggcttacgagcgccagaagaaccccagtaaggaggagagagaaactctggtggaggagtgcaatcgggctgaatgtatccagcgcggtgtgtctccctctcaagcccagggccttggatctaatctagtcacagaagttagagtgtataactggttcgccaatcggcggaaagaagaagcattcaggcataagctagctatggacacatacagcggtccaccacccgggcccggccccggacccgcactgcccgcacatagcagtcccgggctaccaccacccgcactttcaccttccaaggtccacggcgtaagatatggccaaccagccacgtccgaaactgcggaagtgccgagcagcagcggtggcccgctcgtaaccgtgtcaacccctcttcaccaggtgtctccaacagggttggagccttcccattccctattatcaacagaggcaaagcttgtctcggcggcgggtggccctttgccaccagccgcctgctcgcagcctggccgtgtcgctcggcttttcaatttttag

SEQ ID NO: 120057 - DNA, 1917 bp, synthetic construct
  misc_feature 1..1917: note = Description of Artificial Sequence: Synthetic coding sequence
  source 1..1917: mol_type = other DNA
atggtgagtaaactctctcagctccagaccgagctcctggcagcgctcttggagtctggactgtctaaggaagcccttatacaagccctgggagaaccggggccctatctgctggccggcgagggtcccctggataaaggagagagctgcggcggaggacgaggtgagttggcagaactaccaaatgggctcggtgaaactcggggcagcgaggacgaaacagatgatgacggcgaagactttactccaccgatcttgaaggagctggagaacctttctccggaagaagcggctcatcaaaaggccgtcgtagagaccttgctacaggaggatccctggagggtggctaagatggtgaagagctacttgcaacagcacaatattccgcagcgcgaagttgttgacactacaggcttgaaccagtcgcatctctcccagcacctcaacaaaggtactccaatgaagactcaaaaacgagcagctctgtacacctggtacgtgagaaagcaacgggaagttgctcagcagtttacccatgctggccaggggggtctgatcgaagagcccaccggagacgaactcccaaccaaaaagggccgaaggaacaggtttaagtggggtcccgcctcccagcagatcctgttccaggcttatgaacgccagaagaatccaagcaaagaggagagagagacactggtggaagaatgtaatagggctgagtgcattcagcgaggggtgagtccttcacaagcccagggactgggcagtaatttagttactgaagtgcgggtctataactggttcgccaaccggcgaaaagaagaagctttccgtcataagttagccatggatacctactctggccccccccctggacccggccctggccccgcgctcccagcccacagctctccgggactgcctcctccagcactgtctccatctaaggttcacggggtgcgctacggccagcccgccacctcagagaccgccgaggtaccatcaagctccggagggccgttagtcaccgtatctacccccctacaccaggtcagtcccacaggacttgagccctcacacagccttctgtccacagaagctaaactggtctctgcggcgggggggccacttccacccgttagtacattaacagctctgcacagtctggagcagacaagtccgggcctgaaccagcagccccagaacctgataatggcatccctccccggcgttatgacgatcggccctggagagccagcctcactgggcccaacatttacaaatacaggcgccagtactttagtgatcggattggcaagtacacaggcccagagtgtcccagtgatcaactcaatggggagcagtttaaccaccctccagcctgttcagttctcacagcctcttcacccttcatatcagcagccgctgatgccgcctgtccagagccacgttacccagtcccccttcatggcgaccatggcgcagctccagagccctcacgccctgtattcccacaagccagaagtggctcaatacacgcacaccggcctactaccccagaccatgctaatcaccgatactacgaacttgagcgccctggcaagcctcacccctacgaagcaagaggcagcactgctgccacaggtgtttacttccgatactgaggcctcatcagagtcaggattacatacgccggcttcacaggcgacgacactgcatgtgccctctcaggatcccgcttctattcagcacctgcagccagcgcaccggttgtcagccagtcccaccgtatctagctcatctcttgtgctgtaccaatcctccgacagctccaatggacagagccacctgctgccgagcaaccactccgtgattgagacattcatttcaacccagatggcctccagcagtcagtag

SEQ ID NO: 120058 - DNA, 1416 bp, synthetic construct
  misc_feature 1..1416: note = Description of Artificial Sequence: Synthetic coding sequence
  source 1..1416: mol_type = other DNA
atggtgtccaagctgtcacagctgcagaccgagctgcttgccgctctattggaatccggactgtccaaagaagcgttgatccaagctctgggggaaccagggccctacctgcttgctggggagggcccactggacaagggagagtcatgcgggggagggcggggagagctagctgaactacctaacggtttgggtgagacacggggatccgaggacgaaaccgatgacgacggcgaggactttacccctcctattctgaaagagcttgaaaatctttcgcctgaggaagctgcgcatcagaaggccgtggtggagaccctcctgcaggaagatccttggagggtagcgaagatggtaaagtcgtacctgcagcaacacaacattccccagagagaggtggtggacaccactgggctcaaccaatcccatttatctcagcatttaaacaaaggtacacccatgaagacccagaagcgggcggctttgtacacttggtatgtgaggaaacagcgggaggttgctcagcagttcacacacgcaggacagggtggcctcattgaagagcctacaggcgacgagttaccaacgaaaaagggaaggcgaaacaggtttaagtggggccccgcctctcagcagatattattccaagcttacgaacgtcagaagaaccccagcaaggaagaaagggagacccttgtggaggaatgcaatcgggcagaatgtatccagagaggcgtgtctccctcacaggcccagggtctagggtcaaacttagttactgaagtcagagtctacaactggtttgcaaatcgccgaaaagaggaagcctttagacacaaactcgcgatggatacatacagtggccccccccctggccccggacccgggcctgcgctgcctgcccatagcagtccgggactgccccctccagccctgagcccaagcaaggtgcatggagtgagatatggtcagccggcaacttcagagactgccgaggtgccaagcagctctggtggcccactcgtaacagtatccactcccctgcatcaggtctctccaaccggccttgagccttctcattcccttctctcgaccgaggctaagctcgtttctgctgcaggtggcccattacctcccgtgtcaaccctcacagctctccactcccttgagcaaacttcgccaggccttaatcagcaaccccaaaatctgatcatggcctccctccccggcgtgatgactatcgggcctggagagccagcatctttaggtcctaccttcaccaacacaggcgcatctaccctggtgattggactggcatccacgcaagcccagtctgtgccagtgattaattcaatggggtcttccttaacaacactccagcctgtgcagttctcgcagcagggtccaagttcatag

SEQ ID NO: 120059 - DNA, 1359 bp, synthetic construct
  misc_feature 1..1359: note = Description of Artificial Sequence: Synthetic coding sequence
  source 1..1359: mol_type = other DNA
atggtgagtaagctgagccagctgcaaacagaacttctggccgcgctgctggaatctgggttatctaaagaggcgctcattcaggcgctgggagaaccgggcccatatctcttggcaggcgaggggcctctggacaaaggcgaaagctgcggtggcggtcgtggcgagctggctgaattgcccaatggcctgggtgaaacccgggggtccgaggatgagaccgatgacgatggggaagactttacccccccaattctgaaagaactggagaatttaagccctgaagaggctgcgcaccagaaggccgttgtggagactctcctccaggaagacccttggcgcgtggccaaaatggtcaagagctacctgcagcagcataacatcccccagcgggaagtggttgatactaccggcctgaatcaatcccacttatcacagcatctgaacaaagggacccctatgaagactcaaaaacgggccgccctgtacacatggtatgtgagaaagcagagggaagttgcccaacaattcacccatgcaggccaggggggcctgatcgaggagcccacaggtgatgagctccccaccaaaaagggaagacggaatcgcttcaaatggggccccgcatcccagcaaatcttattccaagcatacgagaggcagaagaacccatcgaaagaggagcgtgaaactctggttgaggagtgtaatcgggccgagtgcatccagaggggagtgtcgccatctcaggcacagggtctaggcagcaacctggttactgaggttcgcgtctacaactggtttgcaaataggaggaaagaagaggcattccggcacaagctagccatggatacgtatagcgggcctcctcccggacctggcccaggccccgcgctgcccgcccatagcagtcctggcctgcctcctccagccctgtccccgagcaaagtccacggtgtgagatacggccagcccgcaaccagcgagactgccgaggtcccttcctcttctggcggtcctttggtgaccgtgtccactcccctgcatcaagtgtcaccgacaggcctggaaccctcacattctcttttgtcgactgaggctaaactggtcagcgcagcaggcggccctctcccgcctgtgagcacgcttaccgcgttgcacagtctagaacagacttctccaggcctgaaccagcagccccagaatctgatcatggcatctctccctggtgtcatgaccatcgggcccggggagcccgccagtctgggacccacattcaccaacacaggcgcatcaaccttgccactctttggagccggtgttgccgagcttacccggcagcaaggtcccagcagttag

SEQ ID NO: 120060 - DNA, 1071 bp, synthetic construct
  misc_feature 1..1071: note = Description of Artificial Sequence: Synthetic coding sequence
  source 1..1071: mol_type = other DNA
taatggctggtaggattctggggaggcagcggctgcaaggagtttggcctgtgcctacccgcgggccgccagacacagccaacaaggtggggcagacgcctggcgtggtggactagggccgcctggccatgcgggtcacgcgcgatggtgtccaagttgtctcagttgcagacagagcttttggcagcgctcctggagtccggtctgtcaaaggaggctctgatccaagcccttggcgaaccggggccctatctgcttgccggggagggtcccctcgacaagggggagagttgcggaggaggtagaggagagctggccgaattgcccaatggcctgggagagacaaggggatcggaggacgagaccgatgatgatggagaagattttacaccaccgatactgaaagaactcgaaaacttaagccccgaagaagctgcacaccagaaggcagttgttgaaaccctgctacaggaagatccttggcgcgtagcaaaaatggtgaagagctacttgcagcagcacaacatcccccagcgagaagtggttgacacaaccggacttaaccaatctcacctgagtcagcacctgaacaagggcacccctatgaagacccaaaaaagagccgccctgtacacttggtacgttagaaaacagagagaagtcgctcagcagttcactcatgctgggcagggggggctgatagaagagcccactggagacgagttacctaccaaaaaggggcgaaggaataggtttaaatggggacctgcaagtcagcaaatcctctttcaggcatatgaacgccagaagaatccaagtaaagaggagcgggaaaccctagtagaggaatgcaaccgtgctgaatgcattcaaaggggggtctccccctctcaaccccagccagcagaatatcggtcccaggccgggctgagttcctggggacccccaccaccttgccagcatccggattcaaccgcacagctcggagccgacattcctaggccacaaccagctgctcctgagccacaccatggactgacatcctggggacacgatcatcgcgcctggtag

SEQ ID NO: 120061 - DNA, 2247 bp, synthetic construct
  misc_feature 1..2247: note = Description of Artificial Sequence: Synthetic coding sequence
  source 1..2247: mol_type = other DNA
atgctgggcacgctgagagcaatggagggagaagatgtggaggacgatcagctcttgcagaagttgcgcgcaagccgcaggcgatttcagaggcggatgcagcgccttatcgagaagtacaaccagccttttgaggatactccggtggtgcagatggctactttgacctacgaaacaccccagggcctgcgcatctggggaggtcggctcataaaggaacgcaatgagggggagattcaagactcgtccatgaaaccagctgacagaactgacggttctgtgcaggccgccgcgtgggggccagaactgccttctcataggaccgtccttggcgcagacagcaagtctggcgaggtggacgcaacatcagatcaggaagagtctgttgcatgggccctggcgcccgctgtgcctcagtcacccctgaagaacgagctgcgacgcaagtatctgacccaggtagatatactgcttcagggcgccgagtacttcgagtgtgctgggaaccgcgcagggcgggacgttcgcgtcacacctctgccttctctggcatcgccagccgtgccggcccctgggtattgctccagaatttctcgaaaaagtcctggggaccccgccaagcccgcatcatcccctcgcgaatgggatcccttgcacccttccagcactgacatggccctcgtaccgaggaatgactctttgtcactgcaggaaacctccagcagctccttcctttccagccagcccttcgaggatgatgacatctgcaacgtgaccatttctgacctgtacgctggcatgctacactcgatgtcgcgtctgcttagcactaagccttcctcaattatttcaacgaaaactttcatcatgcagaattggaattcacggcgacgccaccgttacaagtccagaatgaacaagacatattgcaagggcgctcgccgctcgcaaaggagttccaaggagaacttcatcccttgcagcgagcctgtcaagggcacaggcgctctccgtgattgcaagaatgtattagatgtttcatgtagaaaaacaggcctgaaactggaaaaggcctttctggaggtcaacaggccacagatccataaactggacccaagttggaaagagcggaaagtgaccccctctaaatactccagcttaatttatttcgattcttccgccacttataatctggatgaggaaaaccgattccggactctcaagtggcttatctctccagttaaaatcgtctctcgcccaacgattcggcagggacacggggaaaatagacaacgggagatagaaattcgctttgaccagcttcaccgtgagtactgcctgagcccccggaatcagccccgcagaatgtgcctgcccgactcatgggcaatgaatatgtaccggggggggcccgccagccctggtgggttgcagggactcgaaacacgccgcttgagtctgcccagcagtaaggccaaggcaaagtcactgagcgaggcctttgaaaacctcggaaaacgctccctagaggctggcaggtgcctgcctaagtcagactcatcatcctctctcccgaagacaaaccctacacacagtgcaacccgaccgcagcagacatcagatttacatgttcagggaaactcatctggaattttccgaaagagcgtcagccctagtaagaccttgagcgtgccggacaaggaggttcccggccacggtagaaatcggtacgatgagatcaaagaggagttcgataagctgcatcagaagtattgcctgaaaagccccggccaaatgacagtgccattatgcatcggtgtatccacagataaagctagcatggaagtccgataccagacagaaggatttctcgggaaactcaatccagatccacactttcaggggtttcaaaagcttccttctagtcccctgggctgcagaaaatctctcctcgggagcaccgcaatcgaggctccttccagtacttgcgttgctcgcgctattactagagatggaacacgtgatcatcagtttcctgccaagcgaccgcgattaagtgaaccccaggggtccgggagacaggggaacagcctcggagcctctgatggggtagataacacagtgcgccctggggatcagggctcgtcctcccagccaaactcagaggagcgcggggaaaataccagttaccgcatggaggaaaagtccgacttcatgctggaaaagctcgaaactaagtctgtgtag

SEQ ID NO: 120062 - DNA, 2085 bp, synthetic construct
  misc_feature 1..2085: note = Description of Artificial Sequence: Synthetic coding sequence
  source 1..2085: mol_type = other DNA
atgcttgggacacttcgcgcaatggaaggggaggatgttgaggacgaccagcttttgcagaagctcagggcaagcaggcggaggttccaacgccgcatgcagcgtctgatagagaaatataatcagccttttgaagacaccccggtagtacagatggcgacactgacttacgagacacctcagggacttagaatttggggcggtaggctgattaaggagcgtaatgaaggagaaattcaacctgctgtgccacagtcacctctaaaaaacgagctgcggcgcaagtacctgactcaagtggacattttgctgcagggagccgagtacttcgaatgtgccggcaaccgtgctgggcgcgacgtcagggtgactcccctgccaagcctggcaagtcctgctgtgcccgctcctggatattgtagccgtatatctagaaagagccctggtgatcctgccaaaccagcctcctcgcctagagagtgggatcctctgcacccaagtagcaccgatatggcgctggtgccccggaatgattccctttcattacaggaaacatcatccagcagttttctttcctctcagccttttgaggatgacgacatttgcaatgtgaccatctccgatctgtacgccgggatgctgcattccatgtcacggttgttgtctaccaagccgagttccatcatcagcacaaagacattcattatgcagaattggaacagtaggcgccggcataggtataagagcagaatgaataaaacatattgtaaaggggccaggcgctctcagagaagctctaaagagaacttcattccttgcagcgaacccgtgaagggcaccggcgcccttcgggactgcaaaaatgtgttggacgtcagttgtaggaaaactggcctgaagttagagaaagcttttctggaggtgaaccgaccccagatacacaaattagacccatcctggaaagagcggaaagtcacgccgtctaaatacagttctctgatatactttgacagctctgcaacctacaacctcgatgaagagaatcgatttcgcacactcaaatggttgatcagccctgttaaaatagtgtccaggccgacaattaggcaggggcatggagaaaaccggcagcgggagatagagataagatttgaccagctgcaccgagaatactgtctttcccctcggaatcaacctcgtagaatgtgtctacctgattcatgggccatgaacatgtatagagggggtcctgcgagccccggcgggctgcaggggctggaaacgcgccggttaagtctgccaagctccaaagctaaggccaaaagcttgagtgaggcatttgaaaaccttggcaaaaggagcctggaggccggtagatgcctgcctaagtcggattcttccagctctttgcccaaaactaaccccacacattctgcaacaaggccccaacaaacttccgatctccatgtccaaggaaatagtagcggcatctttagaaaatcagtgagcccgagtaagaccctatccgtgcctgacaaggaagtgcccggccatggacgcaaccgctatgatgaaatcaaggaagagtttgacaagcttcaccagaagtattgcctcaaaagtccaggccagatgactgtgccgctgtgcattggagttagcactgacaaggcatccatggaagtacggtaccaaaccgaggggttcctgggcaaactgaatcctgatccccacttccaggggtttcaaaagctcccaagttccccgttgggatgtcggaaaagtttgctgggatcaaccgccatcgaggctccaagctcaacatgtgtggccagagccattacaagagatggcaccagggaccatcagttcccggcgaaacgcccgcgcctctctgagcctcagggctcagggcggcagggtaacagtctgggagccagtgacggagtggataatacagtccggcctggggaccaaggatcaagcagccagcccaactcggaggaaaggggcgagaatacctcataccgaatggaagagaaatcagattttatgctagaaaagttagagaccaaaagcgtgtag

SEQ ID NO: 120063 - DNA, 1992 bp, synthetic construct
  misc_feature 1..1992: note = Description of Artificial Sequence: Synthetic coding sequence
  source 1..1992: mol_type = other DNA
atgctggggaccttacgcgccatggagggagaagacgtggaggatgaccagttgctgcagaagctacgtgcttctcgacggcgctttcagcggcgcatgcagcgtcttatcgagaagtataaccaaccctttgaggacacacctgtggttcagatggccaccttgacgtatgagaccccacagggcctccggatatggggcggcaggctaatcaaagagcgaaatgagggtgagatccagtgtgcagggaatagagctggcagagatgtacgcgttacccccctgccatcattggcctcaccagcagtgcctgctcccgggtactgttcaaggatcagccgaaagagccccggtgatcctgctaaacccgcgagctcccctcgcgagtgggacccactgcatcccagcagcaccgacatggccttggtgccaaggaatgacagcctgtctctccaggagaccagttcgtcctcattcctgagttcccagccctttgaagacgacgacatctgtaacgtcactatcagtgatctctatgccgggatgctccactccatgagccggctactttctactaagccatctagcattatcagtacaaaaacgttcataatgcagaattggaatagtagacggaggcatcggtataagagcaggatgaataaaacgtattgtaagggggcccgacgcagccaacgtagcagcaaggaaaatttcatcccttgtagtgaaccagtgaagggaaccggcgccctgagggattgtaagaacgtcttggacgtgtcatgcaggaagactggactcaagctcgaaaaggcctttctggaagtaaaccggccacagatccacaagctggacccttcatggaaggaacgtaaagtcaccccctctaagtattccagccttatttatttcgatagcagtgccacttataatctggatgaggagaaccgcttccgcacacttaagtggctgatttcccccgtcaagatcgtcagtcgaccaaccattaggcagggacacggagagaaccgccagcgggagatcgagattaggttcgaccagctgcaccgggagtattgtctatcgccccgcaatcagcctagacgaatgtgtttacccgactcttgggcaatgaacatgtacagaggggggcccgcaagccccggcggattgcagggcttagagacgagacggctctccctgccatcctctaaagcaaaggctaagagtctgagcgaggcatttgaaaacctcgggaagagaagtctggaagccggacgatgcttgcccaaatccgatagtagttcctccctgcctaagacgaatcccacacacagcgccaccaggccccagcaaacctcggacttgcatgtgcagggcaatagctccggaatattccgaaaaagcgtgtctccatccaagaccctgtcggtccctgacaaggaggtcccaggacacgggagaaacaggtatgacgagattaaggaggaatttgataaactgcaccagaaatactgcttaaagtcccccggtcagatgaccgtgccactgtgcataggggtgagtaccgacaaggcctctatggaagtacgataccaaaccgaaggatttctggggaaattgaaccccgacccacactttcagggctttcagaagttgccaagctctcccctgggttgccggaaatctctcctgggaagcacagcaattgaggctccctcctctacctgtgtggcccgcgccatcaccagagacggaacgagagaccaccaattcccagcgaagcgcccccgtctgtctgagccccaaggcagcggtcgacaaggcaattctctcggagcaagcgacggcgttgataacacagtacgccctggggatcaggggtccagttcccagcccaatagtgaggagaggggggaaaatactagctatcggatggaggaaaaatctgacttcatgttggagaagctcgagacgaaatccgtatag

SEQ ID NO: 120064 - DNA, 2181 bp, synthetic construct
  misc_feature 1..2181: note = Description of Artificial Sequence: Synthetic coding sequence
  source 1..2181: mol_type = other DNA
atggaggataggctgcatatggacaatggcctggtcccacaaaaaatcgtatcagtccacctccaggactcaacactgaaggaagttaaagatcaggtgagtaacaagcaggctcaaattctggaacctaagcccgagccaagccttgagatcaagccagagcaggacggcatggagcacgtgggcagagacgatcctaaagccctaggggaggagccaaagcaacgacggggcagtgcatcgggatctgaaccagcaggtgatagcgaccgtggaggggggccagtagaacactaccaccttcacctgagtagctgtcacgagtgcttggagctcgagaattcaaccattgaaagtgtgaaattcgcctctgccgagaacattcctgatttaccctacgactactcatcatcccttgagtccgtcgccgacgagacatctccggaacgtgagggtagacgcgtgaatctaaccgggaaggcccccaatattctgctgtatgtgggcagcgattcccaggaggcacttggaaggttccatgaggttcggtctgtcctagccgactgcgtggacattgacagttacatcttgtatcacctccttgaggactctgcactacgcgacccttggaccgacaactgcctgttgctagtgattgccactcgagagtccataccagaggacctgtatcaaaaattcatggcctatctgtctcaggggggtaaggtcctgggcctatcatccagcttcacttttgggggcttccaggttactagcaaaggtgctttacacaagacagtgcaaaatcttgtgttcagcaaagcagaccagagcgaagtcaaattgtccgtgttaagtagtggctgcagataccaagagggtccggtgcgtctgagcccgggtaggcttcaaggacacttagaaaacgaagacaaggatcgtatgatcgtccatgtgccttttggaacaagagggggggaggccgtgctatgccaggtgcacctagaactccctccatcttccaatatcgtacagacgcccgaagactttaacctcttaaagagctcaaactttcgtcggtatgaggtgctgcgtgagatccttaccacgttgggtctcagctgtgatatgaaacaggtccctgcccttacacccctctacctcctcagcgctgctgaggaaattagggatcctctgatgcagtggttagggaaacacgttgactccgaaggcgaaatcaagtctggccaactctctttgcggtttgttagcagttacgttagcgaggtagaaatcaccccttcttgcatacccgtagtcaccaacatggaggctttcagctcagaacatttcaacttggaaatctacagacagaacctgcaaaccaaacagcttggcaaagtgattctctttgcagaagtgacacccacaactatgcggctgctcgacggcctgatgtttcagacgccgcaagagatgggcctaatcgtcattgctgctcgtcaaacggaggggaaaggccggggaggcaatgtgtggctgtctccggtggggtgtgctctgtctacgctgctcatatccataccccttcgctctcagctaggtcagagaatcccattcgtgcaacacctcatgagcgtggcggtagtcgaggctgtcagatccattcctgagtaccaggatatcaatttacgcgtcaagtggcccaacgacatatattatagtgacctgatgaagataggtggcgtactggttaattctacactgatgggcgaaaccttttacatcctgatcggctgcggcttcaacgttactaacagcaaccctactatttgcatcaacgatttaatcactgaatataacaagcaacacaaggccgagctgaagcctctcagagccgactacctcattgcgcgcgttgtcacagttttggagaaacttattaaggagttccaagacaagggacctaattctgttttacctctttactaccggtactgggtccacagcggtcaacaggtgcaccttggctcggctgaagggcccaaggtgtctattgtgggactagatgactctggcttcctgcaggtacatcaggagggaggggaagtggtgacagtgcaccctgacggcaacagtttcgatatgctgcgcaatctgatccttccaaagcgccgctag

SEQ ID NO: 120065 - DNA, 2181 bp, synthetic construct
  misc_feature 1..2181: note = Description of Artificial Sequence: Synthetic coding sequence
  source 1..2181: mol_type = other DNA
atggaggatcgactgcatatggacaacggattggtgccgcagaaaatagtgtctgtgcatcttcaagacagtacactcaaggaggtcaaagaccaggtcagcaacaagcaagcccagattctggagccaaaacctgagccgtctctggagattaagcccgagcaagacgggatggaacatgtgggcagagacgatcccaaggcactcggggaagaaccaaagcagcggcgcggctcagcttcagggagtgaacccgcgggtgacagcgatcgaggtggcggccccgtagaacattaccatctgcatctctccagttgtcatgaatgcttggagttggaaaattctacaatcgagagcgtgaaatttgctagtgctgaaaatataccagatctaccatatgattattcttctagcttagaatcggtggctgacgagacttcacctgagcgtgaaggcaggagggtgaacctgaccgggaaggcgccaaatattttgctgtacgtgggatctgattcacaggaagctctggggagattccacgaggtgcggtccgtcctcgctgactgtgtcgatatagacagctacattctttatcacctgttagaagacagtgccctgcgggatccctggacggataactgtctcctgctagtgatcgccacacgagagtccatccctgaagatctctaccagaagttcatggcttacctgtcacagggaggaaaagtacttggcctgtcttcatcattcacgttcggtggcttccaggtgacctccaaaggcgctctccacaaaacagtgcagaacctggtgttctcaaaggctgatcaaagtgaagtgaaattgtccgtgttaagtagcggttgccgctaccaggaagggcccgtgcgcctatcacccgggaggcttcagggccatctggagaacgaggacaaagaccggatgattgtacatgtcccgtttggtactcgaggcggggaggcagtcctgtgtcaggtccacctggagctgcctccatcgtctaatatcgtccagacccctgaggatttcaatctcctgaagagctcaaatttccgccggtatgaagtgcttagagagatcttaactacattaggcctttcatgcgacatgaaacaggtcccggccttaacaccgctgtatctcctgtctgcggccgaggagatccgagatcccctaatgcagtggcttggaaagcatgtggattccgaaggtgaaataaagtctggtcaactgagtctccgtttcgtctccagctacgtgtccgaagtcgaaattacccccagctgtatacctgtcgtgactaatatggaggctttctcttcagaacacttcaatttagaaatctatcgccagaacctgcaaactaagcagctcggcaaggtcatactgtttgcggaagtcacacctactacgatgagacttttagacgggctgatgttccaaactccgcaagagatgggacttattgtgattgccgcacggcagacagaaggaaagggccgcggtggcaacgtctggttaagccccgtcggatgtgccctgtcaaccttgcttatctccatcccgctacggtctcagctcgggcagaggattcctttcgtgcagcaccttatgtccgttgcagtggtggaagcggtgcgttctatcccagagtaccaggacataaacctgagagtaaaatggcctaatgacatttattactctgacttgatgaagatcggaggcgtgctggtaaattccacactcatgggagaaactttttatattctgatcggctgtgggttcaacgtaactaattccaacccaactatctgcatcaatgacctgatcaccgagtacaacaagcagcataaggcagagctaaagccactccgggctgactacctgatcgctcgcgtggtaaccgtgctggaaaaacttatcaaggaattccaggacaaaggacctaacagtgttctgcccctctactaccgctattgggtgcacagtggtcagcaggtgcacctgggttctgctgaagggccgaaggtttccatagtgggcctggatgattcaggctttttgcaggttcaccaagaaggtggcgaggtagtcacagtgcatcctgacggtaactcctttgacatgctgcgcaacctgatcttgccaaagaggaggtag

SEQ ID NO: 120066 - DNA, 264 bp, synthetic construct
  misc_feature 1..264: note = Description of Artificial Sequence: Synthetic coding sequence
  source 1..264: mol_type = other DNA
atggaggatcggctgcacatggacaacggcctcgtgccccagaagattgtttcggttcatttgcaagactcaacgcttaaggaggtgaaggaccaggtgtccaataaacaggcccagatcttagagccgaagcccgagccttctttagaaattaagccagagcaagacggaatggagcatgtggggcgcgatgatcctaaggctcttggcgaggagcctaagcagaggaggggtagcgcgtccgggtctgagcccgccggttag

SEQ ID NO: 120067 - DNA, 234 bp, synthetic construct
  misc_feature 1..234: note = Description of Artificial Sequence: Synthetic coding sequence
  source 1..234: mol_type = other DNA
atggaggatcgtttacatatggataatggcttggttccacaaaaaatcgtgagcgtccacctccaggatagtacactcaaggaagtgaaggaccaagtgagcaacaaacaggcacagattctggaaccgaagcccgagccttctctcgagatcaaaccagagcaagacggaatggagcatgtgggtagggatgacccgaaggcactgggcgaggagcccaaacaaaggagatag

SEQ ID NO: 120068 - DNA, 279 bp, synthetic construct
  misc_feature 1..279: note = Description of Artificial Sequence: Synthetic coding sequence
  source 1..279: mol_type = other DNA
atggaggataggctgcatatggataacggcctagtacctcagaagattgtatccgtgcatctgcaggacagcactctcaaggaggttaaggatcaggtctcaaataaacaggcccagattcttgagcccaagccagaacctagcctcgagattaagcctgagcaggatggtatggaacatgtgggcagggacgatccaaaagccctgggcgaagaaccaaagcaacgtcgggggtctgcttcaggatccgagcctgccggcgattctgatcgcggctag

SEQ ID NO: 120069 - DNA, 807 bp, synthetic construct
  misc_feature 1..807: note = Description of Artificial Sequence: Synthetic coding sequence
  source 1..807: mol_type = other DNA
atgggcctgtcaccctcagctcccgccgtagccgtgcaggcatcaaacgcatccgccagtccccctagcggatgccctatgcatgagggaaaaatgaagggatgccctgttaatactgaaccctccggcccgacttgtgaaaagaaaacatattccgtccctgcccaccaagagagagcttacgaatacgtggaatgcccaattcgtggcaccgcagcagaaaataaggaaaatcttgacccaagcaatctcatgcctcccccaaatcagacacccgctcccgatcaacccttcgccttgtctaccgtgcgggaggaaagctctattccccgcgccgactccgaaaaaaagtgggtctacccatctgagcagatgttctggaacgctatgctgaagaagggctggaagtggaaagacgaggatatctcccagaaagacatgtacaacatcattcggatccacaatcaaaataacgaacaggcatggaaggagattttgaagtgggaggctctccacgcagcagaatgtccttgcggcccgtctcttatcagatttggtggtaaagctaaagaatattcgccacgcgcacgtattagaagttggatggggtatgagttacccttcgatcgacacgattggattattaaccgatgcggcacagaggtgagatacgtgatcgattactacgacggcggcgaagtgaacaaggattaccaatttaccatcctggacgtcaggccggccctggatagtctttctgcagtgtgggaccggatgaaggtggcttggtggcggtggaccagctag

SEQ ID NO: 120070 - DNA, 807 bp, synthetic construct
  misc_feature 1..807: note = Description of Artificial Sequence: Synthetic coding sequence
  source 1..807: mol_type = other DNA
atgggactgtctccctctgcacccgcggttgcagtgcaagcctccaacgcgtccgccagcccacccagtggttgtccaatgcacgaaggcaagatgaaaggatgcccagtaaacacagagccttctggacctacatgcgagaagaagacctactcagtgccggcccaccaggaacgtgcctacgagtacgtggaatgtcctatcaggggcacggcagcggagaataaggagaatttggatccatccaacttgatgcccccccctaatcagacacccgctcctgatcagccctttgcactctccacggtgagggaagagtcaagcattccaagggccgattctgagaagaaatgggtttacccatcggagcagatgttttggaacgccatgcttaaaaagggctggaagtggaaggacgaggacatcagtcagaaggacatgtacaatattattcgaatccataatcaaaacaatgaacaggcctggaaggagatcctgaaatgggaggctcttcacgccgcagagtgtccatgtggcccgagcctgatacgcttcggcggcaaggctaaggagtactctccaagggctcggattcgtagctggatgggctacgagctccccttcgaccgccacgattggatcattaacaggtgcggcacggaagtgcggtacgtgattgactactatgacggaggagaggtcaataaggactatcagtttaccatcctggatgtgaggcctgcactggactccctgtcagccgtgtgggaccgaatgaaggtggcctggtggaggtggacctcttag

SEQ ID NO: 120071 - DNA, 807 bp, synthetic construct
  misc_feature 1..807: note = Description of Artificial Sequence: Synthetic coding sequence
  source 1..807: mol_type = other DNA
atgggactctctccctctgcgccagctgtcgccgtgcaggcaagcaacgcttccgcctcgcccccaagcggttgtcccatgcatgaggggaagatgaaggggtgccctgttaatacagaaccttctggcccgacctgtgagaaaaagacctactcagtgccagctcatcaggaacgggcctacgagtatgttgagtgcccgatacgagggacagcagctgagaacaaggaaaatcttgatccatccaaccttatgccccctccgaaccagacgcccgcccctgaccagcctttcgcactgtccaccgtccgggaggaatcaagcatcccacgggcagatagcgaaaaaaaatgggtgtacccctcagaacagatgttctggaatgcaatgctcaagaaaggctggaaatggaaggacgaggacatctcccaaaaagatatgtataacattatccgaatacacaaccagaataatgaacaggcttggaaagagattctgaaatgggaggcattacacgccgctgagtgcccttgtgggccttctctgattcgattcggcggaaaggctaaggagtactcacccagagctcggattaggagctggatgggctacgagttaccatttgatagacatgattggattataaataggtgcggtaccgaggtacgctatgtaattgattactatgacggcggggaagttaacaaagactaccagttcaccatcctagacgtgcggcccgctttggacagcctgtccgctgtttgggaccgtatgaaggtggcttggtggcgatggacaagttag

SEQ ID NO: 120072 - DNA, 1008 bp, synthetic construct
  misc_feature 1..1008: note = Description of Artificial Sequence: Synthetic coding sequence
  source 1..1008: mol_type = other DNA
atggataatgcacggatgaactcgtttctggaatatccaatcctctcttctggcgacagcggaacttgctctgcacgggcgtatccatcagatcacaggattactacatttcagtcttgtgccgtaagcgcaaactcttgcggtggggacgatcggtttctcgtgggcagaggcgtccagatcggatccccgcatcaccaccaccatcatcatcacagacatcctcagccggcaacatatcagacttccggcaacctcggtgtgtcctactcccatagcagttgtgggccatcctacgggagccagaatttttctgccccttacagtccatacgctctgaatcaagaagctgatgtgtcaggagggtacccacagtgtgcgcccgctgtgtactctggtaacctctcctctcccatggtccaacaccaccatcatcaccaaggatatgcaggcggggctgttggctctccacagtacatacaccactcttacggacaagagcaccaaagcttggccctagcgacttacaacaactcactgtcgccgctacatgctagtcaccaggaagcctgccggtctccggcctccgagaccagcagccctgcacagacatttgactggatgaaagttaagcgaaatccacccaagaccggcaaagtgggagagtatggttatctgggccagccaaatgctgtccggaccaatttcacaaccaaacagttgaccgagctggaaaaggagttccacttcaataaatatctaacccgggcacgccgggtggagatcgccgcctctctccagcttaacgaaacacaggtcaaaatctggttccagaaccgacgaatgaaacagaagaaacgcgaaaaggaagggctgttgcccatcagccctgcaacaccaccgggaaacgatgaaaaggctgaagaaagctctgaaaagagctcatcctccccctgtgtgccgagcccagggtcatctaccagcgatacgcttactacaagccactag

SEQ ID NO: 120073 - DNA, 414 bp, synthetic construct
  misc_feature 1..414: note = Description of Artificial Sequence: Synthetic coding sequence
  source 1..414: mol_type = other DNA
atggataatgctaggatgaactcttttctagagtatccgatactcagttcgggcgactctggcacatgtagcgctagggcctatccttcagatcatcgcatcacaactttccagtcctgcgcagtgtcagcaaattcatgtgggggggatgataggttcctggtgggacgcggagtacagatcggaagcccccaccatcatcatcaccatcatcaccgccacccgcaaccggcgacctatcagacctcgggcaacctgggagtttcctactcccactcaagttgtgggccctcctacgggtcccagaacttttccgccccatacagcccctacgccctgaaccaggaggccgatccacccaggtcattgtctctaccacgcattggggatatattctcatccgcagacttctag

SEQ ID NO: 120074 - DNA, 1233 bp, synthetic construct
  misc_feature 1..1233: note = Description of Artificial Sequence: Synthetic coding sequence
  source 1..1233: mol_type = other DNA
atgagtgctcggaaaggctacctgctccctagtcctaactatcccactacaatgtcatgtagcgagtcccctgcggctaactctttccttgtagattctctgattagcagcggacggggggaagctggtggggggggtggcggggcaggaggcggtggtggcggtggatattatgcacacggaggcgtatatctcccaccggcagccgacctcccttatggtttacaatcatgcggactatttcccactctcggaggcaaacggaatgaggccgcttcacctggcagcggcggtggcggtgggggcctggggcccggtgcccatggctatggtccaagtccaatagatctgtggcttgacgccccaaggagttgtcggatggagccacccgacgggccacctccacccccgcaacaacaaccacccccaccccctcagcccccacaacccgctcctcaggccactagttgctccttcgcccagaacatcaaggaagaatcatcctattgtttgtatgactcggccgataagtgcccaaaggtttcagccacagctgccgagttagcaccatttcctcggggtccaccacctgatggctgtgcgctaggcacatctagtggtgtgcccgtgcccggatatttccgactctctcaagcgtatggaaccgctaaaggctatggatccgggggagggggcgcgcagcaattgggagctgggcccttccccgctcaacctcctggccgtggtttcgacctcccacctgcccttgcttccggcagtgctgacgctgctcgcaaggagcgagcacttgactcccccccccctccaactttagcctgcggtagcggtggaggtagccagggggacgaggaggctcatgccagctctagcgcggctgaggaactctcccctgccccatccgagtcttccaaggccagccccgaaaaggattccctgggcaacagtaagggggagaacgcagccaactggctaacggcaaagtcgggcaggaaaaagcggtgtccttacacaaagcaccagactcttgagctggagaaagagtttctgtttaacatgtacttgaccagagagagacgactcgagatttccagatctgtacacctgacagatcggcaggtgaagatctggttccaaaatcgccgtatgaaactcaagaaaatgaatagggaaaatcgcattagagagctgaccgcaaattttaacttcagctag

SEQ ID NO: 120075 - DNA, 609 bp, synthetic construct
  misc_feature 1..609: note = Description of Artificial Sequence: Synthetic coding sequence
  source 1..609: mol_type = other DNA
atgtcgtgcagcgagagcccggccgctaatagctttctggtggactcccttattagctctgggcggggggaagcaggagggggaggcggtggagcagggggggggggcgggggagggtactacgcacatggaggggtttacctgcctccagccgcagatctgccgtacggtctgcagtcatgcggccttttccccactctcggtggcaaacggaatgaggcggccagtcctggaagcggcgggggtggaggaggcctcgggccgggtgctcacggctacggacctagcccgatagatctgtggctggatgccccacgatcatgtagacgacgcgccgcaacgagaggttggcccgtgcctagggctgctcccggagcaagatttaggagcccagccagggccagcttaagacttgggcgctgtggccccgagggggcatcgccaaggttcgccgcggccccacacgccgggctccggcaacgccgtggcctagcaggcagaaggggcggcgccagagtcgtgttgggaagagggggggccttgcctggcccatttagagagcaacagagccttgccggagagggtttcccaggccagtttcagcgatag

SEQ ID NO: 120076 - DNA, 285 bp, synthetic construct
  misc_feature 1..285: note = Description of Artificial Sequence: Synthetic coding sequence
  source 1..285: mol_type = other DNA
atgtgccaggggaatagcaaaggcgaaaatgcggccaactggctgaccgccaaatcagggcgtaagaagcgttgcccctacacaaagcatcagacactggagctcgagaaggagtttttgtttaatatgtacttaacgcgcgagcgccgtctcgagatctcaagaagcgtgcatctgactgacagacaggtcaaaatctggttccaaaaccgaaggatgaaactgaaaaagatgaaccgtgagaataggatcagggagctgaccgccaatttcaactttagttag

SEQ ID NO: 120077 - DNA, 942 bp, synthetic construct
  misc_feature 1..942: note = Description of Artificial Sequence: Synthetic coding sequence
  source 1..942: mol_type = other DNA
atggacttcgacgaacgcggaccttgttcttccaatatgtaccttccatcctgcacctactatgtgtctggacccgatttttccagcctgccatcatttcttccccagaccccaagtagtcgccctatgacctatagctactcaagcaatctcccccaagtgcaaccagtgcgggaggttacttttagggaatatgccatcgagcccgccaccaagtggcatcctcgggggaatttagcgcactgttattccgcggaagagctggtgcatagggattgtcttcaagccccaagcgctgcgggtgttccaggtgatgttttagcaaagagcagcgcaaatgtgtaccaccatccaaccccagcagtgtcttctaacttctacagcacagtcgggagaaacggtgtgctgcctcaggcttttgaccagtttttcgaaacagcctatggtactccagaaaatttggcgtcctcagactatcctggggacaaatcagccgagaagggccctcctgccgccactgctacatcagcagcagccgctgccgctgcaaccggggccccggccacctcatccagcgactcaggaggcggggggggctgtagagaaacagcagctgctgccgaagaaaaggagcggcggcggagacccgagagcagttcatcacctgaatcttcatcaggtcacactgaggacaaggccggaggttcaagcgggcagaggactcggaagaaacgctgcccttacacgaagtatcagattcgagaactggagcgggaattctttttctcagtatatatcaataaggaaaagagactgcagctgagcaggatgcttaaccttacagatagacaagtgaagatttggttccagaatcggaggatgaaggagaaaaagatcaaccgggaccggctacagtattactcagccaatccactgctgtag

SEQ ID NO: 120078 - DNA, 918 bp, synthetic construct
  misc_feature 1..918: note = Description of Artificial Sequence: Synthetic coding sequence
  source 1..918: mol_type = other DNA
atggctcgtgaagattctgtgaagtgcttgcggtgccttttatacgccctcaacttactcttttggctgatgtccattagtgttctggctgttagcgcatggatgagggactatctgaataatgtcctgaccttgacagctgaaacaagggtagaggaagcagtgatactgacttattttccagtggtgcatccagtgatgattgcagtttgttgtttcctgatcattgtgggcatgctgggttattgcggaaccgtgaaaaggaacttgttattgctcgcctggtacttcggttctctgttagtcatcttttgcgtcgagctggcatgtggggtgtggacatacgagcaggagctcatggttccagtacaatggtctgatatggtgactctgaaggcgcgcatgaccaactatggcctgcctaggtatcgatggctgacacatgcttggaattttttccagagagagttcaagtgctgtggggtcgtgtacttcaccgactggctcgagatgacagagatggactggcctcctgactcatgctgcgtgcgggaattccctggatgttctaagcaagctcatcaggaagacctctcagatctttatcaagaaggttgtgggaagaagatgtacagcttcctgcgcggcacgaagcagctgcaggtgcttcggtttctaggcattagcattggagtgacgcaaattctggctatgatcctcaccattacactcctctgggccttatactacgaccgcagagagcctggcactgaccagatgatgtctctcaagaatgataacagtcagcacctgtcatgcccctctgtcgaacttctgaaaccttctctgtcaagaatcttcgaacatacctctatggccaattcctttaacactcattttgagatggaggaactgtag

SEQ ID NO: 120079 - DNA, 489 bp, synthetic construct
  misc_feature 1..489: note = Description of Artificial Sequence: Synthetic coding sequence
  source 1..489: mol_type = other DNA
atgggactggagacggaaaaggctgatgttcagctatttatggacgacgattcttactctcatcactcgggattagaatatgcagatcccgagaaattcgccgattcagaccaggaccgggatccacataggctcaacagtcatctaaagctgggatttgaagacgtgatcgccgaacccgtgacaactcactctttcgacaaagtgtggatctgttcgcatgcactctttgagattagtaagtacgtgatgtataagtttctgactgtgtttttagccatacccttggcattcattgccggaattctattcgcaaccctctcatgcctgcatatatggatcctaatgccattcgtcaagacatgccttatggtgttgccatctgtgcagactatttggaaatccgtcactgatgtaataatagctcccttgtgcacatccgtggggcgatgcttctcttccgtgtcacttcagttgagccaggactag

SEQ ID NO: 120080 - DNA, 963 bp, synthetic construct
  misc_feature 1..963: note = Description of Artificial Sequence: Synthetic coding sequence
  source 1..963: mol_type = other DNA
atgaccatgtcttcatttttaatcaatagcaactatatcgaacccaaatttccacctttcgaggaatatgcacaacacagcggtagcggcggggccgatgggggccccggagggggtccgggctaccagcaaccccccgccccacccactcagcacctgcctctgcagcaaccacagcttccgcacgccggtggtggacgggagcctaccgcttcctactacgccccccgcaccgctcgggaacctgcataccccgccgccgctctctatcctgcccatggagctgccgatacggcctatccctacggatacaggggcggagcctcgcctgggcggcccccccaaccggagcaacccccagcccaggccaaaggccccgcccatggcttgcacgcctcacatgtgctccagccacagcttccacctccgctccaaccacgcgccgttccacccgccgctcctcgacggtgcgaagccgcacccgctacaccaggagttccggctggggggtctgcacccgcatgtcccctattactcgctgataagtcacctctagggttgaagggtaaagaacctgttgtttatccatggatgaagaagattcacgtatctgccgtcaaccctagttacaatggcggcgagcctaaacgtagtagaactgcttacaccaggcagcaggtgctcgaacttgaaaaagagttccattttaacagatatcttacgcggcgtcgtcgcatcgagatagcacacaccctgtgcttatctgagcgacaagtgaaaatttggtttcagaacaggcggatgaaatggaagaaagaccataagctacccaataccaagatgagaagcagcaactccgccagtgcttccgctggcccacctgggaaagcccagacacagtcccctcatctgcaccctcacccccatccctcgacatcaacacctgtgccctcttctatctag

SEQ ID NO: 120081 - DNA, 963 bp, synthetic construct
  misc_feature 1..963: note = Description of Artificial Sequence: Synthetic coding sequence
  source 1..963: mol_type = other DNA
atgactatgtcttcattcctcatcaattccaattacatagagccgaagtttcccccattcgaagagtatgcccagcactcgggcagtggaggtgctgacggagggccaggtggcgggccagggtaccagcaaccacctgcaccaccaacgcagcacctgcccctccagcagccacagttacctcatgcaggtggcggtcgcgaacctacagctagctactacgcgccaaggactgctcgcgagccagcctatcccgccgcagcactctaccccgcccacggcgcagctgatactgcttacccctatggatatcgtggaggagcttcaccaggaagacctcctcagcccgagcaacctccggcacaagccaagggtcccgctcacggcctgcacgcttctcatgttctgcagccccaattacccccacctctgcaacctcgcgcggtgccaccagccgccccccggcggtgcgaggctgcacccgctactcccggggtgccagccggggggtccgctccagcatgccccctgttgctggcagataagtcacccctggggctgaaggggaaagagcccgtggtgtacccttggatgaagaagattcacgtgagcgccgttaacccttcatacaacgggggggagcctaaaagatcccgcacagcgtatacgcggcagcaggtgctagaactggagaaagaattccactttaaccgctatttgaccaggaggaggcgcatcgaaatcgcccacacactgtgcctgagcgagaggcaggtgaagatctggttccagaaccggcgcatgaaatggaagaaggaccataagttacccaacaccaagatgcggtctagtaatagcgcttctgccagtgccgggccacctgggaaagcccagacacagtcccctcacctccaccctcatcctcatccaagtacatctacccctgtgccaagctccatctag

SEQ ID NO: 120082 - DNA, 1140 bp, synthetic construct
  misc_feature 1..1140: note = Description of Artificial Sequence: Synthetic coding sequence
  source 1..1140: mol_type = other DNA
atgcttaagcgttgcggaagacgcttgctcttagccctggccggagctctcttggcatgtctcctggtcctcactgccgatcctccacctccgcctctgcccgccgagcgggggcgaagggcattacggagcctggccggcccggcaggtgccgcccctgccccggggctgggagcagctgccgccgcacccggggctctggtgagagatgtgcattccctgtccgaatacttctcactgctcacacgcgcccgacgcgatgcaggcccacctccaggggcggccccacgcccagctgatgggcatccacgacccctggctgaacctctggcaccacgcgacgtctttatcgccgtcaagacaacaaaaaagttccaccgtgcccggcttgacctcctgctggaaacatggattagcaggcacaaagaaatgacgtttattttcaccgacggcgaggacgaggcactcgcgagacatacaggcaacgtagtgataacaaactgctctgcggcccacagcaggcaggctctgtcatgcaagatggcggtcgaatatgataggtttatcgagtccgggagaaaatggttttgtcatgtcgatgatgacaattatgtcaatctgcgcgcactgcttcgactcctggcgtcataccctcacacacgggacgtgtacgtgggaaagccttcgctggatcggcctatccaagcgatggagagagtgagcgagaacaaggtcagacctgtgcacttttggtttgcaacagggggcgccggattctgcatttcccgggggctggcactcaaaatgtccccttgggccagcgggggccactttatgaacactgccgagaggatccgattaccagatgattgcactatcgggtacattgtcgaggccctgcttggagtcccactaatcaggagcggactgtttcacagccatctagagaacctgcagcaagtgcctacctcagaattgcacgaacaggtgaccctgtcatatggtatgtttgagaacaaacgcaacgcagtgcatgttaaaggccctttctcagtggaggccgacccctccaggtttcggtccatccattgccacctctatcctgacaccccttggtgccctcggaccgccattttttag

SEQ ID NO: 120083 - DNA, 813 bp, synthetic construct
  misc_feature 1..813: note = Description of Artificial Sequence: Synthetic coding sequence
  source 1..813: mol_type = other DNA
atgtcttcctatttcgtaaacagcttttgtggtcgctatcctaatggccctgactatcaactgcacaactacggggaccacagttctgtcagcgaacagtttcgtgattcggctagtatgcacagcggaaggtacggatatggatataatggaatggatctatcagttggtcggtcgggcagtggtcacttcggatcgggggagagggctcgatcctatgctgccagcgctagcgccgccccggccgagccccgatattcgcagccagcaacctccacccactccccacagccagaccctctaccttgttccgctgtcgcacccagtcccggaagcgattcacaccacgggggcaagaattccctgtctaactcatccggggccagtgcagacgccggcagtactcacatttcatcccgggaaggggtaggcacagcctccggagccgaggaggacgctcccgcctcttctgagcaagcatcagcgcagagcgagccatctcctgcccccccagctcaaccccagatttacccatggatgcgtaagctgcacattagccacgataatattggaggacccgagggaaagagggctcgcactgcttacacaaggtaccagaccttagaactggagaaggagtttcacttcaatagatacctgactaggcggagaagaatagagattgctcatgccttatgtctgtcagaaagacagatcaaaatctggtttcaaaaccggagaatgaagtggaaaaaggataataagttaaagagcatgagcatggcagccgctgggggggcttttcgtccctag

SEQ ID NO: 120084 - DNA, 693 bp, synthetic construct
  misc_feature 1..693: note = Description of Artificial Sequence: Synthetic coding sequence
  source 1..693: mol_type = other DNA
atgtcttcaagctattacgtgaatgcacttttctcaaagtataccgccggagcaagtttgtttcagaatgccgaacctacctcttgcagcttcgcgcctaactcccagaggtcaggctacggcgctggtgccggtgcattcgcttctacagtcccaggcctgtataacgtgaacagccccttataccaaagcccttttgcctccggatacggtctgggggcagacgcctatggtaacctaccttgtgcttcatatgaccagaatatacccggactctgctctgatctggcaaagggggcctgcgacaaaacagacgaaggcgcccttcatggggcggctgaggcaaacttccggatttatccgtggatgcggtcaagtggcccagatcgcaaacggggcagacaaacctatactcgctaccagactctggaacttgaaaaagaatttcatttcaatcgttatcttacccgccgtcgaaggatcgagatcgctcatgctctttgcctgactgaacgccaaatcaagatctggtttcagaatagacgcatgaagtggaagaaagagcataaggatgagggacccactgcagcagctgctccagaaggggccgtcccaagtgccgctgccacagccgcagccgataaggcggatgaggaagatgacgacgaggaggaagaagacgaggaagagtag

SEQ ID NO: 120085 - DNA, 93 bp, synthetic construct
  misc_feature 1..93: note = Description of Artificial Sequence: Synthetic coding sequence
  source 1..93: mol_type = other DNA
atgtccagctcctattacgtgaacgctctttttagcaagtatacggccggtgcgagtctctttcaaaacgctgagccaacctcatgcagctag

SEQ ID NO: 120086 - DNA, 792 bp, synthetic construct
  misc_feature 1..792: note = Description of Artificial Sequence: Synthetic coding sequence
  source 1..792: mol_type = other DNA
caccactgggggggtaattattacgtagactcttttctgctgggcgccgatgcagcagatgaattatcagtgggcatgcgacgagggccctggccgcctagacaggccgccacgctggccgagcatcccgatttttctccttgctcctttcaatccaaggccaccgtgtttggcgcaagctggaatcccgtgcaccgagccccgaccctctaccctgtctaccaccatcatcaccatcatccctacgtacatccgcaggcccccgtcgccgccgctgcgccagacggccgatacatgcgatcttggctcgagccaacccctggcgctcttagtttcgcggggctacccagcagccggccatatggcattaagcctgaacccctgtccgcacggcgcggagactgtcctaccctggatacccatacactgagcctcaccgactatgcctgtggctccccacccgtggaccgtgaaaaacagccgtccgaaggggcgttcagcgaaaataatgccgaaaacgaaagcggaggcgacaagccacccattgaccccaacaaccccgccgccaattggctccatgctcggtccactagaaagaaaaggtgcccctataccaagcatcagacgctggagctcgagaaagagttcttattcaacatgtacctgacgcgagataggcgttacgaagtggcacgactgctcaatctaaccgagcggcaagtcaaaatttggttccagaaccgccgtatgaagatgaagaaaattaataaggaccgcgcgaaggacgaatag

SEQ ID NO: 120087 - DNA, 819 bp, synthetic construct
  misc_feature 1..819: note = Description of Artificial Sequence: Synthetic coding sequence
  source 1..819: mol_type = other DNA
atggcgacaacaggagcgctgggtaactattatgtcgatagcttcttattaggagctgacgccgcagacgaactgagtgtcggtagatatgctcccggcactttggggcagcccccacgacaagccgccaccctggctgagcatccagatttttctccctgctcctttcagagtaaggccactgtttttggtgcatcgtggaaccccgtgcacgctgcgggtgccaatgccgttcctgctgcagtctatcaccaccaccaccaccacccctacgtgcacccccaggctcccgtagcggcagccgcgcccgacgggagatatatgcgctcgtggctggagcctacccctggagcactgagtttcgcgggattgccctcttcacgcccttacggcataaagccggaaccactctcggcacgccggggagattgtcctacacttgacacccacaccctgagtcttaccgactatgcatgtggctctcctccagtggacagagaaaagcaacccagtgagggcgccttttcagagaacaacgccgagaacgaatctggcggtgacaagcctccaattgaccccaacaaccctgctgccaactggctgcatgctcggagcacacgcaaaaaacggtgtccttacaccaaacatcagactctagagttagaaaaggagttcttgtttaatatgtacctgacccgtgataggaggtatgaagtggcccgccttctcaacctgactgagagacaagttaagatatggttccagaatcgccggatgaaaatgaagaagattaataaggacagggctaaggacgagtag

SEQ ID NO: 120088 - DNA, 591 bp, synthetic construct
  misc_feature 1..591: note = Description of Artificial Sequence: Synthetic coding sequence
  source 1..591: mol_type = other DNA
atggcaggattctccccttggagacggagacaacgtagaagaagacggcgccgaagggcacgccagtcaagagccgcaccagaacttgtgggagacttggggtcctttctcctgctgggcagcacgtttctatctactgctcggcactgcttcattacgtcagtcgagatcgtatcccgatatctgtgtgcacggggttccggtcgtgctggccatcacggtcccggacgcgctagacccgctgttgcaacatccgccttccccgcgcaggaacctcgcgtgtttctcagatcagctctacctgccgggagactgagcccctccaccactcatttacacctggttaccgctgataaccccgccgcgaattggctccacgctcgctctactagaaaaaaaagatgcccttacactaagcaccagactttggagttggaaaaagaattcctgtttaacatgtacctgacaagagacaggcggtatgaagtagccaggctcttgaacttaaccgagcggcaggtgaaaatatggtttcagaatagaagaatgaagatgaagaagatcaacaaagatcgggctaaggacgagtag

SEQ ID NO: 120089 - DNA, 906 bp, synthetic construct
  misc_feature 1..906: note = Description of Artificial Sequence: Synthetic coding sequence
  source 1..906: mol_type = other DNA
atggactacaacagaatgaactccttcctggaatatccgctgtgcaatagaggcccgtccgcatacagtgctcactccgccccgacgagtttccccccaagcagtgcacaggcagtagacagctatgcctctgaaggcaggtacggaggaggactgtcaagcccagccttccaacagaacagtgggtacccagcccagcaaccaccaagtaccctgggcgtccctttccctagctccgcgccatcaggatatgctccagctgcctgctccccctcgtacgggccctcccagtactaccccctcggacagagcgagggggacggcggctactttcaccccagcagctacggagcacaactgggtggcctgagtgacggatacggtgcaggcggtgccggccccggaccttatccccctcaacaccccccatacggtaatgaacaaaccgcatccttcgcccctgcttacgcggatttgctgtccgaagataaggagactccatgcccctccgaaccaaatacacccactgcacgcacttttgactggatgaaagtgaagaggaacccgcccaagaccgctaaggtgagcgagccgggcctagggagtccctccgggctcaggaccaatttcacaactcgccagttaaccgaactggaaaaggagttccacttcaataaatacctttcacgcgctcggcgggtggagatcgcggcaactcttgagctgaacgagacacaggtgaaaatatggtttcagaacagaaggatgaagcaaaaaaagcgcgaaagagaagaaggaagggttccacctgctccccccggctgtcccaaagaagctgccggggatgctagtgaccagtctacctgtacgagccccgaagcaagccctagttctgtcacttcatag

SEQ ID NO: 120090 - DNA, 855 bp, synthetic construct
  misc_feature 1..855: note = Description of Artificial Sequence: Synthetic coding sequence
  source 1..855: mol_type = other DNA
atggaaccaggaaattatgccacacttgatggagccaaggacatcgaggggctgctaggagcaggtggaggccggaatctcgtggcccacagcccactaacctcccaccccgcagctcctaccctgatgcctgccgtgaattacgccccactcgacctccccggatcggctgagcccccaaagcagtgccacccctgtccgggagtgccacaggggacttcccctgctcccgtgccctacggctacttcggcggaggctactactcatgtcgagtctccagatccagcctgaaaccgtgcgctcaggctgccacattggctgcctaccctgctgaaacccccactgccggcgaggaatatccttcccgacctaccgaatttgcattttacccaggttacccaggcacgtatcagccgatggcttcatatcttgacgtgagtgtggtgcagacactcggtgcccccggggagccaaggcatgacagtctacttccagttgattcttaccaatcatgggccctcgccggcggctggaattcacaaatgtgctgccaaggggagcagaatccaccagggcccttctggaaagccgcctttgcagactcgagtggccaacaccctccagacgcctgtgcgtttcggaggggccgaaagaaacgcattccgtattctaagggccagctacgggaactagagcgagagtacgctgcaaacaaatttattaccaaagacaaacgtaggaagatttctgcagctacatctctgagcgaacgccagatcaccatttggttccagaaccggcgcgtgaaagagaaaaaggtcctggcaaaggtgaaaaacagcgcaaccccctag

SEQ ID NO: 120091 - DNA, 531 bp, synthetic construct
  misc_feature 1..531: note = Description of Artificial Sequence: Synthetic coding sequence
  source 1..531: mol_type = other DNA
cctagatgtcctcccgggccaagggtgccactagacgaacgggaggagatacgccaagaaactcaacccatcagacatgtgagtttcagtggcagactgaggaggtcaggcggcgttggcagccctgccgatggtctgggacgcaggctcgtcgcagctggacaggcagcccatgggcttcaccagcacgctgcagcaggcaccggtgaatttcactttaacaaatacttatgtcgaccaagaagggttgagatagcggctcttcttgatctcaccgaacggcaggtcaaagtgtggttccagaataggagaatgaagcacaaaagacaaacgcaacacagagaacctccagacggtgaacctgcgtgccctggggccctggaagacatatgcgatcccgctgaggaaccagcagcttctccggggggccctcttgccgggggggtggggagtcttttatcacctgcaggcggcggagccggaggtcttaagcgcggaccccccgccttctcaagaagcctgcgcgggtag

SEQ ID NO: 120092 - DNA, 1071 bp, synthetic construct
  misc_feature 1..1071: note = Description of Artificial Sequence: Synthetic coding sequence
  source 1..1071: mol_type = other DNA
atgaatttcgagttcgagagagagattgggtttatcaattcccagccaagcttagccgaatgcctgactagctttcccgcagtccttgagactttccagacaagttcgatcaaagaatcaactttgatcccccccccccctccatttgaacaaacctttcctagcctgcagcctggcgcatccacactgcaaagacccagaagtcagaagcgggctgaggatgggcccgcgctaccacctccgccccctcctccattgcctgcagctccccctgctccagagtttccttggatgaaggaaaaaaagagcgctaaaaaacccagtcagtccgccacttctccaagtcccgccgcctcagcagtgcccgcgagtggtgtcggaagtccggccgacggcctgggcctgcccgaagccggcgggggcggtgcaaggcgccttagaaccgcctatactaatacccagctgttggagctggagaaggaatttcatttcaacaaatatctgtgtcgtccgcgtagagttgagatagccgcacttctggacctgactgagagacaagtcaaagtgtggtttcaaaatcgccgtatgaaacataagcgccaaactcagcaccgggagccacccgacggcgagccggcttgccccggcgcactggaggatatttgtgaccccgctgaggagcccgccgccagtcccggcgggccttccgcgagtcgagccgcctgggaagcttgctgccatccaccagaggtcgtcccgggcgccttgagcgcagacccacggcccttggccgtcagactcgaaggtgcaggggccagtagcccaggctgtgctcttcgtggcgcaggcggtctggagccaggccccctccctgaggatgtgttttccggccggcaggatagcccttttcttcccgacttaaatttctttgccgccgactcgtgccttcagctatccgggggtctgtctccaagcctgcagggctcccttgactctcctgtgccatttagcgaggaggaactcgatttttttactagcactttgtgcgccatcgatttgcaatttccgtag

SEQ ID NO: 120093 - DNA, 1296 bp, synthetic construct
  misc_feature 1..1296: note = Description of Artificial Sequence: Synthetic coding sequence
  source 1..1296: mol_type = other DNA
atgcagaaagcaacatactatgataacgccgccgcagccctgtttggcgggtacagctcctaccctggctcgaatggattcggattcgatgtgccgccccaaccccccttccaggcggccacccacctggagggagattatcaacgttccgcctgtagtcttcagtccctggggaatgctgcaccgcatgcaaaatcaaaagaactcaacggatcttgtatgagacccggcttggcaccggagcctctatctgccccccctgggagcccaccaccaagcgctgcacctactagtgcgactagtaacagctccaacgggggcgggccgagtaagagcgggccacctaagtgcggacccggcaccaactcaaccttgactaagcagatcttcccttggatgaaggagagcaggcaaacctctaagctgaaaaacaacagtcccggtactgctgagggatgcgggggaggtgggggtggaggaggcggagggggctccgggggctccgggggaggcggaggcgggggaggaggcggagacaagagtcctccgggaagcgccgccagtaagagagccagaactgcttacacatcggcccagcttgtggagctcgagaaagaatttcacttcaatcgttatctctgcagacctcgccgtgttgagatggccaatttgttgaatctgtcagaaagacagatcaagatctggtttcagaatcgacggatgaagtacaaaaaagaccaaaaagccaaaggcctggctagttcctctggcggcccctcacctgccggctcaccaccacagccaatgcagtcaaccgccggatttatgaacgccctgcactccatgacaccttcctacgagagccccagccccccagcatttggaaaggcacaccagaacgcctacgcattaccttctaattaccagccgccactgaagggatgcggtgcgcctcaaaagtacccaccaacccccgcccctgagtacgaaccacacgtcctgcaggcgaacggcggtgcctacggcacccctaccatgcaaggcagtccagtctacgtgggcgggggggggtatgccgaccctctgccgcctcccgcagggccctccttatacgggctgaatcacttgtcccatcacccctccggcaatctggattataatggggccccccctatggcaccctctcagcaccatgggccttgcgagccgcacccgacgtatactgatttaagtagtcatcacgccccgccccctcaggggcgcatccaggaggcccctaaacttacacatctgtag

SEQ ID NO: 120094 - DNA, 900 bp, synthetic construct
  misc_feature 1..900: note = Description of Artificial Sequence: Synthetic coding sequence
  source 1..900: mol_type = other DNA
atgaaagaaagtcggcagaccagtaaactgaagaacaatagccccggtactgccgaggggtgcggaggcgggggtgggggtggggggggaggtggttccgggggctccggaggcggaggcgggggaggtgggggtggcgataaatctccacctggatctgccgcgagcaagagagcccggaccgcttacacttctgcccaactggtagagctggagaaggagtttcattttaatcgctacctctgtaggccccggcgagtcgagatggccaatctgctgaacctgtccgaacggcagatcaagatctggttccagaataggagaatgaagtacaagaaggatcagaaggccaaggggctggctagcagcagcggaggtccttctccggctggcagccccccacagcctatgcagtccaccgccggctttatgaatgctttgcatagtatgaccccttcttatgaatctccatcgccgccggcgtttggcaaggctcaccaaaacgcctatgctctcccatccaattaccagcctccactcaagggatgtggagccccccagaagtatcccccaactcctgccccagagtacgaacctcacgttctacaggccaatgggggcgcctacggcacccctaccatgcaggggtcccctgtgtacgtggggggaggaggctatgcagacccacttccgccgcccgccggcccttctctgtacggccttaatcacttgagtcaccacccaagtggcaacctggattacaatggagcacccccaatggcaccctcccagcaccacggtccctgtgaaccccaccccacctataccgatctttcctctcaccatgcgcctcccccccagggcagaatacaggaggccccaaagctaacacatctatag

SEQ ID NO: 120095 - DNA, 1296 bp, synthetic construct
  misc_feature 1..1296: note = Description of Artificial Sequence: Synthetic coding sequence
  source 1..1296: mol_type = other DNA
atgcagaaggcgacatattatgacaacgcggctgccgccctgttcgggggttattcctcttatcccggttctaacggttttggattcgatgttcctccacaaccgcctttccaggccgccactcacctcgagggggactaccagcgaagcgcctgctcactccagtcccttggaaacgcagcccctcacgctaagtcaaaagaactgaacggcagctgcatgagaccaggtctcgcacccgagccactgtcagcccctcctggaagtccacccccctctgcagctcccacatctgctacgtcaaattcctccaatggcgggggcccaagtaagtctggacctcccaagtgcggaccaggcaccaacagtactttgaccaaacaaattttcccatggatgaaggagtcgcgccaaacttcaaaacttaaaaataattcccctgggaccgccgaaggctgcggtggcggcggtggcgggggaggcgggggggggtccggaggctccggaggtgggggagggggcggcggcggcggagataagtcacctccaggatcagccgcttcaaagcgggcgagaaccgcttacacatccgctcagttggtggaactggaaaaagaattccattttaaccgatatctctgcagaccccgcagggtggagatggccaacctgctaaacttgagtgaacggcagatcaaaatctggttccagaataggaggatgaaatataagaaggaccagaaagcaaagggcctcgccagcagttctggtggacccagcccagccggctctccgcctcaaccaatgcagagtaccgctgggtttatgaacgcactccatagtatgactccatcttacgagtctccatctccaccagcctttggtaaagctcaccagaacgcctatgccctccctagtaactaccagccgcctctaaaaggttgcggagcacctcagaagtatccgccaaccccggccccagaatatgaaccccacgttctgcaggcaaatggaggcgcgtatggcacccccacaatgcaggggtcccccgtatacgtggggggtggtggatatgctgatccactgcccccgcccgcaggaccatccctttatggtctcaatcacctgagccatcatccaagtgggaacttagactacaatggcgctcccccaatggccccatcacagcatcacggcccttgcgagcctcatcccacctacactgatttgagctcccatcacgcacccccccctcaggggcgcatccaggaggccccgaagctcacccatctgtag

SEQ ID NO: 120096 - DNA, 1077 bp, synthetic construct
  misc_feature 1..1077: note = Description of Artificial Sequence: Synthetic coding sequence
  source 1..1077: mol_type = other DNA
atgagacccggcctcgcaccggagccactgtccgcaccaccaggatctccccccccttccgctgcgcctactagtgctacttccaatagtagcaatgggggaggaccatcgaagtcgggtcctccaaaatgtggacccggcacgaactccactctcaccaagcagatcttcccttggatgaaggaatcgcgccagacatccaaactaaaaaacaatagcccaggtacagccgagggatgcggagggggtggggggggcggtgggggggggggatctggcggatcaggaggcggaggaggagggggcggaggaggggataaaagtcccccagggtccgctgcgtccaaacgagctcgtaccgcctataccagtgcacagttggtcgagctggaaaaagagtttcactttaacagatacctgtgcagacccagacgagtggaaatggccaacctgcttaacttgagcgagcggcagattaagatatggttccagaatcggagaatgaagtacaagaaggaccagaaggccaagggtttggcatctagctccggaggcccatctcccgctgggagtcctcctcagcctatgcagagtacagcgggatttatgaacgcgctgcactcgatgaccccttcctacgagagtcccagtccacctgcattcggcaaggcccaccagaatgcttacgcattaccaagcaattaccagccacctttaaagggatgtggcgctccacagaagtatccgccaacaccagcccctgagtacgaacctcacgttctgcaagctaatgggggcgcctatggaactcctacaatgcagggcagccccgtttacgttggagggggtggctatgcagaccccctgcctccccctgctggaccctctctgtatggcctgaatcatctgagtcaccacccctctggaaacttggactataacggagcacctccaatggcccccagccagcaccacgggccatgcgaaccccaccctacctacacagatctctcgagtcatcatgctccccccccacaggggcggattcaggaagcgccaaaactgactcatctgtag

SEQ ID NO: 120097 - DNA, 1296 bp, synthetic construct
  misc_feature 1..1296: note = Description of Artificial Sequence: Synthetic coding sequence
  source 1..1296: mol_type = other DNA
atgcagaaagcgacctactatgataatgccgccgctgccctattcggcggctacagttcatacccaggttctaacgggtttggattcgacgtgccgccccagccaccatttcaggcagcaacccacctggagggcgactatcaacgctcagcttgttcgctccaaagcctggggaatgcggcaccccatgccaaaagcaaggagctgaacggaagctgtatgcgcccggggctggcaccagagcctctgagtgcccctccaggatctccgcctccctccgctgctccgacctctgccacatccaactctagtaatggcggcggtccctctaagagtggcccgcccaaatgcggacctggcaccaacagtacccttacaaagcagatcttcccatggatgaaagagagccgccagactagcaagttgaaaaataatagtcctggcacggctgagggatgcggtggcggcggcggcggtggaggtggcggtggctccggcggtagcggcggaggcggcggcggaggaggagggggagacaagtcccctcctggtagcgccgcatcaaagcgggctcgtacagcctacacaagcgcccagttggtggaacttgagaaagagtttcattttaatcggtacttatgcaggcccagacgtgtcgagatggcaaatctgttgaatctgagtgaacgccagattaagatctggtttcagaaccgtcgtatgaagtacaaaaaggaccagaaggccaagggtctggcttccagctctggaggcccatcacccgctggatcccccccccaaccgatgcagagcacggccgggtttatgaacgccctgcacagcatgacgccctcctatgaaagcccctcccctcctgccttcggtaaggcgcatcaaaacgcctatgccttgccgagtaactatcagccccctctgaaaggttgcggagccccacaaaagtacccgcccacacccgcgcctgagtatgaacctcatgtcctccaggccaatggtggagcctacggaacaccaaccatgcagggctcaccagtgtacgtgggtggagggggctatgccgaccctttacccccgcccgccgggccgtccctgtatggactgaaccacctgagccaccacccatccggaaaccttgattacaacggtgcgcctccaatggcaccatctcaacaccatggaccttgtgagcctcatccgacatacacagacctctccagccatcacgctccccctccccagggccggattcaggaggcgccaaagttaacccacctttag

SEQ ID NO: 120098 - DNA, 900 bp, synthetic construct
  misc_feature 1..900: note = Description of Artificial Sequence: Synthetic coding sequence
  source 1..900: mol_type = other DNA
atgaaagagagtcggcagacctccaaactcaaaaataattcccctggcacggctgagggttgcggtggcggtggtgggggcggaggaggaggcggatccgggggctccggaggtggcggaggaggcgggggcggtggtgataagtctccgcctggcagcgcagcaagtaagagagcccgcacggcctacactagcgcccagctggtcgaacttgagaaagaattccactttaaccggtatttgtgtcgtccaaggcgagtcgaaatggctaacctgctcaatctgagcgagcgacagattaaaatatggtttcagaatagaagaatgaaatataagaaagatcagaaggccaagggactggcctctagcagtggaggaccctccccggcaggctctccgccccagccaatgcaatctaccgccggctttatgaacgcgctgcacagcatgactcccagctatgagtccccctcaccaccggccttcgggaaagctcaccaaaacgcttatgctctgccatccaactaccagccgccactgaagggttgcggggcccctcagaaatacccccctacccctgcccctgagtatgaaccgcatgtcctacaagccaacggtggagcctatgggacaccgacaatgcagggctctccagtctacgtcggtggaggaggctacgcagatccattaccaccccctgcaggaccctccctgtatggtttgaatcacctgtcccaccatcccagcggtaatctggattacaatggggctccccccatggccccttcccagcatcatggcccctgcgaaccacacccaacctacactgatctgtccagccatcacgcaccccccccacaagggcgaatacaagaagccccaaaactgacgcatttgtag

SEQ ID NO: 120099 - DNA, 1077 bp, synthetic construct
  misc_feature 1..1077: note = Description of Artificial Sequence: Synthetic coding sequence
  source 1..1077: mol_type = other DNA
atgcgacccggactggctcccgaaccgctgtccgccccccccgggtcgccaccaccatccgctgcccctacatccgcaacaagcaacagctcgaatgggggcggcccttccaagtccggccctccaaagtgtggccctgggaccaatagtaccctgactaagcaaatttttccatggatgaaagaaagcaggcagacctcaaaactaaaaaacaacagtcctggcacggcagaagggtgtggtggggggggaggcggaggagggggcggaggcagcggcggatctggaggcggcgggggaggtggaggaggaggtgacaaaagcccacctggctctgctgcaagtaagagggcaagaactgcctacacgagcgcgcaacttgttgagcttgagaaggaattccactttaaccggtatctctgtaggccacgtcgggttgaaatggctaatctgctgaacttgagcgagcggcagatcaagatctggtttcagaaccgtaggatgaagtataagaaagatcagaaagccaagggactggcatcgagctcaggggggccatcaccagccgggtcccctccacaaccaatgcaatctaccgcaggattcatgaatgcgctgcatagcatgacgccatcgtatgagtcaccgtcacccccagcctttggaaaagctcaccagaacgcctatgcactgccgagtaattatcagccacctttgaagggctgcggggcccctcaaaagtacccaccaacacccgccccagaatacgagccacacgtactccaagcaaacggcggcgcttatggaaccccaactatgcaaggcagcccagtgtacgttggaggcgggggctatgccgaccccctccccccaccggccggtcccagtctgtatggcttgaaccatctgtcccaccacccgagtggcaatctggactacaatggagctccaccaatggccccctcacaacaccacggcccctgcgagccacatccaacctacacggacctctcaagtcaccatgcacccccaccgcagggaaggatccaagaagcacccaagcttacccatttgtag

SEQ ID NO: 120100 - DNA, 1296 bp, synthetic construct
  misc_feature 1..1296: note = Description of Artificial Sequence: Synthetic coding sequence
  source 1..1296: mol_type = other DNA
atgcaaaaagccacatactatgataacgccgccgcagctctttttggcgggtattccagctacccaggtagcaacgggtttgggtttgacgtacctccgcaaccccccttccaggctgcaacccacctggaaggggattatcagcggtctgcttgctcccttcaatcactcgggaacgccgctccacatgctaaaagtaaagagctgaatggctcttgtatgcgcccaggtcttgctcctgaaccgttatccgcccctccgggaagtccacccccctctgcagcccctacctctgcgacctctaactcttctaatggaggcggaccaagcaagagtggacccccaaaatgtgggcctggtacaaacagtactctgacgaaacagatcttcccatggatgaaagaaagtagacagacaagtaaactgaagaacaactcccccggaacagccgaaggctgtgggggcggggggggtggaggcggcgggggcgggagcgggggctcaggcggagggggcggggggggtggggggggagataagtctcctccggggagcgcggccagcaaaagggctcgtacggcttacacctcagcgcagttggttgagctcgagaaggagttccatttcaatagatatttatgccgaccaagacgggtggaaatggcgaacctgcttaacctttctgagcggcagatcaaaatctggtttcaaaaccgtcgcatgaagtataaaaaggaccagaaagctaaaggcctggcttcgagctcaggaggaccctctcctgctggttctccacctcaacccatgcagagtactgccgggttcatgaatgcgctgcattccatgacaccctcttacgagagcccttcacctcctgcgttcgggaaggctcatcaaaacgcgtacgcactcccatcaaattaccagcctcctctgaaagggtgcggtgccccccaaaaatacccaccaacccccgcgcccgaatacgagccacatgtgctgcaggccaacggaggagcctatggcacaccaactatgcagggctcacccgtctatgtgggcggcgggggctatgcagaccctctgcccccacccgcaggcccctctctctatgggctgaaccacctctctcaccacccctccggcaacctagactataatggcgcacccccaatggccccaagccagcatcatgggccttgtgagccccatccgacatataccgacctgtccagccatcacgctcctccaccccagggtaggatccaggaggccccgaagctgacccacctctag

SEQ ID NO: 120101 - DNA, 756 bp, synthetic construct
  misc_feature 1..756: note = Description of Artificial Sequence: Synthetic coding sequence
  source 1..756: mol_type = other DNA
atggctatgtctagttttctcattaacagtaattacgtcgatccgaagtttccgccttgcgaggaatactcccagtctgactacctgccctctgaccactcaccgggctattacgctggcggccagagaagagaatcgagctttcagccagaggccggttttggccgacgggcggcatgcactgtgcaaagatacgctgcttgcagagatcccggcccccccccccctccacctccacctccccctccccctcctcctccaggcctgtccccgagagcacctgcgccaccccctgcaggcgcactgctcccggagcctggacagcgctgtgaggccgtaagtagcagcccaccaccgccaccctgcgctcagaatcctctccatcctagcccaagtcacagcgcctgcaaggagcccgtggtttacccttggatgagaaaggtccatgtttccaccgtcaatccgaattacgccggcggcgagcccaagcggtccagaacagcgtatactagacagcaggtcttggagctagagaaagaattccactataaccgttaccttacccgcaggcggcgcgttgagatcgcccacgcactttgccttagcgaaaggcagattaagatctggttccagaacagaaggatgaagtggaaaaaagatcataagttacctaacacaaagatacgcagcggaggcgccgccgggagtgcaggagggccgccgggcaggcccaatggcggtccccgggccctatag

SEQ ID NO: 120102 - DNA, 810 bp, synthetic construct
  misc_feature 1..810: note = Description of Artificial Sequence: Synthetic coding sequence
  source 1..810: mol_type = other DNA
atgtcatcgtattttgtgaattccttcagcgggagataccccaatggccccgattatcagctccttaactacggatctggttctagtctgtccggaagttatagggacccagcagcaatgcatacaggttcctacggttataactacaacgggatggacctttctgtgaatcggagcagtgcttccagctcccatttcggcgctgtaggggagtcgtcgcgggcattccctgcacctgcccaggagcctcgcttccgtcaggctgctagctcttgtagtcttagctcccctgaatcgctgccctgtaccaacggggattcgcacggggcgaaaccatcagcgtcttctccttccgaccaggcgactagtgccagttctagcgctaatttcactgaaatcgacgaggcctctgcatcatcggagcctgaagaggccgcttctcaattatctagcccttccctagcccgcgctcaacctgagcccatggccacgtccaccgctgccccggagggtcagactcctcagatattcccttggatgcgaaagctccacattagccacgatatgacaggccccgatggtaagcgggcccggacggcctacactaggtaccagacactggaactggagaaagagtttcacttcaatagatatctgacccgtaggaggaggattgagattgcacacgccctgtgcctctcggaaaggcagattaagatttggtttcaaaacaggaggatgaaatggaaaaaagataataagcttaagtccatgagtctggcgactgctggcagtgcttttcagccatag

SEQ ID NO: 120103 - DNA, 1179 bp, synthetic construct
  misc_feature 1..1179: note = Description of Artificial Sequence: Synthetic coding sequence
  source 1..1179: mol_type = other DNA
atggccgcgctccgccagccccaggttgcagagctgctggcggaggctcgacgggcctttagggaggaattcggggccgaacccgagcttgcggtctccgcccctggaagagtgaacctcatcggtgagcacaccgattataaccagggccttgtcctgcccatggccctcgaattgatgacagtgttggttggatcgcccaggaaggatggcctggtgagtttactgacaacctccgagggtgcagatgagcctcagaggctgcagtttccgctcccaacagcacagaggagcttggagccaggtactccccgatgggctaactacgtaaagggtgtcattcagtattaccccgccgcccccctccctggattctctgccgtagttgtgagttccgtgcccctgggtgggggactgtccagttcggcttctctcgaagttgctacttacacttttctccagcagctgtgtccagattctggcactatcgcagcgagggcccaggtgtgccagcaggctgagcatagttttgccggaatgccttgtgggatcatggatcaatttattagcctgatgggacagaaaggtcacgccctgcttatcgactgccggtccctggaaaccagtctcgttccactgtccgatcctaaattggctgtgctgatcacaaatagtaacgtccgtcatagtttggcgtctagcgagtaccccgtccggagacgacaatgtgaagaggtggcaagagctctgggcaaagagtctcttagggaggtgcagctggaggagttggaggctgccagagatctagtgtccaaggagggcttccgcagggcccgtcacgtggttggtgagataagaaggaccgcccaggccgccgccgcgctgagacgcggagactatcgcgcatttggcagactgatggtcgaaagccacagaagtctgcgcgacgactacgaggtcagctgtcccgagctggatcagctggtcgaggcagccctggctgtgcctggtgtttacggatcaaggatgacagggggcggattcggaggttgcactgtcacgcttctggaagcatccgccgcccctcacgccatgcggcatatccaggagcactatggcggtaccgctacattctatctctctcaggcagcagacggcgcaaaagtgctctgtttatag

SEQ ID NO: 120104 - DNA, 675 bp, synthetic construct
  misc_feature 1..675: note = Description of Artificial Sequence: Synthetic coding sequence
  source 1..675: mol_type = other DNA
atgtcgtcttactttgtgaactcaacatttcccgtgacacttgctagcggccaggaaagtttcctcggacagctgcctctatatagttcggggtacgccgaccccctgaggcactaccccgctccctatgggccaggaccaggacaggacaagggcttcgccactagcagctattacccaccggctggggggggatatgggcgcgccgcaccttgcgattacggacctgcaccggcgttctatcgggagaaggaatcagcctgtgctttaagtggtgctgacgagcagccaccctttcaccccgagcctcgcaagtccgactgcgcccaggacaagtctgtattcggggagactgaagaacaaaagtgctccaccccagtgtacccctggatgcagagaatgaactcatgtaattcttcgagctttggaccaagcggtcgacgggggcgtcaaacttatacccgataccaaaccctggaactagagaaagaattccattacaaccgttacctgactagacgcaggaggatcgaaattgcacatgcactatgtctcacagagaggcaaatcaaaatctggtttcagaaccgaagaatgaagtggaaaaaggaatcgaaacttttgagtgcaagtcagctgagcgctgaagaagaggaggagaagcaggctgagtag

SEQ ID NO: 120105 - DNA, 654 bp, synthetic construct
  misc_feature 1..654: note = Description of Artificial Sequence: Synthetic coding sequence
  source 1..654: mol_type = other DNA
atgtcctctttatactatgccaatacgctattcagcaagtaccccgcgtcttcttcagtttttgcgactggggcctttccagaacagacctcatgtgcattcgcgtccaatcctcagcgtcctgggtatggcgctggtagcggggccagttttgcagcaagcatgcaggggttatacccaggcggagggggtatggcgggccagtctgccgccggcgtctacgcagccggctatggccttgaaccatcctccttcaacatgcactgcgcaccttttgaacagaatctgtctggggtatgccctggggattccgctaaggcggccggagcaaaggagcagcgcgacagcgatctggctgccgaatccaatttcaggatctacccgtggatgaggtcatcaggaactgacagaaagcgcgggcgccagacctacacaagataccagaccctagagctggagaaagaattccactacaatcgatacttaacacgcagaagaaggattgagatcgctcacacactatgcctcacagagaggcaaatcaaaatttggttccagaaccgaaggatgaagtggaagaaagagaataagacagcggggcccgggacaacgggtcaggatagggctgaggccgaggaggaggaggaggaatag

SEQ ID NO: 120106 - DNA, 87 bp, synthetic construct
  misc_feature 1..87: note = Description of Artificial Sequence: Synthetic coding sequence
  source 1..87: mol_type = other DNA
atgaagtggaaaaaggagaacaaaacagccggcccggggaccaccggccaagatagggcagaggctgaggaagaggaagaggagtag

SEQ ID NO: 120107 - DNA, 732 bp, synthetic construct
  misc_feature 1..732: note = Description of Artificial Sequence: Synthetic coding sequence
  source 1..732: mol_type = other DNA
atgtcatcgtacttcgttaactcccttttctccaaatacaagaccggagaaagccttcggccgaattactacgattgtgggttcgcccaggatctcgggggaaggcccacggttgtgtatggaccctcctccggtggatctttccaacatccaagtcagatccaggaattttatcacggccccagttctctgagtaccgcaccttatcagcagaacccgtgtgccgtggcatgccatggagatccggggaacttttatggatatgatcctcttcaacggcagtccctgttcggagcccaggatcccgatcttgtccaatatgcagattgcaagttggccgctgctagcggcctgggggaggaggccgagggtagcgagcagtccccctctccaacccagctgttcccttggatgcggccgcaggctgcagccggtcggcgcagaggtagacagacctactcgaggtatcagactctggagctcgagaaagagttcctgttcaacccttatctgacacgaaagagacggatcgaggtctctcatgcactggggttgacagaaaggcaggtgaagatatggtttcagaacagacgcatgaaatggaagaaggagaacaataaggacaagtttcctagcagcaaatgcgagcaggaggaactggagaaacagaaactcgagagggcaccggaggccgccgacgagggcgacgctcaaaaaggtgataaaaagtag

SEQ ID NO: 120108 - DNA, 753 bp, synthetic construct
  misc_feature 1..753: note = Description of Artificial Sequence: Synthetic coding sequence
  source 1..753: mol_type = other DNA
atgagcatctcagggacactgagttcttactacgtcgacagcataatcagtcatgagtctgaggacgccccccctgccaaatttccatctggccagtacgcgagctctcggcaacctggccatgccgagcatctcgaattcccttcctgtagctttcagcctaaggccccagtgttcggagcatcatgggccccactgtccccacacgcctctggtagtttgccctccgtctaccatccttatatccagcctcaaggcgtgccccctgccgagagccgctacctgcgtacatggttagagcctgcccccagaggagaggctgcaccggggcagggacaggccgccgtgaaggccgaaccgctgttgggcgcccccggggagcttctgaaacagggcactccagagtattcacttgaaactagtgcaggcagggaggccgtgctgtcaaaccaaagacctgggtacggagacaacaagatctgcgaaggatctgaagataaggagagacctgaccagaccaacccctcagcaaactggctgcacgcccgctcaagtcgtaagaaaagatgcccttacaccaagtatcagactctggagctggaaaaggagttcctgtttaatatgtacctgacacgcgatcgcaggcacgaagtcgcccgtctactaaatctctccgagcggcaggttaaaatttggtttcaaaaccggcggatgaaaatgaagaagatgaacaaagagcaaggcaaagaatag

SEQ ID NO: 120109 - DNA, 387 bp, synthetic construct
  misc_feature 1..387: note = Description of Artificial Sequence: Synthetic coding sequence
  source 1..387: mol_type = other DNA
atgtctatttccggcactctgtctagctattacgtcgacagcataatatcccacgagtccgaggatgcccccccggctaagttcccgtctgggcagtacgcctctagtcggcaaccaggtcacgccgagcatctcgagttcccatcttgtagcttccagcctaaggcgcccgtgtttggtgcatcctgggcgcccctgagtcctcatgccagtggctccctcccttctgtctatcacccgtatatccagcctcagggagttcctccagctgagtcaagatacctgcggacatggctggagccggcgccccgcggaggggcagctcaaacaggccacgcccgagttcaatttggtaatttcggcggacaggggggccgcgcagtatag

SEQ ID NO: 120110 - DNA, 1029 bp, synthetic construct
  misc_feature 1..1029: note = Description of Artificial Sequence: Synthetic coding sequence
  source 1..1029: mol_type = other DNA
atgacctgtccccgtaatgttacccccaacagttacgccgaaccactggccgcccccggcggcggtgaacgttatagccgcagcgccgggatgtacatgcagtcggggtcagactttaactgtggcgttatgcgcggctgcggtctcgccccatccttgagtaaacgggatgagggatctagtccctctctcgctctcaacacctaccccagctatctgtcccagctggactcctggggggatccgaaggccgcatataggctggaacaaccggtagggcgccctttgtctagttgctcatatccccccagtgtaaaggaggaaaatgtgtgttgcatgtacagtgccgagaagcgcgctaagtccggccccgaggccgctctgtactcccacccactccctgaaagctgcctgggcgaacacgaggttccagtaccctcttattatcgggcttcaccttcatatagtgctctcgacaagacacctcattgctctggcgcgaacgatttcgaagccccatttgaacagcgtgcctccttgaatcctcgggcggagcacttggaatccccccaactcgggggcaaggttagtttccccgaaactcccaagagcgacagccagaccccttccccaaatgaaataaaaaccgagcaatctctggccgggcccaagggcagcccatccgagagcgaaaaagagagagctaaggccgccgattccagtcccgacacaagcgacaatgaagctaaggaagaaatcaaagcagaaaacactacagggaactggctgacagccaaaagcgggagaaagaaacgttgcccatataccaaacaccaaaccctggagctagagaaggaattcctgtttaacatgtatttgacacgggagcgcaggctggagatctctaagacaatcaacctgacagacagacaggttaagatctggttccagaatcgacgcatgaagttgaagaagatgaaccgggaaaacagaatcagagaactgacttcaaacttcaactttacatag

SEQ ID NO: 120111 - DNA, 915 bp, synthetic construct
  misc_feature 1..915: note = Description of Artificial Sequence: Synthetic coding sequence
  source 1..915: mol_type = other DNA
atgttcaactcggtgaatcttggtaatttctgctcaccgtctcgcaaggaacgaggtgcagattttggggaaagggggagctgcgcaagtaacttgtacttgcccagttgcacgtactatatgcctgagttctccacagtaagctcatttctcccccaagccccttctaggcaaatatcctatccgtattccgcccaggtccctcctgtgagagaggtgtcctacggactggaacctagcggcaaatggcatcaccgcaactcttactcttcttgttatgccgccgccgacgaactgatgcaccgggaatgcctgccaccctccactgtcacagagatcttaatgaagaacgaaggtagctacggtggacatcaccatcccagcgcccctcatgccactccagccggtttttactccagtgtgaataagaacagtgtgcttccacaggcgtttgaccgtttttttgacaatgcatactgcggagggggcgacccacccgcagaacccccctgctccgggaaaggggaggccaaaggtgagcctgaagcgccacccgccagcggcttggcgtcaagagccgaggccggcgctgaggccgaagcagaggaggagaacaccaatccgtcttcgtcagggtccgcacacagcgtcgccaaagagccagccaagggtgcagcgcccaacgctccccggactcgaaagaaacggtgtccctatagcaagttccagatcagagagttggaacgtgaattttttttcaacgtctatatcaacaaggagaaacgattgcagctgtcacgcatgttgaacctgactgaccggcaggtgaaaatatggttccaaaacagaagaatgaaggaaaaaaagttatctcgagaccggcttcaatatttctcgggaaacccactcttgtag

SEQ ID NO: 120112 - DNA, 849 bp, synthetic construct
  misc_feature 1..849: note = Description of Artificial Sequence: Synthetic coding sequence
  source 1..849: mol_type = other DNA
atgggcgagcataacctacttaatccgggcttcgtggggccattggtcaacatacatacgggcgacactttctacttccctaactttcgcgcttccggcgcacaattacccgggctgccatctctgtcctacccccgcagagacaacgtctgttcactgagctggccgtccgccgagccttgtaacggatatccacagccgtatttggggtctccggtgagcctgaaccctccctttggccggacctgcgagctcgctagggttgaggacgggaaggggtattatagagaaccatgcgcggaggggggtggcggagggcttaagcgcgaagaaagaggacgtgatcccggcgccggaccgggagctgctctgttacccctggagccaagtgggcctccagctttggggttcaagtacgactatgctgcaggggggggaggaggcgacggtgggggtggagccggtcctccgcatgatccacccagctgccagtctctggagtccgacagcagcagtagcttgctgaacgagggcaacaaaggcgccggcgctggcgatcccggctctttggtgagtccgcttaatccaggtgggggccttagtgcatctggagctccttggtaccccattaattctagatctcgaaaaaagagaaagccatattctaagcttcagctcgccgaactggaaggagaattcttagtcaatgagttcatcacacggcagcgtagacgggaactgtctgaccggctgaacctgtcagatcagcaggtgaagatttggttccagaaccggcgcatgaaaaagaagaggctccttctacgggagcaggccctctcgtttttttag

SEQ ID NO: 120113 - DNA, 993 bp, synthetic construct
  misc_feature 1..993: note = Description of Artificial Sequence: Synthetic coding sequence
  source 1..993: mol_type = other DNA
atgacaactagtcttttgctgcacccacgctggcccgaatcccttatgtatgtatacgaagatagtgctgcggagagcgggatcgggggaggtgggggggggggaggcgggggaaccggaggtgccggagggggctgttctggggctagcccaggaaaagcgccatcgatggacggcctggggtcgtcctgtccagcctctcattgtcgggacctccttccccacccagtcctcgggagacccccggcaccactcggggccccccagggcgctgtttatacagatattcctgcacccgaagccgcacggcaatgcgcccctccacctgcacctcctacttcctcttcagccaccctcggatacgggtacccgttcggaggttcctattatgggtgcagactgtcgcataacgtgaatctgcagcagaagccatgcgcttaccaccccggcgataaatatcctgaaccctccggcgcattgcctggagatgatctgtcaagccgcgctaaggaattcgccttctacccttctttcgcatcatcctatcaggctatgccaggctatctggatgtgagtgtggtccccggcatttccggccatcccgagcccagacacgacgccctgattcccgtggaaggttaccaacattgggccctgtccaacggatgggattcacaggtatattgttccaaagaacagagtcagagcgcccatctttggaagagtcctttcccagacgtcgtgcctctccaaccagaggtttcatcctatcgcaggggtcgcaaaaaacgcgtaccatacacgaaggtccagctgaaggaactcgagaaagagtatgctgcttcgaagtttattactaaggaaaagaggaggagaatatcagcaactactaacctaagtgagcgacaggtgaccatttggttccagaacagacgggtcaaggaaaagaaggttgtaagtaagagcaaagcgccacacctacattctacttag

SEQ ID NO: 120114 - DNA, 795 bp, synthetic construct
  misc_feature 1..795: note = Description of Artificial Sequence: Synthetic coding sequence
  source 1..795: mol_type = other DNA
atgattatgtcgtcttacttgatggatagcaactacatagaccccaaattcccaccctgtgaggaatacagtcaaaacagctatatccccgaacactcccctgaatactacggccggacccgagaatccggatttcagcaccaccaccaggaactgtaccccccaccccctccgcgtccctcctatccggaacgccagtatagctgcacctctctgcaggggccaggtaacagtcgagggcacggcccggctcaggccggtcaccaccatcctgagaaatctcagtccctgtgcgaacccgcacccctaagtggagcgtcagcatctccatctccagcccctccagcgtgttcacagcctgcccctgaccatccaagctcagccgcctccaagcagcccattgtgtatccctggatgaagaagattcatgtgtccaccgtgaatcctaattacaacggcggtgaacctaaacggagtagaaccgcttataccaggcaacaggtgctggaactcgagaaagaattccactataatcgctacttgacacggagacggaggattgagattgcccacagtttgtgcctgtccgaacggcagataaaaatctggtttcaaaacagaagaatgaagtggaagaaagatcaccggctccctaataccaaggtgcgctcagcaccaccagctggcgcagcgcccagcactctgtcagcagcaacacccggcacctctgaggaccatagccaatccgcaacccctcccgagcaacaacgagccgaagatattacgcggctgtag

SEQ ID NO: 120115 - DNA, 795 bp, synthetic construct
  misc_feature 1..795: note = Description of Artificial Sequence: Synthetic coding sequence
  source 1..795: mol_type = other DNA
atgatcatgtcttcctacctcatggatagtaactatatagacccgaagtttccaccttgtgaggaatatagccagaacagctatattccggaacacagccctgaatactatggtaggaccagggaatcaggcttccaacatcaccaccaggaactttaccctccccccccccctaggccttcttaccccgaacgacaatacagttgcacatctctccagggtcctggcaactcacgtgggcacggacccgcgcaagccggccaccaccacccagagaagagccagtctctatgtgagcccgccccattatcaggtgcatctgcaagcccctcccccgccccccctgcctgcagccagcctgcacctgaccatccttcatctgcagcaagcaaacagcccatagtctatccctggatgaaaaagattcacgtgagcacagtcaaccctaactacaatggtggggaacctaagcggagtagaacagcctacacaaggcagcaggtgctggagttagagaaggaatttcattataatagatacttaaccaggagaagaaggatcgagatcgcccactctttgtgcctgagcgaaagacagattaaaatctggtttcagaataggagaatgaagtggaagaaggaccaccggctgcccaatactaaagtgcggagcgcccctcccgccggcgcggctcctagtactctctctgccgccacgcccggcacatccgaggaccatagccagtcggccacaccaccagagcagcagcgagcagaagacataaccaggctatag

SEQ ID NO: 120116 - DNA, 669 bp, synthetic construct
  misc_feature 1..669: note = Description of Artificial Sequence: Synthetic coding sequence
  source 1..669: mol_type = other DNA
atgagttcttatgtcgcgaatagtttctacaagcagtctcctaacattccagcgtataacatgcagacttgcggcaattacgggagtgctagcgaggttcaggcaagcaggtactgttatggtggattagatctatcaattacctttcccccccctgcgccctcaaattcattacacggcgtagacatggccgcaaatccgcgtgcgcacccagaccgtccggcctgcagcgctgcagcggcacctgggcacgctcccgggcgtgatgaagccgcacccttaaaccccggcatgtattcccagaaagctgcccggcctgcactggaagagagggccaagagctccggggaaatcaaagaggaacaagcccaaaccggtcaacccgctgggctgtcgcagccgccagcacctccacagatctatccatggatgactaagctccacatgtcgcacgagaccgatgggaagcggtctagaaccagttacactcggtaccagactcttgagctggagaaagaattccatttcaaccgatatctcactagacgccgccgcatagagatcgcaaacaatctgtgcttgaacgagcgccagataaagatctggtttcagaaccggcgcatgaaatggaagaaagactccaagatgaaaagtaaggaggccctatag

SEQ ID NO: 120117 - DNA, 708 bp, synthetic construct
  misc_feature 1..708: note = Description of Artificial Sequence: Synthetic coding sequence
  source 1..708: mol_type = other DNA
atgaacagctatttcaccaatccctcactttcttgccatctggcagggggacaagatgtgctgcctaatgtcgcccttaattctactgcctacgatcccgtaaggcatttcagcacctatggggccgcggtggcacagaatcgaatctactccacacctttttactctccacaggagaacgttgtgttcagtagctctagaggaccttacgattatggaagcaactctttttaccaggaaaaagacatgctgtcgaattgtagacagaataccctcggccacaatacacaaacttctattgcacaagattttagtagcgaacaagggaggaccgccccacaagatcagaaggcttccattcagatatatccttggatgcagagaatgaactcgcacagcggggtgggctacggtgccgatcggcggcggggtaggcagatttactctagataccagacgctcgaacttgagaaggagttccactttaatcgttatctgactcggagacgccggatagaaatagctaacgcactgtgtctgactgaacggcagattaaaatttggttccaaaatcgtagaatgaagtggaagaaagagtcaaatctaacgtctacgctgagcggagggggtggtggggccactgctgacagtttagggggcaaagaagaaaagcgggaggagactgaagaagagaagcagaaagagtag

SEQ ID NO: 120118 - DNA, 462 bp, synthetic construct
  misc_feature 1..462: note = Description of Artificial Sequence: Synthetic coding sequence
  source 1..462: mol_type = other DNA
atgctgtctaactgtaggcagaataccctgggccataacacccagactagtatagcgcaggattttagtagcgagcagggacgcacagctcctcaggaccagaaggcttcaattcagatttacccatggatgcagcggatgaacagccactccggtgttgggtacggggccgatcggcgtcggggaaggcaaatttacagtcgataccagactctcgagctggagaaggaattccatttcaataggtatctgaccagaaggagacggatagaaatagccaatgccctgtgtcttaccgaacgacaaattaagatatggttccaaaatagaaggatgaaatggaaaaaagaatctaatctgaccagcaccctgtccggagggggggggggagccacagccgattcactcggcggcaaagaagagaagagagaggagaccgaagaggaaaagcagaaggagtag

SEQ ID NO: 120119 - DNA, 159 bp, synthetic construct
  misc_feature 1..159: note = Description of Artificial Sequence: Synthetic coding sequence
  source 1..159: mol_type = other DNA
atgctgtccaattgcagacagaacaccttaggacataacacccagacctccattgcacaggatttcagttctgaacagggacggaccgctccacaggaccagaaggcctccatccagatatatccctggatgcagcggatgaactcccactcgggatag

SEQ ID NO: 120120 - DNA, 216 bp, synthetic construct
  misc_feature 1..216: note = Description of Artificial Sequence: Synthetic coding sequence
  source 1..216: mol_type = other DNA
atgctgtccaactgccggcagaatactctaggtcacaatacgcagactagtatcgcacaggattttagcagcgagcagggccggaccgcgccccaggaccagaaagcgtcgatccagatctacccctggatgcagcgtatgaactcacacagcgtctgcttcgtcccggggtccctcggtgtcgggtatggcgcggataggaggagaggacggtag

SEQ ID NO: 120121 - DNA, 729 bp, synthetic construct
  misc_feature 1..729: note = Description of Artificial Sequence: Synthetic coding sequence
  source 1..729: mol_type = other DNA
atgtcttcgtacttcgtaaaccccttatttagtaagtacaaagctggagagtccctggaaccagcttattacgactgtcggttccctcagtcagtgggacgctcccatgctctggtgtacggccctgggggtagcgctccgggtttccagcatgcatcacatcatgtccaggattttttccatcacggtacatcaggcatttctaattccggctatcagcagaatccatgttctctgagttgccacggcgacgccagcaagttctacggctacgaagcactgcctcggcagagcttatacggtgcgcagcaggaggcctccgttgttcagtatcccgattgcaagagcagcgccaacacgaactcctccgaggggcaagggcatctgaaccagaattcatcacctagcctgatgttcccctggatgcggccccatgctcccgggcggcggagcgggaggcagacttatagtcgctaccagacactggagcttgaaaaggagtttctcttcaacccatatcttacccggaagcggcggatcgaagtttctcacgcactgggcctgactgaaagacaggttaagatctggttccagaaccggcgcatgaagtggaagaaggaaaataataaagacaaacttcccggagctagggacgaagagaaggtggaggaagaaggaaacgaggaagaagaaaaggaggaggaggagaaagaggaaaacaaagactag

SEQ ID NO: 120122 - DNA, 783 bp, synthetic construct
  misc_feature 1..783: note = Description of Artificial Sequence: Synthetic coding sequence
  source 1..783: mol_type = other DNA
atgtccgccactggaccaatcagcaactattatgttgactccctgatttctcacgataacgaagacctcttagcttcccgcttccccgcgacgggggctcatcctgcagctgccagaccaagtgggctggtgcccgattgcagcgactttccaagctgttccttcgcacctaagcctgctgtgttcagcactagttgggcacctgtaccaagccagtcaagcgtggtttatcacccttacggtcctcagcctcacctaggcgctgacactcgctacatgcgcacttggctcgaaccactttcaggtgcagtgagtttccctagctttccggcagggggccgacactatgcgcttaaacccgacgcgtaccccggtaggagagctgactgtgggcctggggagggcagaagttatcctgactatatgtacggctcacctggtgaactgcgggacagggctcctcagaccctgccctcaccagaagccgatgcgctcgctggcagcaagcataaggaagagaaggcggacctcgacccatctaacccagtggcaaactggattcatgctaggagcacgaggaagaaaagatgcccctacaccaaatatcagactctcgaactagagaaggaattcttatttaacatgtacctgaccagagacagaaggtacgaggtggcgcgggtcttgaaccttacagaacgccaggtaaagatatggttccaaaataggcggatgaagatgaagaagatgaataaggaaaagacggataaagagcaaagttag

SEQ ID NO: 120123 - DNA, 783 bp, synthetic construct
  misc_feature 1..783: note = Description of Artificial Sequence: Synthetic coding sequence
  source 1..783: mol_type = other DNA
atgagcgccacgggccctattagcaattactacgtcgactccttgatcagccatgacaacgaggatctgctggcttccagatttccagcgaccggggctcaccccgccgcggccagaccaagcggtctcgtgcctgactgctcggacttcccctcctgtagcttcgcgcccaaaccagctgtcttctcgacttcttgggcgccagttccctcccagtcttcagtggtgtatcacccctacggtccacagccccacctcggagctgacacacggtacatgcgcacttggctagaacctctgtcaggagcagtctcctttccctcatttccggcgggcggaagacattatgccctgaaaccagatgcataccctggcaggagagccgactgcgggcccggagaagggaggtcgtaccctgactatatgtacggctcacctggcgaactccgcgacagggcaccacagaccctgccttcccctgaggcagacgcactggccggctctaaacacaaggaggagaaagctgatctggacccctccaacccagtcgcaaactggatccacgcccgttccactagaaagaaacgctgtccgtatacgaagtaccaaacactggagcttgagaaggagtttctctttaacatgtacctgacgcgtgacagaaggtacgaggtcgcccgggtgctgaaccttactgagaggcaggtgaagatctggttccagaacaggaggatgaagatgaagaagatgaataaggaaaagaccgacaaggagcaaagttag

SEQ ID NO: 120124 - DNA, 987 bp, synthetic construct
  misc_feature 1..987: note = Description of Artificial Sequence: Synthetic coding sequence
  source 1..987: mol_type = other DNA
atgtccagttacctcgagtacgttagttgttcctcaagtgggggggtaggaggtgatgtcctctccctagctccgaagttctgcagaagtgatgcacgaccagtggccctgcaacctgcgttccccttgggtaatggagatggggccttcgtcagctgcttacctttggccgctgccagaccttcaccctcacctcctgccgcccccgcccgaccttccgtccccccacctgccgcccctcaatacgcccaatgcacactcgagggagcttatgagcccggcgccgcaccagcagcagcagccggtggcgcagattatggcttcctgggtagcggtcctgcctacgactttcctggagtgcttggcagggcagccgatgatggtggaagtcacgttcattacgctacgagtgccgttttcagcggtggtggttctttcttgctgtcaggccaggttgactacgccgcttttggggagcccggcccatttccagcttgcctgaaagcctcggccgatggacatcctggtgcgtttcaaaccgcttcccccgctcccgggacctaccccaagtcggtcagccccgcatcagggctgcccgccgctttttccacctttgaatggatgaaggtgaaaagaaacgcaagcaagaagggaaagttggccgagtatggagcagcttctccctcgtcagccattcgcactaatttcagcaccaaacaattgactgagctggagaaggagttccactttaacaaatatctcaccagagctcgacgcattgaaatagcgaactgtttacacctaaatgacactcaggtgaagatttggtttcagaaccgtcgcatgaagcagaagaaaagggagcgggagggactgttagcaaccgctatcccagtggctccgttgcagttgcccctgtcgggaaccacccctaccaaatttattaagaatcctggatcgccctctcagtcccaggaaccctcatag

SEQ ID NO: 120125 - DNA, 630 bp, synthetic construct
  misc_feature 1..630: note = Description of Artificial Sequence: Synthetic coding sequence
  source 1..630: mol_type = other DNA
ctcgagcgtgcagccagagtcgagagagccggtggggcagcacagacagccgctgtcctcttgagcctctgccctgcaccgtactccggacccggattgaggccccacctggcctttgcccccggtcgcccacgggcagcagtgagaactgcttcagggcgcgcgcccgtgcgcgctgtccatccagggggcggcctccgaacctggtgtcgcacatgccgcgggagctggggaagaggcctgaggctcccgggggtcagagccggtgtgaggctacctggcagggctggggccggcggaccattccctgcctgcttgaaggcctccgctgacggacatccgggggcattccagactgcctctccagcacctggtacgtatcccaagtcagtgtctcctgcttcaggcctgccagcggcgttctccacatttgaatggatgaaagttaaacggaatgcctccaagaaagacagcggattggggttcgtagaagagacccgcagtcgggccaatagcatggaaagtgctagctctaccgattccgagaatgtgccaggaatcgagaagataagcggaagaagcagcccctggaactttagttggcagacccgccgggtgtgggggcggtag

SEQ ID NO: 120126 - DNA, 1023 bp, synthetic construct
  misc_feature 1..1023: note = Description of Artificial Sequence: Synthetic coding sequence
  source 1..1023: mol_type = other DNA
atgagtttcccaaattcatcgccggcagcaaacaccttcttagtggactcactgatttccgcatgtaggtcagactctttttacagctccagtgccagcatgtatatgcccccaccctctgctgatatggggacttatgggatgcagacttgcggccttctcccttctcttgcaaaaagggaggtaaaccatcagaacatgggaatgaatgttcacccatatatccctcaggttgatagttggactgaccctaaccgctcatgtcgaatcgaacagccagtgacacaacaggtacctacatgttcctttactactaatattaaagaggagtcaaactgttgtatgtacagcgataaaagaaacaagctaatctctgctgaggtcccctcgtaccagcgtctggtccccgagtcctgtcccgtggagaaccccgaggtgcctgtgcccggctactttcgactgtcacagacctatgccactggtaaaactcaagagtataacaactctccagaggggagctccaccgtgatgctccagcttaaccctaggggcgccgccaaaccacaactgtctgcagcccaattacagatggagaagaaaatgaacgagccagtctcgggccaggagcccactaaggtgtcccaggttgagtcacctgaggcaaaagggggactacccgaggaaaggagctgcctggcagaggtatctgtgtcctcacccgaggtgcaggagaaagaaagcaaggaggaaataaagagcgacacgcccaccagcaactggctaactgctaaatccggacgcaaaaaacgttgcccctacaccaaacatcagacgctcgaactggagaaagagtttctctttaatatgtacttaactcgagagagaaggttggagatatctaaaagtgtgaacctgactgatagacaggtcaagatctggtttcagaaccgacggatgaaattgaagaagatgagccgtgagaacaggatccgggaactgacagctaacttgaccttctcctag

SEQ ID NO: 120127 - DNA, 1017 bp, synthetic construct
  misc_feature 1..1017: note = Description of Artificial Sequence: Synthetic coding sequence
  source 1..1017: mol_type = other DNA
atgaatgattttgacgaatgcggccagagcgccgcatccatgtacctgcccggctgtgcttactacgtcgcgccatccgatttcgctagcaaaccaagcttcttgagtcaaccgtcaagttgccagatgacgttcccgtactcctccaatttagcccctcacgtgcagcctgtgcgggaagttgccttccgagactatgggttggaaagagcgaaatggccatatagaggtggcggcgggggaggctctgctggcggaggcagtagcggagggggccccgggggtggaggcgggggagctggcgggtatgcaccttattatgccgcagccgccgccgccgccgcagccgccgccgctgctgaggaagccgcaatgcagcgggagttgctgccacccgccggccggagacctgacgttctttttaaagcgcccgagcctgtatgtgcagcccccggcccaccccatggccccgccggggcagcgagcaatttttacagcgctgtcggcaggaatggcatccttcctcaggggttcgaccagttctatgaagcggctccaggacccccttttgcaggacctcagccccctccgcctccggcccccccccagccggaaggggccgccgataaaggggatcccaggacaggagcaggaggcggcggggggtcgccctgtacaaaggccactccgggcagtgagccgaagggcgccgcagaggggtccggcggcgatggggagggcccccctggcgaagccggggccgagaagtctagtagcgctgttgccccacagcggtccagaaagaagcgatgtccttataccaaataccagattcgggagttagagcgcgagttttttttcaatgtgtacatcaataaggagaagcggctgcagttgagccgaatgctgaatctgacggatcgtcaggtgaagatctggttccagaatcgcagaatgaaggaaaagaaattgaatagagacagactccaatatttcaccggcaaccccctgttttag

SEQ ID NO: 120128 - DNA, 480 bp, synthetic construct
  misc_feature 1..480: note = Description of Artificial Sequence: Synthetic coding sequence
  source 1..480: mol_type = other DNA
atgtacctaccaggttgtgcatactatgtggccccttccgattttgcttccaagccatccttcctgtcccagccgtcaagctgccagatgactttcccgtactcttcgaacctggcgcctgggggtggctccccatgcactaaagctaccccaggaagcgaacctaagggagctgccgaaggctccggaggcgatggcgagggccctcctggggaggcgggggcggaaaaaagtagctctgcggtagcaccacagaggtctcggaagaagcggtgcccttatacaaaatatcagattcgcgagctcgagcgtgagttctttttcaatgtttatattaacaaggagaaacgtctgcaacttagcagaatgctcaacctgaccgacaggcaggtgaaaatatggttccagaatcggcggatgaaagagaagaaattgaacagagatagactacagtacttcaccggcaatccactcttttag

SEQ ID NO: 120129 - DNA, 813 bp, synthetic construct
  misc_feature 1..813: note = Description of Artificial Sequence: Synthetic coding sequence
  source 1..813: mol_type = other DNA
atgtgcgagcggtcgttgtatcgggctggttacgtgggatccctgctgaaccttcagtcccctgacagcttctacttttccaacttaaggccaaatggcggacagcttgccgcgctgccccctatatcgtacccccgcggagctcttccatgggctgccacccccgcttcctgcgcaccagcccagcctgccggagccaccgctttcggcggattttcgcaaccttacctagccgggtctgggcccctggggcttcagccgccaacagctaaggacggtccggaagaacaggcaaagttctacgcccccgaagctgccgctggacctgaagagcgcggccgcacacgccctagcttcgcccccgagagttcactcgcccccgcagtggctgccctgaaggccgctaaatacgactacgccggcgtgggcagagcaactcctgggtctacaaccctgctccagggggctccatgcgctcccgggttcaaggacgacacaaaagggcctcttaatctgaatatgaccgtgcaagctgccggggtggcctcctgcctgcgaccttccttgccagacggactaccttggggcgcggcaccaggccgagctcggaagaaacgtaagccttacaccaagcaacagatcgccgagctggaaaatgagttcctggtcaacgagttcatcaaccggcagaaaaggaaggaactcagtaatagactgaacctctctgaccagcaagtgaagatttggtttcagaacaggcggatgaaaaagaaacgtgtagtgctacgggagcaggctctcgccctgtactag

SEQ ID NO: 120130 - DNA, 1299 bp, synthetic construct
  misc_feature 1..1299: note = Description of Artificial Sequence: Synthetic coding sequence
  source 1..1299: mol_type = other DNA
atgctttttgaacaggggcagcaggctctggagctgccagaatgcacaatgcaaaaggctgcatactacgagaaccccggactgtttggagggtatggctactccaaaaccactgacacctatggctatagcactccgcaccaaccttaccctcctcctgccgccgcctcgtctctagacaccgattacccgggaagcgcctgttctattcagtcatctgcccctctgcgggcgcccgctcacaagggtgccgagctgaatggctcatgcatgagaccaggcaccggaaattctcaggggggcggtggcgggtcacagccgccaggactgaactctgagcagcaaccgccccagccgccgcctccacctcctacactgccacccagcagtcctaccaatccaggaggtggcgtgcccgccaaaaaacctaaaggcgggcccaacgccagtagttcctcagccactatatctaaacagatctttccctggatgaaggagtccaggcagaacagcaaacaaaagaattcttgtgccacagctggggaaagttgcgaggacaagtcacccccgggtccagcatccaaaagagtacgcacggcgtatacatccgcacagctagtggaactggaaaaggaattccacttcaatcgttacctctgcagacctcgtagagtagaaatggctaacctcctgaaccttaccgaacggcaaattaagatctggtttcaaaaccgaaggatgaagtacaagaaagaccagaaagcaaagggaatactgcacagcccagctagtcagagtccggaaagatccccacccttgggaggtgcagccggccacgtggcctattcaggtcagttgccccctgtccccggcctggcttacgacgcaccatcgcctccggcgtttgctaagtcacagcccaacatgtatggcttggctgcctacaccgcaccactgtccagttgcctacctcagcaaaaacgatatgcagcaccggagtttgaaccacacccaatggctagcaacggcggtggctttgcatctgccaatctgcagggaagtccggtttacgtgggtgggaattttgtggaatctatggccccggcaagcggacctgtgttcaacttgggccacttatcccatccatcctctgcatctgttgactacagctgtgctgctcaaattccgggcaaccaccatcacggaccctgtgatccccaccccacctatacagatctgtctgcgcaccactcttcccagggcaggctacccgaagcacctaagctgacccatctgtag

SEQ ID NO: 120131 - DNA, 1299 bp, synthetic construct
  misc_feature 1..1299: note = Description of Artificial Sequence: Synthetic coding sequence
  source 1..1299: mol_type = other DNA
atgcttttcgaacagggacagcaagccctggagttgcccgaatgtaccatgcagaaggccgcctattacgaaaatcccggcttattcgggggctatggttactccaaaacaaccgacacatatggctacagtacacctcatcagccgtaccctcccccagctgctgcatcttctctcgatacagattatcccggcagcgcctgtagcatccagtcttcagcaccactgcgcgctcccgctcacaagggagccgaactgaacggaagttgtatgcgcccaggcactgggaactcccaaggcggcggtggtggatctcagccacctggactgaactcggaacagcaaccaccccagcctccacctcccccaccaaccctccccccaagttctccaaccaaccctggagggggcgttcccgcgaaaaaaccaaaaggcgggcccaacgctagcagctctagtgccacaatatcgaagcagatctttccatggatgaaggaaagtagacagaattcaaagcagaagaatagctgcgcgaccgccggtgagtcttgtgaggacaaatcaccgccagggcccgctagcaagcgcgtgcggacagcatatacgagcgctcagctggttgagctggagaaggagtttcacttcaaccgctatctctgtaggcctcggcgcgtagaaatggccaatctcctgaatctgacagagcggcagatcaagatatggttccaaaataggagaatgaagtacaagaaagatcagaaagccaagggaattctgcattcccccgcatcccagtcccctgagaggagcccgcctttagggggggctgccgggcatgtggcatactccggacagcttcctccagtgcccggtctggcctatgatgcccctagtcctcccgcatttgccaagagtcaacccaatatgtatggcttagctgcttacaccgccccattgagctcttgtttaccccagcagaaacgatacgcggcgcccgagttcgaaccccacccaatggctagcaatggggggggcttcgcatcagcaaacctgcaggggtctccagtctacgtgggaggaaactttgtcgagtcaatggctcctgcctctggcccagtatttaatctgggccatctcagccatccgtcctccgcttccgtggattattcatgtgccgctcaaattccaggaaaccatcaccatggtccttgtgatccccatccaacttatacagacctgtctgcacaccattccagtcaaggcaggctccccgaggctcctaagctcacccatctgtag

SEQ ID NO: 120132 - DNA, 303 bp, synthetic construct
  misc_feature 1..303: note = Description of Artificial Sequence: Synthetic coding sequence
  source 1..303: mol_type = other DNA
atgctcttcgagcagggacaacaagctctggaactgcccgaatgcaccatgcagaaggctgcctactatgagaacccagggttgtttggaggatacgggtattcaaagactaccgatacttacggatacagcactccccaccagccttacccgcctcctgccgctgcgtcctccctcgataccgactatcctgggagcgcttgtagcatacagagttccgccccactgagagccccagctcataaaggcgcagaactgaatggttcttgcatgcgcccaggcaccggcaactcgcagggatag

SEQ ID NO: 120133 - DNA, 1299 bp, synthetic construct
  misc_feature 1..1299: note = Description of Artificial Sequence: Synthetic coding sequence
  source 1..1299: mol_type = other DNA
atgctgttcgaacagggccagcaggccttagagctgcccgaatgtactatgcagaaggccgcttactacgaaaatccgggcttgttcggtgggtacggctactctaagactacggatacctacggatatagcacaccccaccaaccttatccccctccagctgcggcaagtagccttgacaccgactatcccggctccgcctgcagcatccagtccagcgcccccctcagagctcccgcccacaaaggggctgagttgaatggtagctgtatgcggcccggcaccggcaactcacagggaggcgggggcggttcgcagccccctggactcaacagcgaacagcagccacctcagccccctccaccacccccaacccttccaccctcctcccctactaatcccggcgggggcgtgcctgccaaaaagccgaaaggaggccccaacgcttcttcctcctctgctacaatctccaagcaaatttttccctggatgaaggaaagcagacaaaactcgaaacagaagaatagctgcgccacagcaggggaatcatgcgaggataaaagcccaccaggacctgctagtaagagggtgcgcacagcctacacctccgctcagcttgtagagctcgaaaaggaattccatttcaatcgctacctctgtagaccacggcgcgtcgaaatggctaacctgctgaatcttacagagcggcaaattaagatctggtttcagaaccgaagaatgaaatataaaaaagaccaaaaggccaaagggatcctgcattccccagcctcacagtcacccgagcgcagcccccctctgggaggggctgcgggacatgtggcatattcaggccaattaccgcccgttcccggtctcgcttacgatgccccttcaccccccgcttttgcaaaatctcagcctaatatgtacggtctcgccgcatacacagcaccgctctcttcttgcctgccccaacagaagaggtatgctgcaccagaattcgagccccatcccatggcctccaatggcggagggtttgcttccgcaaatttacagggctcgccagtctacgtgggaggcaactttgtggagtctatggcccccgctagcggtccggtcttcaacctcggacacctgagccatccttccagcgcctctgtagactactcctgcgctgcgcagataccggggaatcaccaccacggcccttgcgacccccacccaacatacacggacctgagcgctcaccatagctctcaagggaggctgcccgaagctccaaaacttacacatctttag

SEQ ID NO: 120134 - DNA, 768 bp, synthetic construct
  misc_feature 1..768: note = Description of Artificial Sequence: Synthetic coding sequence
  source 1..768: mol_type = other DNA
atggttatgtcatcttacatggttaatagcaagtacgtggaccccaagttcccaccctgtgaggaatatctccagggcgggtatctgggggagcagggagctgactactacggcggcggagcccaaggcgctgacttccagcctccagggctgtacccaaggcccgattttggcgaacagcctttcggaggctcaggacctggcccaggttcagccctgcccgcccgcgggcacggccaggagcccgggggccccgggggtcactacgccgcccctggcgaaccatgtcctgccccaccagccccgccgcccgcgcccctgcctggtgccagagcttattctcagtcagacccaaagcagccaccatccggcaccgcccttaagcaaccagccgttgtttatccctggatgaaaaaggtccacgtgaacagtgtcaaccccaactacacgggaggagaaccaaaaaggtccagaactgcttacactcgtcaacaggtgttggagcttgagaaggagttccattttaatcgttacttaacccggcggaggaggattgagatagcacatacgctgtgcctatcagaacggcagatcaagatatggttccagaaccgcagaatgaaatggaaaaaagatcacaagctcccaaacactaaaggacgatctagctcatccagcagttcaagctcctgcagctcaagcgtggcgccctcacagcatctccaaccaatggcaaaggaccaccatacagatctgacgactctctag

SEQ ID NO: 120135 - DNA, 873 bp, synthetic construct
  misc_feature 1..873: note = Description of Artificial Sequence: Synthetic coding sequence
  source 1..873: mol_type = other DNA
atgagttcatactttgtgaaccccctttactccaaatataaggctgccgccgctgctgcagccgctgctggagaagctataaatccgacctattacgattgccattttgctccagaggtgggtggtaggcacgctgctgccgctgctgctctccagctgtatgggaacagtgccgccggcttcccacacgcccccccacaggcacacgcccatccccatcctagccctcccccaagtggcacaggctgtggggggagagagggtcgaggccaggaatacttccaccccggaggcggcagtccggcagccgcgtatcaagctgccccgcctcctcccccacatcccccacccccacccccaccccctccctgcgggggcattgcctgtcacggtgaacctgcaaagttttacggatacgacaacttacaacgccaaccgatcttcacgacgcagcaggaagcggaactcgtccagtaccctgactgcaaatcttcctccggcaatataggcgaagacccggatcaccttaatcaatccagtagcccatcacaaatgttcccttggatgcgcccacaggccgcgcccggacgccggcggggccggcagacatactccaggtttcaaacccttgagctggagaaggaattcctcttcaatccctacctcacccggaaacgaagaatcgaggtatctcacgccttagctctcacggaaaggcaggtcaagatatggttccagaaccgaagaatgaaatggaaaaaggaaaacaacaaagacaagttccccgtaagccgccaagaagtcaaggatggcgagacgaaaaaggaagctcaggagctcgaggaggacagggcagaaggcctgaccaactag

SEQ ID NO: 120136 - DNA, 870 bp, synthetic construct
  misc_feature 1..870: note = Description of Artificial Sequence: Synthetic coding sequence
  source 1..870: mol_type = other DNA
atgtcttcttacttcgtgaaccctttgtatagcaagtataaggccgccgccgcggcagccgccgccgctggtgaagccatcaatcccacatactacgactgccactttgcccctgaggtcggcggaagacatgctgcagccgccgccgcccttcagctctatggtaattccgccgccgggttcccacacgcacctcctcaggcacacgcgcacccccacccatctcctcccccctcaggcaccggctgcggagggcgagagggacgaggccaagagtatttccaccccgggggtggatctccagccgccgcctatcaggctgctcctccgccgcccccccatcctcccccacctcctccaccgcccccttgtgggggaatcgcttgtcatggtgagccagcaaagttctacgggtacgacaacctgcaacgccaacccatattcacaacgcagcaggaggccgagctcgtgcagtatcccgattgtaaatcctcctctggaaacatcggcgaggatcctgaccacttaaaccagagctcttccccctcacagatgttcccgtggatgaggccccaggcgccgggccggagaaggggccgacagacctactctcggtttcagacattagagctggaaaaggagtttctgtttaatccgtacctaactcggaagcgcagaattgaagtatcccatgcactagccctgaccgagcgccaagttaagatttggttccagaatagaagaatgaaatggaagaaggagaataataaagacaaatttccggttagccgccaagaggtcaaggacggcgaaactaagaaggaagcccaggagctcgaagaggacagagctgagggactgaccaactag

SEQ ID NO: 120137 - DNA, 870 bp, synthetic construct
  misc_feature 1..870: note = Description of Artificial Sequence: Synthetic coding sequence
  source 1..870: mol_type = other DNA
atgagctcctattttgttaaccccctgtacagcaaatacaaggcagctgccgccgctgcagccgcagccggcgaggccattaatcctacctattacgactgtcattttgcccctgaagttggcggcagacacgctgccgctgcagccgccctccagctgtacggtaattctgcggcgggcttcccgcatgcacctccacaggctcacgcccatccccatccaagcccccctccttctggaacagggtgtgggggccgcgaagggcgggggcaggagtactttcatccaggtggcggcagccctgccgccgcataccaggcagctcccccaccccccccccatcctccaccaccacccccccccccgccatgtggtggaatcgcctgccacggggagcctgcgaagttttatggatatgacaacctgcagcgccagcctatctttaccacccaacaggaagccgagctggtgcaatatcccgattgtaagtcttcctccggtaacattggtgaagatcccgaccacctgaaccaatctagcagccctagtcagatgttcccctggatgagaccacaggctcccgggaggcgacgtggtcgccagacctactccagattccagactttagagcttgaaaaagagttcctgttcaacccatacctcacaagaaagcgccgtatcgaagtgagccatgccttggccttaaccgaaaggcaggtcaaaatttggtttcagaacaggcgcatgaaatggaagaaggagaacaataaagataagttccccgtgtcaagacaggaagtaaaggatggtgaaacaaaaaaagaggctcaagagcttgaggaggaccgcgctgagggtttgaccaattag

SEQ ID NO: 120138 - DNA, 321 bp, synthetic construct
  misc_feature 1..321: note = Description of Artificial Sequence: Synthetic coding sequence
  source 1..321: mol_type = other DNA
atgtttccctggatgcggccgcaggcggctcccgggcgacgtcgcggtcgtcagacctacagccgctttcagaccctcgaactggagaaggagttcttgtttaacccatatctgaccagaaagaggcgcatcgaagtctcccatgctctcgcgctgaccgagcggcaagtcaagatatggtttcagaaccgtcggatgaaatggaagaaggaaaataacaaggataagttcccagtgtctcggcaggaggtaaaagacggggagactaagaaggaggcccaagagttggaagaggaccgggcagaaggattaaccaactag

SEQ ID NO: 120139 - DNA, 1059 bp, synthetic construct
  misc_feature 1..1059: note = Description of Artificial Sequence: Synthetic coding sequence
  source 1..1059: mol_type = other DNA
atgttggggggatccgcaggccgtttaaaaatgagttcttctgggaccctttcaaattactacgtggactcactgattggacatgagggtgatgaggtattcgccgccaggtttgggcctcccggtccaggcgcccaggggcgacccgcgggcgtggccgacggacctgccgctacagcagccgaatttgcttcctgtagtttcgctcccaggtctgctgttttctcggcaagttggagcgcagtccctagtcaaccgcccgccgctgccgccatgtccggcttgtatcacccatatgtgccaccaccacctctagccgcatccgcttcagagccaggtcggtacgtacgatcttggatggaaccactgcccggattccccgggggggccggcgggggggggggcggcggcggcgggggacccgggcgagggccaagcccagggccaagcggacctgcaaacgggcgtcattacggcatcaaacccgaaacaagggccgcccctgcacccgctacagccgccagcactaccagctcgtcctccacctccctgtcaagttcttccaagagaacagagtgttctgtcgcccgcgagtcacaaggaagctccgggcctgagttttcttgtaattcttttctgcaggagaaggcagcggcagcgaccggcggaactggtcctggcgcaggcatcggagccgctacaggcacaggcggcagttcagagccctcggcttgcagcgaccaccccatccctggctgctccctgaaagaagaagaaaagcagcactctcagccacagcagcagcagcttgaccccaataatcctgctgctaattggatccatgcgaggtccactcgtaagaagcgatgtccatacaccaaatatcagacactcgaattggagaaagagtttctgttcaatatgtatttaaccagggatagaagatatgaggtggcaagaatactgaatctgacagaaaggcaggttaaaatctggttccagaaccggagaatgaagatgaagaagatgtctaaggagaaatgcccaaagggtgactag

SEQ ID NO: 120140 - DNA, 2757 bp, synthetic construct
  misc_feature 1..2757: note = Description of Artificial Sequence: Synthetic coding sequence
  source 1..2757: mol_type = other DNA
cttcagcccgtgtatgaatctatggcctcccacgtgcaggtattctctccccataccctgcagtctagtgctttctgttccgtaaaaaagctgaaaatcgaaccctcctccaattgggacatgactgggtatggcagccatagcaaggtgtattcccaaagcaaaaatattccactgtctcagccagccactacaactgttagtacctccctgcctgtgccaaacccttcgttgccctacgaacagaccatcgtcttccctggctcaacagggcatatcgtggttacatccgccagctctacctccgtgacgggacaagtgcttggagggccacataacctgatgcggcgctctacagtgtccctcttagacacctaccaaaaatgcggcctcaaacgcaaatcggaggagatcgaaaacacatcgtctgtacagatcatcgaggaacaccctccaatgattcagaataacgccagcggcgccaccgtggccaccgccacgactagcaccgcaacatcaaaaaactccgggtctaacagcgaaggggattatcagctggtccagcacgaagtgctatgcagcatgacgaatacctatgaggtgctcgagttcctggggcggggtacatttggacaggtggtgaaatgttggaagcgagggacaaatgaaattgtggcaataaaaattcttaagaaccacccaagctatgcccgacagggccagatcgaagtgtcaattttggcccgcttgagtaccgaatctgctgacgactataactttgtcagggcctacgaatgcttccagcacaagaatcacacttgtctggtctttgagatgcttgagcagaacttgtacgacttcttgaagcagaacaagttcagccctctgcccttaaagtacatcaggcccgttttgcagcaggttgcaactgctttgatgaagctgaaaagcctggggctcattcatgctgacctgaaacccgaaaatatcatgttagtcgacccctcccgtcagccttacagggtgaaggtgattgatttcggatccgccagccatgtttctaaggctgtgtgcagcacatatctgcagagcagatactaccgcgctccggagataatcctgggcctgccattctgtgaggcaattgatatgtggtcactgggctgcgtcatagccgagctctttctcggctggcccctgtatcctggggcctcagagtacgatcaaattcgctatatctcgcagacacaaggcctgccagcagaatacttacttagcgcaggaaccaagacgacccggttctttaaccgagataccgacagcccttaccctctgtggaggctcaagactccggacgaccacgaggctgaaactggaatcaagagtaaggaggctaggaaatatatctttaactgtctggacgatatggcccaagtgaacatgactaccgatctggagggttctgacatgttggtggaaaaagctgacaggcgggagtttattgacctactgaaaaagatgctgaccatcgacgccgataagaggatcactccaattgaaacattgaatcatccctttgtgaccatgacccacctcctagacttcccccacagcacgcacgtaaaatcttgcttccagaacatggaaatctgtaagcggagagttaacatgtatgacaccgtgaatcagtcaaagacaccctttataacgcatgtggcaccgagcaccagtacaaacctgactatgaccttcaacaaccaactgactacagtgcacaatcaggcaccaagctcaacctccgctactatttccctggccaacccagaggtgtccattctgaactacccaagcacactgtaccaacccagcgccgcttctatggctgccgtggcccagagatcaatgcctctgcagacgggcactgcccagatatgcgccaggccggatccatttcagcaggcgctgatcgtgtgtccacctggattccagggccttcaggcctctccctctaagcacgccggatatagcgtgaggatggaaaatgccgtgcccattgtcactcaggcaccaggcgcacaaccattgcagatacaacctggcctcctggctcagcaagcatggccttctggaacgcagcagatcctcctgccccctgcttggcaacagctgacgggcgtcgccactcacacaagtgtgcaacacgccaccgtgatccccgagactatggccgggacccagcagttagcagattggcgaaacacacatgcgcacggttcccattacaatcctatcatgcagcagcctgctttactgacaggccatgtgacgctgccagccgctcagcccttgaatgtgggggtggctcacgtaatgagacagcaacctacctccactactagctctaggaaatcaaaacagcaccagtcaagccagaggaagaacgtgatctcctgcgtgaccgtgcacgactcaccttacagcgattcctcttcgaatacaagcccttatagcgtgcagcagagggccggccataataacgccaatgctttcgataccaaaggaagcctggaaaaccactgtaccggcaaccctaggactatcatcgtgcctcctctgaagacacaggcttcggaggtgctggtagaatgcgattctttggttcccggcaacctgggacctggccagggccgcaatctcagcctcgagagcgggttccccgcattcctgctgctggaaatgctcctttacggatcctag

SEQ ID NO: 120141 - DNA, 3597 bp, synthetic construct
  misc_feature 1..3597: note = Description of Artificial Sequence: Synthetic coding sequence
  source 1..3597: mol_type = other DNA
atggctcccgtttacgagggcatggctagtcacgttcaggtatttagcccacataccctgcagtctagcgctttctgctctgttaaaaagctgaaaatcgagccctcctccaactgggacatgaccggctacgggtcccacagcaaggtctattctcagagcaaaaacattcccttgagccaaccggctacaactaccgtctcaacatctctgccagtccccaatcctagccttccctacgagcagaccatcgtgtttccagggagtacagggcatattgtcgtcacttccgccagcagcaccagcgttacaggtcaggtactgggcggccctcacaacctgatgaggcggtccacagttagcttgctggatacctatcagaaatgcggactgaagcgtaagagcgaggagatcgaaaatacctctagcgtccagatcattgaggaacatccaccaatgatccagaataatgccagcggagcgaccgtcgctactgctaccacgtccaccgccacctcaaagaacagtggtagcaatagcgaaggcgactatcagcttgtccaacatgaagtgctatgttccatgacaaacacatatgaggtgcttgagttcctggggaggggcacttttggccaagtcgtcaagtgttggaaaagaggaaccaacgaaattgtggccataaagattctcaagaaccatcccagctacgcccggcagggccagatcgaggtatccatattggcacgcctgtcaaccgagtccgctgacgattacaattttgtccgggcttacgaatgctttcaacataagaatcatacttgtttagtgttcgagatgttagagcagaacctgtacgattttctcaagcagaacaagtttagccccctgccacttaaatacattcggcccgttctgcagcaagtagctaccgccttgatgaagttaaagtcacttggccttatccacgctgacctgaagccagagaatataatgcttgtggaccctagtaggcagccatacagggtcaaggtcattgacttcggatctgcttcacacgtgagtaaggctgtatgctcaacttatctgcagagtaggtactatagagcaccggaaatcatcctaggcctcccattttgcgaggcaattgacatgtggtccctgggttgcgtgatcgccgagttgtttctgggttggcccttgtaccccggcgctagtgaatacgaccagataaggtacatttcgcagacacagggacttccagcagaataccttttgagcgctgggactaaaaccaccagattcttcaatagagatacagactccccgtacccactgtggcgcttgaagacacctgatgatcatgaggctgaaactgggatcaagtcaaaagaagcacgtaaatacatatttaattgtctggacgatatggcccaggtaaatatgactactgatcttgagggtagtgacatgctggtggaaaaagccgacagacgggaatttatagatctattgaagaagatgctgactattgacgccgacaagaggataacccccattgaaactctcaaccacccgtttgtgaccatgactcacttactcgacttcccccattccacacacgtcaaatcttgtttccagaacatggagatttgtaagcgccgcgtgaatatgtacgacactgttaaccagtcaaaaactcctttcattacccatgtggctcctagtacctcaaccaacttgaccatgactttcaacaaccaactgaccaccgtgcacaatcaggctccttcaagcacgagcgccaccattagtcttgccaacccagaggtctcgatactgaactacccctctaccctatatcagccttccgctgcctcgatggctgctgtcgcccagcgctccatgccactgcagactggcacagctcagatttgcgcccgccccgatccttttcagcaggctctgattgtctgtcctcctggttttcagggactccaggcgtcaccatcaaagcacgcagggtattctgtcaggatggagaacgctgtgccgattgtgacccaggcacccggggcgcagccattgcaaatccagccaggcctgctcgctcagcaggcttggccctctggcacccagcaaatccttctgccccccgcatggcagcaacttacgggggtggccacccacactagtgtccagcacgctactgtcatcccagagactatggctggcacccagcagctggctgactggcgaaacactcacgcacatggcagccactacaatccaattatgcagcagcctgcacttctgaccggccacgtcactctgccagccgcccagccattgaatgtgggcgtggcccacgtcatgcgtcagcagccaacttctactacctcttctcgtaagagcaagcagcatcagtcatcagtgcgcaatgtctctacttgtgaagtgtctagctctcaggcgattagttcacctcagcggtcaaagcgcgtgaaggagaataccccacctcggtgtgccatggtacactcctcaccagcttgcagcacatctgtcacatgtggatggggggacgtcgcgtcctcgactacacgagaacggcagcgccagaccatcgtcatccctgacactccaagcccaacggtgagtgtgataactataagttctgataccgatgaggaagaagaacagaaacacgccccgacttcaactgtcagcaagcagcgcaaaaacgttatctcctgcgttactgtgcacgatagtccttactccgattccagttcgaatacgagtccttactccgtccagcagcgcgcagggcacaataatgcaaacgcatttgacactaaaggctcactggaaaatcactgtaccggcaatcctcggactatcatagtccccccactcaaaacccaagcttccgaggtcctggttgaatgcgatagcctggtcccggtaaatacttcacaccactcttcctcgtataagagcaagtccagttctaacgttacaagtaccagcggccacagttcaggctcctcctccggcgcaattacatatagacaacagcgccccgggcctcactttcagcagcagcagccgctgaacctttcccaggcccagcagcatatcaccacagataggactgggtcgcaccgacgtcagcaggcatatatcacacctactatggctcaggcaccttatagctttccacataatagcccatcccacgggacagtgcatccacacttggctgctgcagccgctgccgcacacctgccgacccagcctcacttgtacacctacactgcccctgcggcactgggctctacaggcactgtggcgcacttagtagctagtcaggggagtgcccggcacacagttcaacacacagcctaccctgcctctattgtccaccaggtgcccgtaagtatgggtcctagggtactgccctctcccacgatccatcctagccagtaccctgcgcagttcgctcaccaaacttatatttcagcttcacccgcatccacagtgtatactggataccctctctctcctgcgaaggtgaaccagtacccatatatttag

SEQ ID NO: 120142 - DNA, 3516 bp, synthetic construct
  misc_feature 1..3516: note = Description of Artificial Sequence: Synthetic coding sequence
  source 1..3516: mol_type = other DNA
atggcccccgtctatgaaggcatggcttctcacgtccaagtattttccccacatacgctgcagagttccgccttctgttcagtcaagaaattgaagattgaaccctccagtaattgggatatgacagggtatggttcacactcaaaggtatactctcagtccaagaatattcccttaagtcagcctgctaccactaccgtgtctacttcattgcctgttcccaatcccagcctgccttacgaacaaactatcgtattccctggatccaccggccatatcgtagtgacgtctgcgagctccacatctgtgactggacaagttctgggcggacctcacaatctgatgagacgctctacggtctcccttctggacacataccagaaatgcggattaaaacggaaatctgaggaaatcgaaaacactagctctgtccagattatagaagaacacccaccaatgatacagaacaacgccagtggcgcgacagtggctacagctaccacatcaactgctacttccaaaaactcgggatccaattctgagggggattatcaactggtgcagcatgaagtgttgtgttccatgacaaatacctacgaagtgctggaattccttggcagagggaccttcggtcaggttgtaaagtgctggaaacgagggacgaatgagatcgtagcaatcaagatccttaagaaccacccatcttacgcccggcaaggtcagatcgaggtctctatccttgcacgactctcgactgagtctgctgatgactataattttgtcagagcttacgaatgttttcagcataaaaatcatacctgcctcgtgttcgaaatgctggagcagaacctgtacgactttctgaagcagaacaagttcagtccgctaccgcttaaatatattcgccccgtgctccagcaggtcgccaccgcactgatgaaactgaagtccctcggtctaatccatgctgacctcaagcctgagaacatcatgctcgttgatcccagcagacagccctaccgggtgaaagtaatcgacttcggatctgcgtctcacgtatcaaaggctgtgtgctccacctaccttcaaagcaggtactatcgagcacctgagattatcttgggtttaccgttctgcgaagctattgacatgtggagcctggggtgcgtcatcgctgagctcttcttaggatggccactttaccccggtgcctccgagtacgaccagatacgctatatctcacagacacagggcctgccagcagagtatctcctctccgctggaacaaaaactacacggtttttcaaccgagacactgacagcccctacccactatggagactgaaaactcccgacgaccacgaggcagagaccggcattaagagtaaagaggcccggaagtatatctttaactgcctagacgacatggcacaagtcaacatgaccaccgacctggaagggagcgacatgctggttgagaaagcagataggagagaatttatcgatctgctgaaaaagatgctgaccatcgatgccgacaagcgcattacaccaattgagaccctgaaccatccattcgtgaccatgacacatttgctagacttcccgcatagcacacacgttaagtcctgtttccagaacatggaaatctgcaaacggcgtgttaacatgtacgatactgtcaaccagagcaagaccccttttattacacacgtcgccccttccaccagcacaaacttgaccatgacctttaacaaccagctgaccacagtccataatcagcccagcgccgcctcgatggctgcggtcgctcagaggagcatgcccctccaaacaggaacagcgcagatctgcgctcgtcctgacccatttcagcaggcactaattgtgtgccccccaggatttcagggactccaggcatccccatctaagcacgccggatactccgttagaatggagaacgcggtcccgattgtaactcaggctcccggggctcagcccctgcagatacaaccgggcttactggcacagcaggcgtggcctagtggcacccagcagatcttgctcccccccgcttggcagcagctgacaggagtggccacccacaccagtgtacagcatgccacagtgattcctgaaaccatggctggaacacagcagctggccgactggcgcaacacccacgcccacggcagccactacaacccgataatgcagcaaccagcccttctgaccggacacgtaacacttcccgcggcccagcctctgaatgtaggtgttgctcacgtgatgcgccagcagccgacttcgacaactagttctagaaaatccaaacagcatcagagctccgtacgaaacgtgtctacctgtgaagtcagctcgagtcaggcaatcagtagtcctcagcgttccaagcgcgtgaaagaaaatacgccacctcggtgcgccatggtccatagttcccctgcctgctccacatcagtaacctgcggctggggtgacgtggcttcaagcaccacccgcgagagacaaaggcaaacgatagtgatcccagacaccccctctcctacagttagtgtcattacaattagcagtgacacggatgaagaggaggagcagaagcacgcccccacaagcactgtgtccaagcagcgaaagaacgtgatctcctgtgtaacagtccacgatagtccttattccgattctagctccaatacctccccatatagcgttcagcagcgagccggacacaacaacgctaacgcctttgacacaaaggggtccctggaaaatcattgtacaggaaaccctcgaacaatcatagttccacccctgaaaacgcaggcttccgaagtcctggtggagtgcgatagtttagtgccagtaaataccagccaccacagtagcagctacaagagcaagtcatcatcaaatgtgacatccacatccggtcacagctcagggagcagctccggcgctattacctataggcaacaaagacctggcccacactttcagcagcagcagccactcaacctgtctcaggctcagcagcatatcactacggacagaacaggatcccataggcggcaacaagcttatatcacaccaacaatggctcaggccccctacagtttcccacacaactctccatctcacggaacagttcatcctcatctggcggccgccgctgcagctgcacacctgcctacccaaccgcatctgtatacttatactgccccagcagcattaggttcaactgggaccgtggcgcatctcgtggcgtcccaagggtctgcgcgccatacagtccagcacaccgcctaccccgctagcattgtccaccaagtccccgtgtctatggggccaagggttctaccttcgccaaccatccatccatcacagtatcctgcccaattcgcccaccagacatacatttccgcttctcccgccagcacagtgtatacaggatatcctctgagccccgccaaggtgaaccagtatccatacatctag

SEQ ID NO: 120143 - DNA, 3648 bp, synthetic construct
  misc_feature 1..3648: note = Description of Artificial Sequence: Synthetic coding sequence
  source 1..3648: mol_type = other DNA
atggcgtcgcaagtgctggtatatccaccctacgtttatcagactcagtcctcagctttctgcagtgttaaaaaactcaaggttgagcccagtagttgcgtgttccaagaacgaaactacccacgcacgtacgtgaacggccgaaacttcggtaatagtcacccccccactaaggggtctgcttttcaaactaaaatccctttcaacagaccacggggccacaatttctcccttcaaaccagcgcggtcgtgctgaagaacacagcaggcgcaaccaaggtcatcgcagcacaggctcagcaggctcacgtgcaggcacctcaaattggcgcctggcgaaaccggttgcatttcctggagggccctcagcggtgtggcctgaaacgaaagtccgaagagctggataaccattcctctgccatgcaaattgtggacgagctatctatccttcctgccatgctacaaacaaacatgggcaacccggtgactgtagtcaccgccaccacagggtcgaaacagaactgcactaccggcgaaggtgattaccagctggttcagcacgaagtgttgtgctctatgaagaatacgtatgaggtcctcgattttcttgggaggggcacattcggacaagtggtgaagtgctggaaacgaggaactaacgagatcgtggcaattaaaattcttaagaaccacccgtcatatgcccgccagggccaaatcgaggtgtcaatcctggcccgactgtcaaccgagaacgccgacgaatacaattttgtgagagcatatgagtgcttccaacatagaaatcacacttgtttagtcttcgaaatgctggaacagaatctttacgacttcctcaaacagaacaagttctcacctctcccacttaaggtgatccgccccatcctgcagcaggttgcaaccgcgctgaagaagctgaagtcattagggctgatacacgccgatctcaagcctgagaacattatgctggtagaccccgttaggcaaccctaccgggtgaaagttatcgacttcggctcagctagtcatgtttcaaagaccgtttgtagcacatatttgcagagccgatactatagggcccctgagatcatcctcgggctccctttctgtgaagccatcgacatgtggtcgctgggatgtgtcatcgcagagctgtttctggggtggccactctacccaggtgccttagaatatgatcagatacgctacatatcacagacccagggcctacccggtgagcagctgctgaatgtgggaacaaagtcaactagattcttctgcaaagagaccgacatgtcccacagtggctggagactgaaaactctggaggagcatgaggccgagaccggtatgaagtctaaggaggctagaaaatacatatttaatagcctggacgatgtggctcatgttaatactgttatggaccttgagggcagcgacctccttgccgagaaggcagaccgtagagagtttgtctccctgttaaagaaaatgctgttgatagacgctgacctgcgtattacacctgctgagacactcaaccatcctttcgttaatatgaaacacctgctggattttccccactccaaccacgttaaatcttgtttccacatcatggacatctgcaagtctcacttgaattcctgtgacacaaacaaccacaataaaactagcttgctccgtcctgtagcgagctcttccactgccaccctgacagccaacttcactaaaataggcacattgcgaagtcaggccctgaccactagcgctcattctgtcgttcaccacggtattccccttcaggccgggaccgctcaattcggctgcggggatgcattccagcagacgctcataatttgcccccccgctatacagggtatacccgcgactcacggaaagcccaccagctactccattcgagtggacaatacagttccacttgtgactcaggcccctgccgtgcagcccctgcaaatcagacctggtgttttatcccaaacgtggtctggccgtacccagcagatgcttgtgccagcctggcagcaagttactcctctggcccctgccactacaacgctgacgtctgagagcgttgcgggctctcataggctgggtgactggggaaagatgataagctgttccaaccactacaatagcgttatgcctcagcctctcctgactaatcagattacattatcagcgccccagcctgtatccgtaggaatagcacatgtggtttggccacagccagccacaaccaaaaagaacaagcaatgccaaaatagaggaatcttggtaaagttgatggaatgggagcccgggcgggaggagattaatgcattttcctggagcaactccctgcaaaataccaacattccacactccgccttcattagccccaagatcattaacggaaaggatgtggaggaagtttcctgtatagagacacaggacaaccagaatagcgagggagaagcacgtaattgctgcgagacatccatcaggcaagattctgactcctcggtgtccgataagcaaaggcaaactatcatcatcgctgactcccccagcccagctgtgtcagtgattaccatcagttccgacaccgacgaagaagagaccagtcaaagacatagcctgcgggagtgtaaaggctctctggattgcgaagcctgccagagtaccctgaatatcgacagaatgtgctctctgagcagccccgactctacgctctctactagttcaagcggtcagagctctccctcaccttgtaaacggcctaattctatgtctgacgaggagcaagagtcaagctgcgatactgtagatggcagccctacctcagactcatctggacacgatagcccttttgccgagagcacattcgtggaggacacgcatgaaaatacagaactggtttcttctgccgacacggaaactaagcccgcagtttgttctgtcgtcgtgccccccgtggagctagagaatggtctgaatgccgatgaacacatggccaacaccgactcaatatgccaacctttgattaagggccgttcagcccccgggaggctgaatcagcccagtgctgtgggtacacggcaacagaaactcaccagtgcgttccagcaacagcacctgaacttttcgcaggtgcagcattttggatcaggtcaccaggagtggaatggcaattttggccaccgccgacagcaggcatacattcctacaagtgttacctctaatccttttacgttgtcccatggatccccaaaccatacagctgtgcacgcacatctggcgggaaacacccacttgggaggccaacctaccctgctcccttatccctctagcgccacattgagttccgccgcgccagtcgcacacctgctcgccagtccttgtacctcccggcccatgttgcagcacccaacctataacatttcccacccatctggaatagtccaccaggtccccgtgggtctcaacccgcgcttgcttccctctcccaccatccaccaaacccaatacaagcccatcttcccaccacattcttacatcgccgcctcgccggcgtacacagggttccccctatcacctacaaagctgtcacagtatccctacatgtag

SEQ ID NO: 120144 - DNA, 3585 bp, synthetic construct
  misc_feature 1..3585: note = Description of Artificial Sequence: Synthetic coding sequence
  source 1..3585: mol_type = other DNA
atggcgtcccaagtgctagtgtacccgccttacgtctaccaaacgcagtcctcagctttctgttcggtcaaaaaattgaaagtggagcccagttcgtgcgtctttcaggagcggaattacccccgcacttatgtaaacggacgcaactttgggaactctcatcctcctactaagggaagtgctttccagactaagataccattcaatcggccacggggccataactttagcttgcagactagcgcagtggtccttaagaataccgccggtgccacaaaggtcatcgctgcgcaggctcagcaggcccacgttcaggcacctcagatcggcgcttggagaaacaggttgcatttcttagaggggccgcagcggtgtggcctaaaacgcaaatccgaggagctggacaatcatagttccgcaatgcagattgtcgatgagctcagtatactccccgctatgctgcaaaccaacatgggaaatcccgtcacggtggttaccgccaccacaggcagcaagcaaaattgtactactggggagggcgactaccagcttgtgcagcacgaggttctgtgttctatgaagaatacctatgaggtgcttgactttctcgggagaggcaccttcggtcaggttgtgaaatgctggaaacgagggaccaatgaaattgtggccataaagatcctcaaaaaccatccatcttacgcgagacaggggcagatcgaggtatccatcctggcaagattatccacggagaacgcagatgaatataatttcgtacgggcttatgaatgcttccagcaccgaaaccacacatgcctggtgttcgaaatgctggagcaaaatctttacgatttccttaagcagaataagttttcaccactgccactcaaagtgatcagaccgatactccagcaagtggccactgcactgaagaagctgaaatctttagggctgatacacgctgacttgaaacctgaaaacatcatgctggtggaccctgtgcgacagccttacagggttaaggttattgacttcgggagtgcatcccatgtatcaaagaccgtgtgttccacctacctgcaatcccggtattacagagcccctgaaatcatcctaggccttcctttttgtgaagccatagacatgtggtctctgggctgtgtcattgcagagttgtttcttgggtggcccctgtaccctggggctctcgaatatgaccagattaggtatatctcccagacgcaggggcttccaggagagcaactgttgaacgtagggaccaaaagtacccgattcttttgcaaagaaaccgatatgagtcactccggatggagactcaagaccctagaagagcacgaggctgaaacaggtatgaaatccaaggaggcccgaaaatacatatttaattcactcgacgatgtcgcccacgtaaatactgtgatggaccttgaggggagcgatctgttggccgaaaaagcggacaggagagagtttgtgtcactcttgaaaaaaatgctgttaatcgatgctgatctgcgaatcacacccgcagagacactgaaccaccccttcgtaaacatgaaacacctactggattttccgcacagcaaccatgtaaagtcatgttttcacattatggacatttgcaagagccatctgaactcatgcgatactaacaaccataacaagacaagcctattgaggcccgttgctagttcatccactgccacattgaccgcaaactttacaaagatcggtactttgaggtcccaagccttgacaacatctgcacattctgtggtccaccacgggatcccactgcaggctgggacggcgcagttcggctgtggtgacgctttccaacagaccctaattatttgtcctcccgctattcaaggaattcccgcgacacatggaaagccaacttcatattccatcagggtggacaatactgtgcctctggtgactcaggcccccgctgtgcagcctctgcagatacgtcctggcgtattgtcacagacatggagtggacgtacgcaacagatgctggttcccgcctggcagcaggtgacgcccctggcccccgccactacgactctaaccagtgagtccgtcgcgggctctcacaggcttggcgactggggcaagatgatttcgtgctccaatcactataactccgtcatgccacagcctttgctcaccaatcagatcacactcagtgcccctcagccggtctctgtgggcattgcccacgtggtttggccacagccagctacaaccaaaaagaacaagcagtgtcagaatcgctcaaatagcctacaaaacactaatatcccacatagcgccttcatcagcccaaagattatcaacggaaaggatgttgaggaagtctcatgtatcgagacgcaggataaccagaactcagagggcgaggcccgcaactgctgcgaaacatctattagacaggattctgattcttctgtttcagacaagcagcgacagaccatcatcattgcagactccccctccccagctgtttcggttataaccattagctccgatacagacgaggaagagacgagtcaacggcacagcctgagggaatgtaagggcagcctggattgcgaagcctgtcaaagcactctgaatattgaccgcatgtgtagcctctcgagccccgactcaaccctctcaacttcatcgtctggccaatccagcccatcaccatgcaaacggcctaattcaatgagtgacgaagagcaggagagttcatgtgacacggtggacggatcccctacatccgactctagcggacacgattccccttttgccgaatctaccttcgtggaggatactcatgagaacacagagctagtatcctctgctgatacagaaactaaaccggctgtgtgctcggttgttgtgcctccggtggagctcgagaacggactgaatgcagatgaacacatggccaataccgactccatttgccagccactgatcaaggggaggagtgctcccgggcggttgaatcagccttccgctgtaggaacccgacagcagaaactgacgagcgcatttcagcagcagcacctcaacttctcccaggtgcagcatttcgggagcggccaccaagagtggaatggtaacttcgggcaccgaagacagcaggcttatatccctacgtccgtgacgtccaatccgttcaccttgtctcatggctccccaaatcatactgcggtacatgctcacctagccgggaatactcacctaggaggccaaccaacacttctgccttatccctcaagtgcaacattatcaagcgctgctcccgtggcccacctgttggccagtccctgcacaagccggccaatgctgcaacaccctacatacaacataagccatccaagcggaattgtgcaccaggtgcctgtgggcctgaatccgcggctgttgccgtcccctaccattcatcagacgcagtataaacccatctttcctcctcatagctacatcgctgcgagccccgcgtataccggattccccctctctccaacaaaactctcgcaatatccttatatgtag

SEQ ID NO: 120145 - DNA, 3585 bp, synthetic construct
  misc_feature 1..3585: note = Description of Artificial Sequence: Synthetic coding sequence
  source 1..3585: mol_type = other DNA
atggcgagtcaggtgttagtgtatccgccctacgtgtatcaaacacagtctagcgcattctgttcagtgaagaagttgaaagtggagccaagcagctgcgtctttcaggagcgtaattaccctagaacttacgtaaacgggcggaattttggcaacagccacccccctacgaagggctccgcatttcagaccaaaatcccattcaacagaccccgcggccataacttttctttacagacctcggctgtggtgctcaaaaacaccgccggtgctactaaagtgattgcggcacaagcacaacaggcacacgtgcaagcccctcaaattggggcctggaggaacaggcttcatttcctggaaggcccgcagagatgcggtctgaaaaggaagtcagaggagctggacaaccacagttccgctatgcagatcgttgacgagctatccatacttcctgccatgctccagacaaacatgggaaacccagttaccgtggtgacagcaacaacagggtccaaacagaactgcaccacgggtgagggggattatcagctggtccaacatgaggtcttatgcagcatgaagaacacatatgaagttttagattttctcggacgcggtacattcggccaggttgtgaagtgttggaagcgcggaaccaatgaaatagttgctattaagattctgaagaaccaccccagttacgcccgacagggtcaaatcgaagtctccattctggctcggctgtcgacagagaatgccgacgaatataatttcgtgagagcgtatgaatgtttccagcatagaaaccacacctgtcttgtcttcgaaatgctggaacaaaacttgtacgactttctcaagcagaataagttcagccctttacctctgaaggtgattcgccccattctgcaacaggtggccaccgctcttaagaaattgaagtcactgggcctcattcacgccgacttaaagcccgagaacattatgctggtcgaccccgtccgacagccttatcgtgttaaagtcatcgacttcgggagtgcaagccacgtgtccaaaactgtctgctccacatacctccagtccagatattaccgcgccccagagattatcttggggctgcccttctgcgaggcaatcgacatgtggagtttgggctgtgtgatcgccgaactttttcttggctggcctctatatccaggcgcgttagaatacgaccagatacgttacatttcacaaacgcaggggctgcccggcgagcagctgctgaatgttggcacgaaaagcacccggttcttttgcaaagaaaccgacatgagccacagcggatggaggctgaaaactctggaagaacacgaagcggaaactgggatgaagtccaaggaagccagaaagtacattttcaacagcctcgacgacgtggcccacgttaataccgtgatggacctggagggttccgatctgctggcagaaaaggctgatcggcgcgaatttgttagtctgcttaagaagatgctgctgattgatgcagaccttaggatcacccctgctgagacattaaaccacccctttgtcaacatgaaacaccttctggattttccccatagcaaccatgtgaaaagttgctttcacataatggacatctgtaaaagtcacctgaatagttgcgataccaataaccacaataagacctcgttactgaggccagtggctagctcctcaactgccactttgactgcgaacttcaccaagatcggtactctacggtcccaggcgttaacgaccagcgcacatagcgtggtgcaccacggaatccccctacaggcaggaaccgcacagttcggctgtggtgatgccttccagcaaactctgatcatttgtcctcccgctattcaaggcataccggcaactcatggcaagccgacatcttactcaattagagttgacaatactgtgccactggttactcaagccccggctgtccagcctttgcaaatcagaccaggagtactgtcccaaacttggtcgggccggacccagcagatgttagttcctgcatggcaacaggtcacgcccctggcccctgcgacaactaccttgacaagtgaatcagtagccggctcacacaggctgggagactggggcaaaatgatctcttgcagcaaccattacaattccgtgatgccacaacctctcttaaccaatcagatcactctaagcgccccccagcctgtctcggtgggcatagcccacgtagtgtggcctcagcctgcaacaacaaaaaaaaacaaacaatgccagaaccgcagcaactcactgcagaatacaaacatcccacattccgctttcattagtcctaagattattaacggcaaggatgtggaggaagttagctgcattgaaacccaggacaatcagaatagtgagggagaggcgagaaattgttgtgaaacctctattcgccaggacagcgattccagtgttagtgataagcagcgccagactatcataatcgcagactcgccatctcctgccgtgtctgttatcacgatctcctctgatactgacgaggaagagacttcacagcggcactctttaagggagtgtaaaggcagtctcgactgtgaggcatgtcagtcaacactgaatatagacaggatgtgttctctgagcagtcctgactctactcttagcaccagttctagcgggcagtcctctccctcaccctgtaagagacccaatagtatgagcgacgaggagcaggagtctagctgcgacacagtggatggtagtccaacttctgattcttccggccatgactccccttttgcggagtcaactttcgtggaagatacacacgagaatacagagctggtgagcagcgctgatactgagaccaaaccagctgtgtgcagcgtcgtcgtgccccctgtggagctcgagaacggcctcaatgccgatgagcacatggcgaacaccgatagcatctgtcagccccttataaagggacgttcagcccctggccgtctgaaccaaccctcggccgtggggactaggcagcagaagctgacctctgcattccagcaacagcatttgaacttttcccaggttcagcactttggatccggccatcaggaatggaacggtaacttcggtcaccgccgtcagcaggcttatatccctacaagtgtgacttccaatcccttcaccctgtctcatgggtctcctaatcatactgccgtgcacgcccacctggctggtaatacacacttgggagggcagcccactttgcttccgtatccctcctccgccacacttagcagtgcagctcccgtcgctcatctgctggccagcccatgtacttcgaggcccatgttacagcatccgacctacaatataagtcatccctccggaatcgtgcatcaagtgccagtcgggctgaacccacgtctgctgcctagccctacgatccaccagacccagtacaagcctatcttccctcctcatagctatatcgctgcatctcccgcctataccggtttccccctaagtccaacaaagctaagccagtacccatacatgtag

SEQ ID NO: 120146 - DNA, 3585 bp, synthetic construct
  misc_feature 1..3585: note = Description of Artificial Sequence: Synthetic coding sequence
  source 1..3585: mol_type = other DNA
atggctagccaggtgctagtctaccccccttatgtgtaccaaacccagagctctgccttctgtagtgtcaagaagctgaaagttgaaccatcttcctgcgtcttccaggagagaaactacccgcggacctacgtgaacggcaggaatttcggtaactcccatccccctaccaaaggatccgcctttcagactaagatccccttcaatcgtccacgcggccacaacttctctctccaaactagcgccgttgtcctgaagaatactgcaggcgccacgaaggtgatcgctgcacaggcccagcaggcccatgtgcaggcccctcagatcggagcttggagaaatcggctccactttttggaagggccacaacgctgcgggctgaagagaaaatcagaagagttagataatcattcaagcgctatgcagattgtcgatgagctgtccattttgccagccatgctccagaccaatatgggcaaccctgtgactgtcgttaccgcaacaaccggcagtaaacagaactgcaccaccggggaaggtgattaccagctggtccagcacgaggtactttgttccatgaaaaatacttacgaagtgctggacttcctcggacggggcactttcggtcaggtggtaaagtgctggaagaggggtacgaatgagatcgttgcaataaagatcttgaaaaatcacccctcctacgcccgacagggacaaatcgaagtctcaatactggctaggctgtccacggagaatgctgatgagtataattttgtgcgagcgtatgaatgctttcagcatcgcaatcacacctgcctggtgttcgagatgctggaacagaatctgtatgactttttgaagcagaataagttttctccactaccattgaaggtaataaggccgatactgcagcaggtcgccacagccctgaaaaagctgaaatctctcgggctgatccatgcagatctgaaacctgagaatatcatgctcgtggaccctgtcagacagccttatcgagtgaaagtgatagattttggcagtgctagccacgtttcaaaaacagtgtgctcaacttacttgcaaagtagatattaccgggctccagaaatcatcctgggtctgcctttctgtgaagccatcgatatgtggtccctcgggtgcgtaatcgcggagttgtttttaggctggccattgtatccaggcgcattggagtacgatcagattagatacatttctcaaacgcaggggttacccggcgaacagctcctgaatgtggggacgaaatctactaggtttttttgcaaagagactgatatgtcacattccggctggcggttgaaaactctggaagaacacgaagccgagaccggaatgaagagcaaggaagcacgaaaatacattttcaactcactcgatgacgtggctcacgtgaacactgtaatggacttagaaggctcggacctcctcgccgagaaggcagatcggcgtgagtttgtgtccttgctcaagaaaatgctgctgatcgacgcagacctacgcattacccctgcagaaaccctcaaccaccccttcgtaaatatgaaacaccttcttgacttcccccactcaaaccacgtcaagagttgctttcatataatggacatatgcaaatctcacctgaattcctgtgacacaaacaaccataataagacatcgctgttgagaccggtggcaagctcgtctaccgcgaccctcacggctaactttaccaaaatcgggacccttcggagccaagcactcaccactagcgctcactctgtcgtacaccacggtatccccctccaggcgggtacggcccaattcggctgcggagatgccttccagcagacacttatcatttgcccacccgcaatccaagggattcctgctactcacggaaagcctacatcgtacagcatcagggtagataataccgtaccattggtgactcaggctcctgccgtgcagcccctccagatccgcccgggcgtgttaagccaaacctggagcggaagaacccaacagatgctggtccctgcatggcaacaggtgacaccattggctcccgctaccaccacccttaccagcgagtcggtggctggctcccaccgtttgggcgactgggggaagatgataagctgtagtaaccactacaattctgtaatgccccagccgctgttaaccaatcagatcactttgagcgctccgcagcccgtttcagtgggtattgcacatgtcgtgtggccccagccagcgactacaaagaagaacaaacaatgtcaaaacaggagtaatagcttacagaacaccaacattccccactccgccttcattagcccaaagattatcaatgggaaggacgtggaagaagttagctgtattgaaacacaagataatcagaactcggaaggggaagctcggaactgttgtgaaaccagcatccgccaagactccgatagttctgtatccgacaaacagagacaaacaatcattatcgccgactcgccatctcctgccgtgtctgttataacgattagctccgatactgatgaggaagaaacgtcacagagacactccctgcgcgagtgcaagggtagcttagactgcgaagcatgccagtctactctgaatattgatagaatgtgcagtctcagtagcccagattcaacattatccacttcgtcatccggacagtcctcaccctcaccctgcaagcgacctaactccatgtcagacgaagaacaagagtccagctgcgatacggtagacgggagtcccacctcggattcatctggccacgattcaccattcgctgagagtacgttcgtggaggatactcacgagaataccgaactcgtgtcaagtgctgacacagagactaagcccgctgtctgctccgtggtggtgcctcctgtggagttagagaacgggctgaacgccgacgagcacatggcaaacacggacagcatttgtcagcctttgattaagggtcggagcgccccgggaaggctcaaccaaccttccgcagtgggtacacggcaacagaagctgacatccgcattccaacaacagcacctgaatttcagtcaagtgcagcatttcggcagcggacaccaggagtggaacggcaactttggtcaccggcggcaacaagcatatattcccacgtccgtcacatcgaacccgtttacactctcccacgggtcccccaaccataccgccgtacacgctcatctcgccggcaacactcatctgggggggcagcccactttgctcccctatccctcctctgcaacattgtcttccgctgctccagtggcccacttactcgcctccccctgcacatctcgtcccatgttgcagcatccaacatataacatatcccaccccagcggcatcgtacatcaggtgcctgtgggacttaacccacgcctgttgcccagccctacaatccaccagacacagtacaagcccatattcccccctcattcatatattgccgcttccccggcatacacagggtttccactgtctcccacaaaattgagtcagtacccatacatgtag

SEQ ID NO: 120147 - DNA, 231 bp, synthetic construct
  misc_feature 1..231: note = Description of Artificial Sequence: Synthetic coding sequence
  source 1..231: mol_type = other DNA
atggcaagtcaggttctcgtgtaccccccttatgtatatcagacacagagtagtgcattctgcagcgtcaagaaactgaaggtcgagcctagctcttgcgtgttccaggagcggaattaccctagaacatacgtcaacgggagaaattttggcaacagccatcctccaacaaaaggttctgcttttcaaacaaagatccctttcaataggccgcgcggccataacttttag

SEQ ID NO: 120148 - DNA, 1851 bp, synthetic construct
  misc_feature 1..1851: note = Description of Artificial Sequence: Synthetic coding sequence
  source 1..1851: mol_type = other DNA
atgagcacaatccagtctgagacggactgctacgatataatagaggtcctgggaaaaggtaccttcggagaggttgccaaaggatggcgtagatcaaccggagagatggttgcaatcaagatcctcaaaaacgacgcttaccgaaaccgaattatcaaaaatgagctaaagctgctgcattgtatgagaggcctcgatccagaagaagcacatgttatacgttttctggagttctttcatgacgcactaaagttctacttagttttcgaactgctcgaacagaacttattcgagttccaaaaagaaaataactttgccccactgcccgcccggcacatccgaaccgttacattgcaagtgctgacagctctggctagactgaaggagctggccattatacacgcagaccttaaaccagagaacatcatgcttgtcgatcagactaggtgtcctttccgcgtgaaggtgatcgactttggtagtgcttctattttctccgaggttagatacgtgaaagaaccttacatccagtctagattttaccgggcccctgagattctgctcggcttgcccttttgtgaaaaagtcgatgtctggtctctcggctgcgtgatggcagagttgcaccttggatggcctctgtatcctggcaataatgaatatgaccaggtgaggtatatatgcgagacccagggcctgcctaaacctcacctgctgcacgcagcgtgtaaggcacaccacttcttcaagcgtaacccacatccagacgcagcgaacccatggcagctgaaatcatctgccgactatctggctgaaactaaagtaagaccgctcgaacggaggaaatatatgctaaaatctctggaccagattgagacagttaatgggggaagcgtggcttcgcgtctaacattcccggatagggaagccctggccgagcacgcagatttgaaatccatggtcgagctaattaagcggatgctcacttgggagagtcacgagcggatctcccctagcgcagcattgcggcacccctttgtgtcaatgcagcaactaagaagcgcacacgagacaacacactactaccagctaagcctgcggtcctaccggctcagcttacaggttgaaggtaagcccccgaccccggtggtggctgcagaagatggcaccccctattattgccttgccgaggagaaagaagccgccggcatggggtctgtggccggctcctcacctttcttcagagaggagaaggcgccgggaatgcagagggcaatagaccagcttgacgacttaagtcttcaggaagccgggcacggtctctggggcgagacatgcacgaatgccgtctcagacatgatggtcccactgaaggcagccatcaccggacaccatgttcccgattctgggccagaacccatcttagcattctactcaagccgactcgccggacgacataaagccaggaaacccccagcagggtccaagtcggatagcaatttctctaatctgattcgcctgagtcaggttagccccgaagatgatcgaccttgccggggatcaagttgggaggagggggagcacttgggagcctcagccgaacccctggcgatcctgcagagggacgaggatggcccgaacatagacaatatgactatggaggctgagagacccgaccctgagctgtttgatcccagcagttgccctggcgagtggctatccgagccggactgcacactcgaatcagttcgcggtccaagagcccaaggcctgcccccacggcggagtcaccagcacggaccaccaaggggagcgacttcttttcttcagcacgtcactgggcaccactag

SEQ ID NO: 120149 - DNA, 1746 bp, synthetic construct
  misc_feature 1..1746: note = Description of Artificial Sequence: Synthetic coding sequence
  source 1..1746: mol_type = other DNA
atggtggctatcaagattctcaaaaatgacgcataccgtaatagaattattaaaaatgagttgaaattgctccactgcatgcggggattggacccagaagaagctcatgtgatcagatttcttgaattcttccacgacgccctgaaattctacctcgtgtttgagttgctcgagcaaaatttatttgagttccagaaagagaataattttgcacctctaccagccagacacattaggacagtaacgctgcaggtactgactgcattagccagactgaaggagctcgccattattcatgccgatctaaaacctgaaaacatcatgctggtcgaccagacccgttgtccatttcgggtgaaggtgattgacttcggctctgcttccatctttagcgaggttcgctacgttaaagagccctatattcagtcaagattctaccgcgctcctgagattctgttaggacttcccttctgtgagaaggtcgatgtctggtcactgggttgtgtgatggcagagctgcatctcggatggccactgtatcctggaaacaacgaatacgaccaagtacgctatatctgtgaaactcagggcctgcccaagcctcatttacttcacgcggcgtgtaaggcccatcatttttttaaacgcaatccccatccagacgccgccaatccttggcaacttaagtcttccgctgattacttagcggagaccaaggtgcggcctctcgaaaggcggaagtacatgctcaagagcctggaccagatcgaaacagtaaacggcggctcagtagctagtaggcttactttccctgaccgggaggcactggccgagcacgcagacttaaagtccatggtggaactgattaaacggatgctgacctgggagagtcacgaacgcatctcaccaagcgccgcgctacgtcaccccttcgtctcgatgcagcagctgcggagcgctcacgagactacccattattaccagctctccctgcggtcctataggctgagtttgcaggtagaagggaagcccccaactccagtggtggccgccgaggatgggacaccctactactgtctggcggaggaaaaagaagctgctgggatgggaagtgtggccgggtccagcccgtttttcagagaagaaaaggcaccaggcatgcagcgggcgatcgaccagttggacgacctgtccctgcaggaagctggccacggtttgtggggggaaacctgtactaacgctgtgtctgacatgatggtgccactgaaagccgctattactggacaccatgttcctgactctggccccgaacctatcctggcattctattcgtctcgtttggctggacgtcataaagcccgcaagccaccggccgggtcgaaatctgactcaaatttcagcaatctgataaggctctcccaggtttctcccgaggacgaccgcccatgtagaggcagtagctgggaagagggggagcatctcggagcatctgccgaaccgttggccatcctacagagagatgaagatggcccaaatatcgacaatatgacaatggaggcggaacgaccagatccagagctgtttgacccatcctcttgccccggagaatggctcagcgagcccgattgcaccctggagtctgtacgcggacctcgggcgcagggactgccccccagaaggagccatcagcatggaccgccaagaggggcaactagcttcctgcagcatgtgaccggccaccactag

SEQ ID NO: 120150 - DNA, 675 bp, synthetic construct
  misc_feature 1..675: note = Description of Artificial Sequence: Synthetic coding sequence
  source 1..675: mol_type = other DNA
atgggcgaacagcccattttcagcacgcgcgcgcatgtatttcagatcgaccctaatacgaaaaaaaactgggttcctacgtccaagcacgctgtgacagtctcgtacttttacgacagtacccgtaatgtgtataggattatttccctggatggctcgaaggctatcatcaattcaactattacccctaatatgaccttcaccaagactagccaaaaatttggccagtgggcagacagtcgcgcaaacaccgtgtacggtctcggcttcagctctgagcaccatctgtcaaaggttaccgaactagaatgcgtgtcttcacaggcaaacgctgtccacacccataagactgagctcaaccagaccatccaggagctggaagaaaccctgaagctgaaagaggaagaaattgagaggctcaagcaggagatcgataatgccagggagctccaggagcaaagggactctttgacccaaaaactgcaagaagtggagatccgaaacaaggacctcgaggggcagctgtcagatctcgagcagcggcttgagaagtcacagaacgaacaggaggcgttcaggaataacctcaagaccctcctggagatcctggatggcaaaatcttcgagctcacagaattgcgcgacaatctggctaaactgctggagtgctcgtag

SEQ ID NO: 120151 - DNA, 1065 bp, synthetic construct
  misc_feature 1..1065: note = Description of Artificial Sequence: Synthetic coding sequence
  source 1..1065: mol_type = other DNA
atgggggaacaaccaatctttagtacccgggcgcatgtatttcagatcgatccgaacacaaagaaaaattgggtcccgacttccaaacacgccgtaacggtttcttacttttacgactcaacacgcaatgtttaccggattataagcttggatggaagcaaggccatcattaattcgacgataaccccgaatatgacgttcaccaagacatcccagaaattcggacagtgggccgattcccgggctaacactgtttacggcttagggtttagctccgaacaccatctgtcaaagttcgccgagaaattccaggaatttaaagaggccgcaagattagccaaggagaaatcgcaagaaaaaatggagctgacaagcaccccttcccaggaaagtgctgggggggacctgcagtcacccttgacgccagaaagcatcaacgggaccgatgacgagcgcacccctgatgtaacccaaaatagtgaaccaagagccgagccaactcaaaacgctctcccctttagccacagctccgccataagtaagcactgggaggccgaacttgccactctcaagggaaataacgctaaactgactgcagccctgttggagagcactgctaatgttaaacagtggaagcagcagctggccgcctaccaggaggaggcggaaagacttcacaagcgggttacagagttggaatgcgtgagcagccaggctaatgcagtacacactcataaaaccgagctcaaccagacgatccaggagctggaagagactctcaaactaaaagaggaagaaatcgaacgtctgaaacaggagattgacaatgcccgagaattgcaggaacaacgcgattccttgacccagaaactgcaggaggtggagattaggaataaagacctggagggacaactctctgacttggagcagcgtctcgagaaatcccaaaacgaacaggaggctttccggaataacttgaagacactccttgagatcttagacggaaaaatctttgaacttaccgagttaagggacaatttggccaaactcctagagtgtagttag

SEQ ID NO: 120152 - DNA, 534 bp, synthetic construct
  misc_feature 1..534: note = Description of Artificial Sequence: Synthetic coding sequence
  source 1..534: mol_type = other DNA
atgggcgaacagccgatctttagcactagggcccatgtattccagattgacccaaacaccaagaaaaattgggtgcccacctccaagcacgccgtaacggtctcctacttctacgattccacaagaaatgtgtaccggatcatctcactcgacggctctaaagcaatcatcaattcaactattaccccaaacatgacattcacaaagaccagccagaagttcggccagtgggccgacagtcgagctaacaccgtgtacgggcttggcttctcttcagagcatcatttgtcgaagtttgcagagaagtttcaggagtttaaagaggctgcacgtttagcaaaagagaagtcccaagaaaagatggagctcacgagtaccccatctcaagaatcggcagggggagatctgcagagtccactcacaccagaatcaatcaatggtactgatgacgaaagaacgcccgatgttactcagaacagtgagcctagggctgagcctacccaaaatgccctgccattctctcatcgtaaatag

SEQ ID NO: 120153 - DNA, 543 bp, synthetic construct
  misc_feature 1..543: note = Description of Artificial Sequence: Synthetic coding sequence
  source 1..543: mol_type = other DNA
atgggctccgctatttctaaacactgggaagccgagctggcaaccttgaaaggcaacaacgcaaagctgacagctgctttgctcgagtcaacggccaatgttaaacagtggaaacagcaacttgctgcataccaagaagaggccgagcgtctccataaaagggtgaccgaacttgagtgtgtctcttcacaggccaatgccgtccatacacacaagactgaactgaaccagaccatccaggagttagaagagaccctgaagctcaaggaagaggagatcgagcgcctgaagcaagagattgataacgcacgcgaactacaggagcagcgagacagcttgactcagaagctgcaagaagtggaaatacgcaacaaggacctcgagggtcaattatctgacctggagcagaggttggagaagtcgcagaacgaacaggaagctttcaggaataacctcaagactctgctcgagatactcgatggaaagattttcgagttaaccgaactgagggataatctggctaagctgctggaatgcagctag

SEQ ID NO: 120154 - DNA, 1065 bp, synthetic construct
  misc_feature 1..1065: note = Description of Artificial Sequence: Synthetic coding sequence
  source 1..1065: mol_type = other DNA
atgggggaacagcccatatttaccacacgcgctcatgtcttccagatcgaccccaataccaagaagaattggatgcccgcatctaagcaggcagttactgtgagttatttttatgatgtcactcgaaattcttatagaatcatttccgtcgatggggccaaggtcatcattaactccactattaccccaaatatgacatttacaaaaacaagtcagaagttcggccagtgggcagactcccgcgcgaatactgtatttggactgggcttctcttcggagcagcagctgacaaagtttgcagaaaagtttcaagaagttaaggaggcggcgaaaatcgcaaaagataagacacaagaaaagattgaaaccagcagcaatcactcacaggaaagcggacgagagactccttctagcactcaagcctcttcggtcaatggaactgacgatgaaaaagctagccacgcgggccccgccaatacacatctgaagtctgagaatgacaagctcaagatcgcactgacacagtcagccgccaacgtgaaaaagtgggaaattgagttgcagaccttgcgtgagagcaatgccaggctcacaactgctctacaggaatctgcggccagtgtggagcaatggaagcgacagttttcaatctgccgggacgaaaacgaccggctccgtaataaaatcgatgaactggaggaacaatgttctgaaataaatcgtgagaaagaaaaaaatacacaattgaagcggcgaatcgaggagctggaagcggagctgagggaaaaggaaaccgagttaaaagacttgaggaaacagagcgagattattccacagctgatgtctgaatgcgagtacgtgagcgaaaaactggaagcggctgaaagggataatcagaacctcgaagacaaggtgaggtctttgaagaccgacatagaagagtcaaaatatcgccagcgacacctgaaagttgagctaaaatccttcttggaagtcctcgatggcaagatagacgatctgcacgattttaggagagggctgtctaagctggggactgacaattag

SEQ ID NO: 120155 - DNA, 867 bp, synthetic construct
  misc_feature 1..867: note = Description of Artificial Sequence: Synthetic coding sequence
  source 1..867: mol_type = other DNA
atgggcgagcagcccatttttacaactcgggcacacgtttttcaaatcgaccccaatactaaaaagaactggatgcctgccagtaaacaggcagtcacagtctcctatttctacgatgtaacacgcaatagctatagaattattagcgtagatggagccaaggttatcatcaattcgactattaccccaaacatgacttttacaaagacttcccagaaattcgggcagtgggccgattcacgtgcaaatacggtgttcggcctgggcttcagctctgagcagcaactgacgaagtttgcggaaaagttccaggaagtcaaggaggccgcaaagatagcaaaagataagacccaggaaaaaattgaaactagctccaaccacagccaggcatcctcggttaacggtaccgacgacgaaaaggcgtcccacgccggcccggccaacacgcacttgaagtcggagaatgacaaactaaagatcgctttgacccagtctgcagccaacgttaagaatgagattaacagagaaaaggaaaagaacacacagcttaaaagaagaattgaagagctagaagctgaattacgggagaaagaaaccgagctcaaagatctgcgaaagcaatcggaaatcatccctcagcttatgtctgaatgtgagtacgtgtcagagaaactagaggcagctgaacgggacaaccaaaaccttgaggataaggtgcggtcccttaaaaccgacattgaagaaagcaagtatcgccagaggcacctcaaagtggagctcaagtcatttcttgaggttctggacggaaagatcgacgacctacatgactttaggaggggactcagtaaactgggcaccgacaactag

SEQ ID NO: 120156 - DNA, 900 bp, synthetic construct
  misc_feature 1..900: note = Description of Artificial Sequence: Synthetic coding sequence
  source 1..900: mol_type = other DNA
atgggagaacagccgattttcacgactcgggcgcatgtgtttcagattgaccccaacaccaaaaagaactggatgcccgccagtaagcaggctgtaaccgtgagctatttctatgatgtgactcgcaatagttatcggatcatctccgtagacggagccaaggttattattaacagcacaattacccccaacatgacttttacaaagaccagccagaagtttggacagtgggccgattcgcgcgccaacaccgtctttggcctggggttttcctcagaacaacagctcaccaaattcgccgaaaagtttcaagaagtaaaggaggccgccaaaatcgccaaagacaaaacacaggagaagattgaaacctcttcaaaccacagccaagagtccgggcgggagacacccagcagtacccaggcgagcagcgtcaatggaaccgacgatgagaaggccagtcatgcaggaccagccaatacgcacctgaagtcagagaatgacaagctgaagattgctcttacgcagtcagcagccaatgtgaagaacgagattaatcgagagaaagagaaaaacacacagctcaagcgacgcatcgaggaactcgaggctgaactccgggagaaggaaacagagttaaaggatctccgcaagcaatccgagattattccccagttgatgagcgagtgtgagtatgtgagcgaaaaactggaggccgccgagcgtgataaccaaaatctcgaggataaagtccggtctcttaaaacagacatcgaagagtccaagtaccgccagcggcacctgaaggtggagctgaagagtttcctcgaggtgctggacggcaagattgatgatttgcatgattttcgcagggggttgtcaaaattgggaaccgataactag

SEQ ID NO: 120157 - DNA, 1032 bp, synthetic construct
  misc_feature 1..1032: note = Description of Artificial Sequence: Synthetic coding sequence
  source 1..1032: mol_type = other DNA
atgggggagcagcctattttcaccacgcgcgcacatgtctttcagattgaccctaatacgaagaagaactggatgcctgcctctaaacaggctgttaccgttagttatttttatgacgttactcggaacagctataggatcatttctgttgacggagccaaggtcatcataaattctacaataacaccaaatatgacctttacaaaaacctctcaaaagttcggccagtgggccgattctcgggctaatacagttttcggcttaggattcagtagcgagcagcagctcactaagtttgcagaaaaattccaagaggtaaaggaagccgccaaaattgccaaagataagacccaggagaagattgaaacctcgtcgaaccactcccaggcgagcagtgttaacggcactgacgatgaaaaggcctcccatgctggccccgccaatacccacctgaaaagtgagaatgacaagctgaaaattgcattaacccaatccgctgccaacgtcaagaaatgggagatcgagttacagactctgcgcgaatccaatgctcggcttaccaccgccctgcaggagagcgccgcctccgtggaacagtggaaacggcagttcagcatctgcagggacgagaacgaccgactaagaaataaaatagatgaactggaagaacagtgtagcgaaatcaaccgcgagaaggagaagaatacacagcttaagaggaggattgaggaactggaagccgaactccgggagaaagaaacagagctgaaggacctaagaaagcagtcagagatcatccctcagctgatgagcgagtgtgagtacgtgagtgagaagctggaggcggctgaacgagataatcagaatctcgaagacaaggtccgatctctaaagacagatattgaagagagtaagtataggcagcgtcatcttaaagtggaactgaagagcttccttgaagtattggacggcaagatcgacgacctgcacgatttccgccgaggcctctctaaattgggaactgataactag

SEQ ID NO: 120158 - DNA, 15 bp, synthetic construct
  misc_feature 1..15: note = Description of Artificial Sequence: Synthetic coding sequence
  source 1..15: mol_type = other DNA
tgaaccgacaactag

SEQ ID NO: 120159 - DNA, 4176 bp, synthetic construct
  misc_feature 1..4176: note = Description of Artificial Sequence: Synthetic coding sequence
  source 1..4176: mol_type = other DNA
atggccgttgagggcagtactatcacttcccggataaagaatttactgcgatcgccttccatcaagctacggagatccaaggcggggaaccgccgggaagacctgtctagcaaggtcaccctggagaaggtactgggaatcactgtttctgggggtcgtggccttgcatgtgatccccggtctgggttagtcgcatatcctgctggctgcgtggtggtgctcttcaatccgcgcaagcacaaacagcatcacatcctaaactcatcgcggaaaactattacagcactggccttttctccagacgggaaatatctggtcaccggtgaaagtgggcacatgcccgcagtgagggtctgggacgtggccgaacactctcaggtcgcggagctgcaggagcataagtacggcgtcgcatgcgtagcgttctcacctagcgcaaagtatatcgttagcgtaggttaccagcacgacatgatcgtgaacgtctgggcatggaaaaaaaatattgtggttgcaagcaacaaggtttctagtagagtgacagctgtgtcattctccgaggactgttcttacttcgtgacggctggcaaccgccatattaagttctggtaccttgacgactcaaagaccagtaaggtcaatgccacggtaccactactgggccgcagcggcttgctaggcgaactgaggaataatctctttacagacgtggcatgcggtagaggtaaaaaagcagactccacattttgcataacatcttcgggactcctgtgcgaattctctgaccgacggttgctagacaaatgggtggagctacgcgtgtatcctgaggtgaaggactccaaccaggcctgcctgcccccctcctctttcattacctgtagctccgacaacaccatccgcctctggaatactgaaagctctggcgtgcatggctccaccctgcaccggaatattctttcttcagatctgataaagatcatctacgttgacggcaacacccaagccctcctcgatactgagctgcccggaggggacaaagctgacgcaagtctgctcgaccccagagttggcataaggagtgtttgtgtgagtccaaatggccagcatctggcctcaggtgacagaatgggcaccttgcgcgtccacgaacttcagtcactgagtgaaatgctgaaagtagaagctcatgactccgagatcttatgcttagaatattctaagcccgatacaggtctgaaactcctcgcctccgctagccgcgacagactgatccatgtgctggatgcagggagagaatactcactgcagcagacactggatgagcacagctccagcattacagccgtgaaattcgccgcgtcagatggtcaggttcgcatgatcagctgtggtgcagacaagagtatttacttcagaacagcccaaaagagtggcgacggtgttcagtttacccgcactcatcacgtagttaggaagacaacactctacgacatggacgtagagccatcttggaagtatactgcgatcggctgccaggatcgaaatattcgaattttcaacatcagctcagggaagcagaaaaaattattcaaaggcagtcagggcgaagatgggaccttgattaaggtccagactgatcctagtgggatctacattgctacaagttgtagcgacaagaacctgtcgatctttgacttttcctcgggagagtgtgtggcaactatgttcgggcattctgaaatcgtaactggtatgaaattcagtaatgattgcaaacatctgattagcgtgtcaggcgattcatgcatctttgtgtggcgcctgtcttctgaaatgacgattagtatgcgtcagagactggctgagctcagacagagacagaggggagggaagcaacagggtcctagctcaccccagagagcttctggacccaatcgtcatcaagccccttcaatgctgtcacctgggcccgctttatcttccgactcagacaaggaaggggaagacgagggtaccgaagaggagcttcccgccctgccggttcttgccaaaagtactaaaaaagctttggcttcagttccctctcccgccctccctcggagtctgtcgcactgggagatgtcacgcgcacaggaaagcgtggggttccttgaccccgctcctgccgcgaatcccggccctcggaggagaggccgatgggtgcagcccggtgtagagctgagcgtccggagtatgctggatctgagacaactggagactctagcaccctcgctccaggatccctctcaggactcccttgcaattattccctctgggccaagaaagcatggacaggaggccctggaaacttcactaacatcacagaatgagaagccccctcgcccacaagcctctcagccttgtagctaccctcacattatccggctcctgagccaggaagaaggggttttcgcacaggatctcgagcctgcgcccatcgaggacggcattgtttatccagagccctctgataatccgaccatggacacctccgaattccaggtgcaagcccccgccaggggtaccctgggtcgtgtgtacccaggatctaggagctcagagaaacattcaccggacagcgcctgcagtgtggattatagttctagctgtctgagttcgcccgaacatcccactgaggattctgagtctaccgagccactgtctgtggatgggatcagttccgacctggaggagccagcagagggagatgaagaggaagaagaagaggaaggtggcatggggccttatggcttacaagagggctcgccacagacccccgatcaggagcagtttctgaaacagcacttcgagacgcttgcaagcggcgctgccccgggagctcccgtccaggtcccagagcgatccgagtcgcggtcaatttctagtagattcttattgcaggtacagactcgcccccttcgagagccatcccctagttcttcttcgctcgccctgatgtcgcggccagcgcaggtcccccaggcctctggtgagcagcctcgcggcaatggggcaaacccccccggggcaccacctgaagtggagcctagctccggcaacccctctccccaacaggctgcatcagtcctgctgccccggtgcaggctgaaccctgacagcagttgggcgccgaagagagtagccacagccagcccctttagtggtctgcagaaggcccagtcagtgcatagcctggtgcctcaagaaaggcacgaggctagtctgcaggcaccaagccccggggccctcctgagccgtgaaatcgaggcccaggatgggctgggtagtctgccacccgcagatggacgcccttcacggcctcactcataccagaatcccaccacctcgtccatggccaaaattagtcgctccattagtgtgggcgaaaacctgggacttgtcgctgaaccacaggcacacgcgcccatccgtgtgtcccccttgtctaaattagctcttccatccagagcccacctagtgctagatattcctaaacctctgcccgatagaccaacactggctgctttctctccggtaacaaagggccgtgctcccggcgaggcggaaaagcccggattcccggtcggcctggggaaggcccacagtaccactgagcgctgggcttgtcttggggagggcactacccccaagccaaggactgaatgccaggcccatcctggtccgagttctccttgtgcccagcaactgcctgtgagctctctgtttcagggccccgagaacctgcagcctccacctccagaaaaaacccctaatcctatggagtgcaccaagcccggcgcggccctttctcaagactctgaacctgccgtgtcccttgaacaatgcgaacagctggtagctgagctcagaggctctgtgcgccaggcggtgagattgtatcattctgtagccggctgtaaaatgccaagcgctgagcaaagccgaatcgctcaacttttgcgggacaccttttcatcagttcggcaggaactggaggccgtggcaggagccgtactgtccagccctggtagcagtcccggcgccgttggcgctgagcagacccaggccctgttggaacagtatagcgagttgttgctgcgcgcggtcgagcggcgtatggaaagaaagttatag

SEQ ID NO: 120160 - DNA, 1077 bp, synthetic construct
  misc_feature 1..1077: note = Description of Artificial Sequence: Synthetic coding sequence
  source 1..1077: mol_type = other DNA
atgtctaccgctagggaacaaccaattttttcgacccgcgcacacgtgtttcaaatcgacccagccaccaagcgaaactggatccccgctggcaagcacgcactgactgtgagctatttctacgacgcaacacgtaatgtgtacaggattatctcaatcggaggggccaaggcaattattaattccactgtcacccccaacatgaccttcaccaagaccagccagaaattcgggcagtgggctgatagcagagctaacaccgtctatggactcggattcgcatcagaacaacatctcacccagttcgcagagaagttccaggaagttaaggaggccgccaggttagcaagagaaaagtcccaggacggcggagaactgacttcacccgcattgggtctggcctcgcatcaggtgcccccatctcctctggtgtcagcgaacggcccaggggaagagaaactcttccgctctcagtcggcggatgcaccaggtccaacagagagggagcgtctgaagaagatgctgagtgagggcagcgtgggagaagtacagtgggaggccgaattctttgccctgcaggattcaaacaacaagctggccggcgccctgagagaggcaaatgccgctgctgcgcaatggcgacagcaattagaggctcagagggctgaggctgagcggctgagacagcgagtcgcggaacttgaagcacaggccgcatccgaggtgacccccacgggtgaaaaagagggattgggccagggacagtctcttgagcagctggaggccctcgtccagactaaggatcaagagatccagaccctgaagtcccagacggggggccccagagaagcacttgaggccgccgaacgcgaggaaacccagcaaaaagtgcaaacgcggaatgctgagcttgaacaccagctccgcgcgatggagcggtcccttgaggaggcaagggccgaaagagagagagcccgtgctgaggttgggagagccgcccagctgctggacgtgagtttattcgagctatctgaattgcgagaagggcttgccagattggctgaggccgctccatag

SEQ ID NO: 120161 - DNA, 438 bp, synthetic construct
  misc_feature 1..438: note = Description of Artificial Sequence: Synthetic coding sequence
  source 1..438: mol_type = other DNA
atgtctactgctcgagagcagccgatatttagcacccgcgcccacgtgttccaaattgatccggcaaccaagagaaactggatacccgctggcaagcacgctctgaccgtgtcttatttttacgacgccactaggaacgtgtaccgaattatctctattggtggggccaaggcaataataaactccactgtcacaccaaacatgacgtttaccaaaactagtcagaaattcgggcagtgggccgattccagggctaatacggtttatggattggggttcgcatcagagcagcacctaacacaattcgcagagaaattccaagaagtcaaagaagctgccaggctggctcgggaaaagtcacaggacggctggggcggcccacaatctgccctggttgtcggctcatttggcgctgtctttgagctcctgattgtttag

SEQ ID NO: 120162 - DNA, 1086 bp, synthetic construct
  misc_feature 1..1086: note = Description of Artificial Sequence: Synthetic coding sequence
  source 1..1086: mol_type = other DNA
atgtccacagcacgtgaacagcccatctttagtactcgcgcacatgtttttcagattgaccccgcgaccaagcgcaattggattcctgccggcaagcacgcactgactgtcagctatttctacgacgctacccgcaatgtctatcgtatcattagcattggtggcgccaaggcgataatcaatagtactgtgacccccaacatgacttttactaagactagccagaagtttggccagtgggccgatagcagagctaacaccgtatatggcctgggatttgcctccgagcaacacctgacccagtttgcagagaagtttcaggaagtaaaggaggcggctagactggcacgcgaaaaatctcaagatggcggcgagctgactagccctgccctgggactggcttcccatcaggtccctccaagtccactcgtgagtgccaacggcccgggcgaggagaaactcttcaggagtcagtcagccgatgcccccggaccgacagagcgggaacgcctcaagaagatgctgtccgaggggagtgtaggtgaggtccaatgggaggctgaattctttgcactccaggacagtaataataagcttgctggcgcactgcgggaagctaatgctgctgccgcccagtggcgccaacaactggaggctcaaagggccgaggcggagcgactccggcagagggttgcagagctggaagcccaagccgcatctgaagtgacgcctacaggcgagaaagagggacttggacagggccagtccttggaacagctcgaagctttagttcagaccaaggaccaggagatacaaacactgaagtcccaaactggcgggccgcgcgaagcactggaggcagcagaacgggaggagactcagcagaaggtccaggatctggagactagaaacgcagagctcgagcaccagcttcgcgctatggagcggagcttggaggaagcgcgtgccgaacgcgagcgggcccgggctgaggtcgggcgagcggcccaattgctcgatgtctctctgttcgagctcagcgagttaagagaaggtctggctagattggctgaggcagctccttag

SEQ ID NO: 120163 - DNA, 1077 bp, synthetic construct
  misc_feature 1..1077: note = Description of Artificial Sequence: Synthetic coding sequence
  source 1..1077: mol_type = other DNA
atgagcacagctcgcgagcagccaatcttctccacccgggctcatgtctttcaaattgatccagctaccaagcgaaactggattcctgctggcaagcacgccctgacagtgtcatacttctacgatgcaactcgaaacgtgtaccgcatcatttcaattggtggagccaaagcgataatcaattctactgtgactcccaacatgaccttcaccaagacgagccagaaatttggccagtgggcggattcccgcgcaaacactgtgtatgggttgggttttgcttctgaacagcacctcacccagtttgcagagaaattccaagaggtcaaggaagctgccagacttgctagagaaaaaagtcaggatgggggcgaactgacttccccagcactgggccttgcctcccaccaggtcccccctagtccactcgtgtcagcaaacggcccaggcgaggaaaaactgtttcgctcacagtccgcagatgcccccgggcctaccgagagagagaggcttaagaagatgcttagcgaaggaagcgtgggagaagttcagtgggaggccgaattcttcgcactgcaggattctaacaataaactcgctggggccctccgcgaagccaatgctgccgctgcacagtggcgccagcagctggaggcacagcgagccgaggctgagcggctaagacagagggtcgctgaactggaggctcaagccgcgtccgaggtcacgccgaccggcgaaaaggaaggcctgggccagggccagtctctggaacagctggaagcactggtacagacaaaagatcaggaaatacagaccctgaagagccagaccggcggacctagagaggccctggaggccgcagagagggaagagacccagcagaaggttcaaacacggaatgccgaattggagcaccagttgcgggcaatggagcgctcgctcgaagaggcacgagcagagcgggaacgggcaagggctgaggtggggcgcgccgcgcagctgctagacgtgtccctatttgagctgtccgagctccgtgaagggctggctcgactagcagaggctgctccatag

SEQ ID NO: 120164 - DNA, 1086 bp, synthetic construct
  misc_feature 1..1086: note = Description of Artificial Sequence: Synthetic coding sequence
  source 1..1086: mol_type = other DNA
atgagcaccgcccgtgaacagcctattttcagcacaagagctcacgtgtttcagattgaccccgcaactaagaggaattggatccccgcaggaaaacatgcgttaactgtgagctatttctacgatgccactcggaacgtgtaccgaatcatctcaattgggggcgctaaagcgatcattaatagtaccgtgacaccaaatatgacgttcaccaagacctcccaaaagtttggacaatgggccgatagtcgggcaaacaccgtttacggtctgggcttcgcaagcgagcagcatctgacccaatttgctgaaaaattccaggaggtaaaggaggcagcacggttggcacgcgagaaaagtcaagacggaggggagctgacatcccccgccctcggattggccagtcatcaggtccccccctccccactggtgagtgctaacggacccggcgaggaaaagctttttaggagccagtcagccgacgcacccgggccaaccgagcgagaacggttgaaaaaaatgcttagcgaagggagtgttggtgaagtgcagtgggaggcagagttctttgcactccaggattccaacaataagctggccggggcactaagggaggctaatgctgctgcagcccagtggaggcagcagctcgaggctcagagagccgaggcggagcggcttagacagcgggttgctgagctggaggcccaggccgctagcgaggtgacacctacaggagagaaagaaggacttggccaggggcagtcattggaacagctggaggccctggtacaaaccaaggaccaggagattcagactctgaaatcccaaacaggcggcccacgagaggcacttgaggccgcggagagggaggaaacacagcagaaagttcaagacctggagaccaggaacgcggaactcgaacaccagttgcgcgccatggaaagatcattagaggaggcgcgggccgaacgggagagggcacgcgccgaagtcggcagagcagcccagctgctggatgttagtctcttcgagctgtctgaacttagggaaggcctcgctaggctggcggaagctgcgccttag

SEQ ID NO: 120165 - DNA, 1086 bp, synthetic construct
  misc_feature 1..1086: note = Description of Artificial Sequence: Synthetic coding sequence
  source 1..1086: mol_type = other DNA
atgtccacagccagagaacagcccatcttcagcactcgggctcatgttttccagatcgaccctgccaccaagaggaactggattcctgccggaaaacacgccctcactgtcagttatttttacgatgcgacacggaacgtgtaccggatcattagcatcggcggtgccaaagcgatcataaactctaccgtgacacctaacatgacattcacgaaaacctctcagaagtttggtcagtgggcggactctagggccaacacggtgtatgggctaggtttcgcgagcgaacaacatcttactcaattcgctgagaagtttcaggaggtgaaggaggctgcgaggttagctagggagaaatcccaggatgggggcgagcttacgtctccagctctcgggctcgcaagccaccaggtccctccctcaccgttggtgtccgctaacgggcctggtgaggaaaagctatttcggagtcaatccgcagatgcaccaggacccacggaaagagaaaggttgaagaagatgttgtcagaggggtcagtcggcgaggtccagtgggaagccgagttttttgctctacaggactccaataataagctggccggcgccctaagagaggccaatgccgccgctgctcaatggagacagcagctcgaagctcagcgcgccgaggcggaacggctgagacagcgggtcgccgaactagaagctcaggcagcctcagaagtgaccccgaccggggaaaaggaaggtctggggcaggggcaaagtctggagcagctggaagccctggtgcaaacaaaggatcaagagattcaaacgcttaagagccagaccggcggccctcgagaagcccttgaggcggcagaacgggaggagacgcagcagaaggttcaggaccttgaaacaagaaacgcagagctagaacatcaattgcgtgccatggaaaggagcctggaggaggcaagggccgagagggagcgggccagggctgaggtcgggcgggccgcccagctacttgacgtctccctttttgaactgagtgagctgcgagagggcctggccagactcgcagaagcagcgccatag

SEQ ID NO: 120166 - DNA, 978 bp, synthetic construct
  misc_feature 1..978: note = Description of Artificial Sequence: Synthetic coding sequence
  source 1..978: mol_type = other DNA
atgtctactgcacgggagcagccgatctttagcacccgtgcacatgtgtttcaaattgaccccgctacaaaacgcaattggattcctgcaggaaaacacgcgctgaccgtgtcttacttttatgacgcaacccggaacgtatacagaatcatttcaatcggcggagctaaagccatcatcaacagcactgtgacgcccaacatgaccttcacaaagaccagccagaagtttgggcagtgggccgactccagagcgaacacagtttacgggcttggattcgcaagcgagcaacatctaactcaagttcccccaagtcctctggtgtcagctaacgggcccggtgaagaaaaattgtttagatcccagtctgctgatgccccgggacctacggagcgagaacgtcttaagaagatgcttagtgaggggagtgttggggaagttcaatgggaagctgaattctttgcactccaggattcaaacaataaactggccggggctctgcgagaagccaacgccgccgcggctcagtggcgccaacagctggaagctcagcgagccgaagcagaaaggctgaggcagcgcgtcgccgagctggaagcccaagccgctagcgaagtgacccccaccggtgagaaagagggattagggcaggggcagtcactcgagcagcttgaggctcttgttcagactaaagaccaggaaatccagaccctgaagtctcaaacgggcggaccgagggaggcactcgaggcggcagagcgtgaggaaacacagcaaaaggtccaggatctggagacaaggaatgccgagcttgagcatcaattgcgagcaatggagcgatcccttgaagaggctagggctgagcgggagagggctcgtgccgaggtgggacgcgcggcccagctgcttgatgttagcttgttcgaactatcagagctacgcgagggcttggctagacttgccgaagccgccccttag

SEQ ID NO: 120167 - DNA, 1176 bp, synthetic construct
  misc_feature 1..1176: note = Description of Artificial Sequence: Synthetic coding sequence
  source 1..1176: mol_type = other DNA
atggaatcagaaaccgagcctgaaccagtgaccctgttagtcaaatctccaaaccagaggcacagagacctggaactttctggtgatcgaggatggagcgtgggtcatcttaaggcacacctgtcaagggtttatcctgaaagaccccgtccagaggatcagaggttgatctactctggcaagctgttgctcgatcaccagtgccttagagatctgctcccaaagcaggaaaagcggcacgtcctgcatttggtatgtaacgtgaagtcaccttccaagatgccagagatcaacgcaaaggtggccgagtctaccgaagaacccgccggatccaacagaggacaatatcccgaagatagctcttccgacgggctgcggcagagagaagtgctcagaaacctctctagtccaggatgggaaaatatatcacgccctgaagccgcccaacaggcttttcagggactgggccctggtttctcagggtacactccttatggctggctgcagcttagctggtttcagcagatttatgctcggcagtattacatgcagtacctggctgcaactgctgcctcaggcgccttcgtaccgcccccaagcgcccaggaaattcctgtggtgtctgccccagcaccggcacctattcacaatcagtttccggctgaaaaccaacccgccaaccagaacgcagctcctcaggtcgttgtcaatccgggcgccaatcaaaacctgcgcatgaacgcacaggggggtcccattgttgaggaggacgatgaaataaaccgcgactggctggattggacttattccgcagccacattttcagttttcctgagcatactctacttctactcgtcactgtccagatttctgatggtgatgggagctacagtggtcatgtatttgcaccatgtgggctggttcccctttcgcccgcgtcctgtgcagaatttccctaacgacgggccgcctcctgatgtggttaaccaggaccccaacaacaacctgcaggagggcaccgacccagagacagaagacccaaaccacctcccaccggacagggatgttcttgatggtgaacagacttcaccgtcctttatgtccactgcatggctggtatttaagaccttttttgcctcgctcctgccggagggccctcctgcaattgccaattag

SEQ ID NO: 120168 - DNA, 699 bp, synthetic construct
  misc_feature 1..699: note = Description of Artificial Sequence: Synthetic coding sequence
  source 1..699: mol_type = other DNA
atggagagcgagactgagcccgagccagttacactgttggtgaagtctcccaaccagcgtcacagggacctggagctgagcggagatcgcggatggtctgtcggccatctcaaggcccatttgtcccgggtatacccagaacgtccccgcccagaggaccaaagactgatttatagcggtaagttgcttttggaccatcagtgtctgcgagatctgctgccaaaagaaaagaggcacgtgttgcatcttgtttgcaatgtgaagtctccgagcaaaatgccagaaatcaacgctaaggtggccgaatcaaccgaagaacccgctggatctaaccgcggtcagtacccggaggatagcagtagtgacggactcagacaaagagaggtgcttcgcaatctgtccagcccgggctgggaaaacataagccgccatcatgttgggtggttccctttcaggccgaggcccgtgcagaattttcccaacgacggtcccccccctgacgtggtgaatcaggacccaaataataatctccaggaagggactgatcccgagacagaagaccccaaccacctcccaccggatagggacgttctcgatggcgagcagacctcacccagcttcatgtccaccgcctggctagtcttcaaaacgttctttgcatcactgcttccagagggcccaccagccatcgccaattag

SEQ ID NO: 120169 - DNA, 1101 bp, synthetic construct
  misc_feature 1..1101: note = Description of Artificial Sequence: Synthetic coding sequence
  source 1..1101: mol_type = other DNA
atggagtctgaaacagagccagagccagttacactgttggttaaatccccgaatcagcgacaccgtgacctggagctttctggcgaccgcggctggagcgtaggacacttgaaagctcatctgtcccgagtgtatcccgagaggccccgacccgaggaccaaagactgatttatagtggcaaactgctcctggaccatcaatgtctccgtgacctgctgccaaaggtcgccgagtccacagaagaacccgcaggatcgaacaggggacagtatcccgaagacagttcctcagacggtctgagacagcgggaggtcttacgcaacttgtctagtcccggttgggagaatatctcaagacccgaagccgctcagcaggcttttcagggcctcggcccaggattttccggctacaccccctacggctggctacagctatcgtggttccaacaaatttacgccagacaatattacatgcagtacttggccgcaacagcagcgtcaggggcattcgtgccgccgccctctgcccaggagatccccgttgtaagtgctcctgcgccagctccaatccacaatcaatttcctgccgagaaccagcctgcaaatcaaaatgctgcaccccaagtggtcgtgaaccctggagcgaatcagaacctgcgaatgaacgctcaggggggaccgattgtcgaagaggatgacgaaattaaccgagactggctggattggacctactctgcagccacattcagcgttttcctatcgatcttatacttttactcttccctgtctagatttctgatggtgatgggtgccaccgtagtgatgtaccttcaccacgtaggttggttccccttccggcctcgcccagtgcagaattttcccaacgatggcccacctcccgatgtggtcaaccaagaccctaacaataacctgcaggaaggtaccgaccccgaaactgaggaccctaatcatctgccaccagaccgcgacgtgctggacggagagcagacgtcccctagcttcatgtccacagcctggctggtcttcaagaccttcttcgctagccttttgccagaggggccacctgccattgctaattag

SEQ ID NO: 120170 - DNA, 1173 bp, synthetic construct
  misc_feature 1..1173: note = Description of Artificial Sequence: Synthetic coding sequence
  source 1..1173: mol_type = other DNA
atggaatcagaaacagaaccagagcccgtgaccctccttgtgaagtcacctaatcaacggcaccgcgacttggaactgtctggcgacagagggtggtctgtaggacatctgaaagctcatctgtcaagagtttacccagaacggccaaggcctgaggatcagcgactgatttactccggaaagctgctgcttgaccatcagtgtctacgagacttactgccaaaagagaagaggcacgtgctccatctcgtgtgcaacgttaagtctccgtctaagatgcccgagattaacgcaaaagtcgcagagtcgaccgaagagccagctggctccaacagggggcagtatcctgaggattcttctagcgacggactcagacagcgagaggtgcttcgtaatctgtctagccccggctgggagaacatctctaggccagaagcagctcaacaggccttccaggggttagggcccggattctctggctacacgccctacgggtggctgcagctctcctggttccagcagatttacgcccgacagtattacatgcaatatctggcagccactgcagcttccggtgcatttgtgcccccaccatccgcccaggagatcccagtggtatctgcccccgctcccgcgcccatccacaaccagttccccgcagagaaccagcccgccaatcaaaatgccgccccgcaggtggttgtgaatccaggtgcaaatcagaatcttcgcatgaatgcccagggcggccccatagtcgaggaagatgatgaaatcaatagagactggttggattggacctactccgcagccactttctccgtgttcctgagtatactgtacttttactcgagcctgagtagattcctaatggtgatgggcgctacggtggtcatgtatttgcaccatgtcggatggttcccctttaggccgcgacctgtgcaaaactttccaaatgatggccctccccccgacgtggtcaaccaggaccctaataataatctgcaagagggtaccgatccagagaccgaagatcccaaccacttacctccagaccgtgacgtgctggacggggagcagacaagtcctagctttatgtccacagcctggcttgtgttcaagactttctttgctagcctcctcccagaagggccgccagctatcgctaactag

SEQ ID NO: 120171 - DNA, 1338 bp, synthetic construct
  misc_feature 1..1338: note = Description of Artificial Sequence: Synthetic coding sequence
  source 1..1338: mol_type = other DNA
atggctgaactgaaatatatatctggcttcggcaatgagtgtagctctgaggacccccgatgtcccggtagtttacctgagggtcagaacaaccctcaggtgtgcccatacaacctgtacgccgaacagctttctggcagtgccttcacatgtccacgctcaaccaataaaagatcctggctgtaccgcatcctgcccagcgtatcacataaaccttttgaaagcatcgatgagggccaggtaactcacaattgggatgaggtggacccagatcctaatcagctcaggtggaaaccttttgaaattcctaaggcgtcccagaagaaagtcgacttcgtgtctggactacacactctgtgcggtgctggcgacatcaagtctaacaacggtctggcgatacacatttttctttgcaatacttctatggagaatcgctgcttctacaacagtgatggggattttctgatcgtgccccagaaggggaatctgctcatatacaccgaatttggcaagatgctggttcaacctaacgagatatgtgtgatacagaggggcatgcggttctccatagacgtctttgaggagacccgtgggtatatcctggaagtatacggtgtccatttcgaacttcctgatcttgggccaattggggccaatggcttggccaaccctcgtgactttctcatcccaatcgcctggtatgaggacaggcaggtcccagggggctacactgtgataaataaatatcaggggaagctgttcgcagccaaacaagatgtgtctcccttcaacgtggtggcctggcatggtaactatacgccttacaagtacaacctgaagaactttatggtgatcaactccgtggcatttgatcatgcagaccctagcatcttcaccgtgctgaccgccaagtccgtacgcccgggggtcgccatagcagacttcgtgatcttcccacccagatggggcgtcgctgacaaaacctttcgccctccttattatcaccgcaactgcatgagcgagttcatgggcttaatccggggacactacgaggctaagcagggtggatttctcccgggaggtggctcacttcactccaccatgactccccacgggcctgacgcagattgcttcgagaaggccagtaaggtcaagcttgcacctgaacggattgcggatggcactatggcttttatgttcgaaagcagcctgagtctggcggtcaccaaatgggggctcaaggcatcgagatgcctcgacgagaactaccacaagtgctgggagcctttgaaaagccatttcacacctaatagcaggaaccccgcagaacccaattag

SEQ ID NO: 120172 - DNA, 2187 bp, synthetic construct
  misc_feature 1..2187: note = Description of Artificial Sequence: Synthetic coding sequence
  source 1..2187: mol_type = other DNA
atggaagaaacacagccccctcctcaacccaagttgcccttgtgcgactctctgatgatatggctgcagacattcaatactgcatctccatgccaggatgttaaacaattaacttccggcgtggccatggcgcaggtcctgcaccagattgacgccgcatggtttaacgagagttggttgtcacgcatcaaggaagacgtgggggacaactggcgaatcaaggcttcaaacgtaaagaaagtcctgcaagggattatgtcctactaccacgagtttctggggcaacaaatctccgaagcacttattcccgatctgaaccagatcacagagtgctcagaccccgttgaactgggcaggctcctacagttaattctggggtgtgctattaattgtgagaaaaagcaggaacatatccagaacataatgaccttagaagagagcgtccagcacgtggttatgaccgcaattcaggaactgatgagcaaggagatcctcagttctccacccaacgacgctgtcggcgagctggaacaacagttaaagcgcgcactcgaggaactgcaggaagcactcgcagagaaagaggagctacgccaacgatgtgaggagttagacatgcaagtgacaactttgcaggacgagaagaactccttggtcagcgagaatgagatgatgaacgagaagctcgaccaacttgacgggtcgtttgacgatcctaataccgtcgtggctaaaaagtacttccacgcgcagctgcagctggagcaactgcaagaggagaatttccgtttggaggcagctaaggacgattatcgggtccactgcgaggagctggagaagcagctgatagaattccagcaccggaatgatgaactgacgtccttggctgaggagacccgggcgttaaaagacgaaattgacgtattaagggcaacatctgacaaagccaataagctggagtctacagtggagatttataggcaaaaacttcaggacctaaacgacctgaggaagcaggtgaaaactctgcaggagactaacatgatgtacatgcataacacggtgtccctagaggaggaactcaagaaggccaatgccgcccgtactcagttggaaacttataaaagacaggtgcaggatctgcatgtgaagctgagttctgaaagcaaacgggcagataccctggcattcgaaatgaaaaggctagaggagaagcacgaggcactgctgaaagaaaaagaacgcctgattgaacagagggatactctcaaagaaacaaatgaggagctgcgatgctcacaggtacagcaagatcacttgaaccagactgacgcatcagcgaccaaaagttatgagaacttggcagctgaaatcatgcccgtcgaatatagagaggtgtttattaggctgcagcatgagaacaagatgctccgcctgcaacaggagggttcagagaacgaacggatcgaggaactccaagaacagctggagcaaaagcatagaaagatgaacgaactggaaaccgaacagcggctcagcaaggagcgcatccgggagcttcagcaacagattgaagacttacagaaatcccttcaggaacagggctctaagagtgagggggaatcttcaagtaagctgaagcagaagctggaggcccatatggaaaagctgactgaagtgcacgaagaactgcagaagaagcaagagttaattgaggacctgcagcccgacatcaaccagaacgtacagaaaatcaacgaactcgaggcggcattacagaaaaaagacgaggatatgaaagcgatggaggagaggtataagatgtaccttgagaaggcacgaaatgtaattaagaccctcgatccgaaactgaacccagccagcgctgagattatgttattgagaaagcagctcgcagaaaaagagcgcaggatcgagatcctggagagtgagtgcaaagtagctaaatttagagactacgaggagaaactgatcgtgtctgcctggtacaataagtcacttgccttccaaaagctggggatggagagcaggctcgtgtccggcgggggagcctgctcagacacgggggcgtgtacgcccgctaggagcttcttggcgcaacagagacacattacgaacactcggcgcaatctgtccgtgaaggtacctgccaccacatctgattag

SEQ ID NO: 120173 - DNA, 2061 bp, synthetic construct
  misc_feature 1..2061: note = Description of Artificial Sequence: Synthetic coding sequence
  source 1..2061: mol_type = other DNA
atggcccaggtgttacatcaaattgacgccgcttggtttaacgagtcatggcttagcaggatcaaggaggatgtcggggataactggcggataaaggcatccaacgttaaaaaggttctccaaggaatcatgtcctactatcatgaatttttgggtcagcagattagcgaagccctgatacccgatctgaaccaaattaccgagtgcagcgatcctgtggaactagggaggcttctgcaactcattctcggctgtgccatcaattgcgaaaagaaacaggagcacatccaaaacatcatgacactggaggagagcgttcagcatgtggtgatgaccgctattcaggaactgatgagtaaagagatcctctcttctcctccaaacgatgcggtcggcgagctggaacagcaacttaagagagccctggaggagttgcaagaagccctcgccgagaaagaggagctgagacaaagatgtgaagaactggatatgcaggtaactactctgcaggatgaaaagaacagtctggtgtctgaaaatgagatgatgaacgagaagctggatcagctggatggctctttcgatgaccctaacaccgtggttgccaaaaaatacttccatgcccagttgcaactggagcagctgcaggaagaaaatttccgcctcgaggctgccaaagatgattaccgtgtgcactgcgaggaactggaaaaacaactgatcgagttccagcacaggaatgatgagttaacttccctcgcggaagagacacgcgcattgaaggacgaaattgacgttttaagagcaaccagcgacaaggcaaataaactggagtccactgttgagatatataggcagaaattgcaggacttaaacgatctgagaaaacaggtaaagaccctacaagagactaacatgatgtatatgcacaatacagtctctctcgaggaagagttaaagaaggctaacgccgcccgcacccagctcgagacttacaagagacaggtccaagacttgcacgttaaattatcttcggaaagcaaaagggctgacaccctcgcatttgaaatgaagcggctggaggagaagcacgaagccttgctgaaggaaaaagaacgattgatcgaacagagagatacactcaaagaaactaacgaagagctcagatgcagtcaggtgcagcaggatcatttgaaccagaccgacgcgtctgctacgaaaagctacgaaaatttagctgccgaaatcatgcccgtcgagtaccgcgaggtgtttattcgtctgcagcacgagaacaagatgctccggttacagcaggaggggagcgagaatgagcgcatagaagaacttcaagaacagctggagcagaagcacaggaaaatgaatgagctcgagacggaacaaagactctccaaagagagaatccgggagttgcaacagcaaatagaagatctgcagaagtcactgcaagagcagggttcaaagtcagagggcgagagcagttccaaactgaagcagaagctggaagcccatatggaaaagctgaccgaggtacacgaagaactacagaaaaaacaggagttgattgaggacctgcagccagatattaaccagaatgtccagaagatcaatgaactcgaggcagctctgcaaaagaaggatgaagatatgaaggctatggaggaacgctataagatgtatctggagaaagcaagaaatgtcataaagacattggacccaaaactcaacccagcatcagcagagatcatgctgttacgcaagcagctggccgagaaagagaggcgtatcgaaatcctcgagagcgaatgtaaggtagctaaattcagagattatgaggaaaagctgatagtgtcggcatggtacaataagtcactggcctttcaaaaattggggatggaatcacgattggtgtctggaggcggcgcttgttctgatacgggagcctgtacaccggcacgctccttcctggctcagcaacggcatattactaacaccaggcggaacttgagcgtcaaagtacctgccactaccagtgactag

SEQ ID NO: 120174 - DNA, 414 bp, synthetic construct
  misc_feature 1..414: note = Description of Artificial Sequence: Synthetic coding sequence
  source 1..414: mol_type = other DNA
atggaagagacccagccgccaccccagcccaaactgccactgtgtgactcgttgatgatttggctgcagacctttaataccgctagcccctgtcaggatgtgaaacagttaacatcaggggtggctatggcccaagtcttgcaccagatcgatgctgcttggttcaacgagagctggctgtctcggatcaaggaagatgtcggagataattggcgaattaaagcatcgaacgttaagaaagtgctgcaaggaattatgagttattaccacgagttcctcggacagcaaatcagtgaggcattaattcctgacctcaatcaaattacggaatgttctgaccccgtggaattgggcagattgcttcagcttatcctgggctgcgcgataaattgcgagaaaaagcaggagcattag

SEQ ID NO: 120175 - DNA, 2154 bp, synthetic construct
  misc_feature 1..2154: note = Description of Artificial Sequence: Synthetic coding sequence
  source 1..2154: mol_type = other DNA
atgtccgttgataaggccgaactctgcgggagcctcctcacttggctgcagacgtttcatgtcccctcaccgtgcgcaagcccacaggatctaagcagcggtctagcagtggcgtatgtgctgaatcagattgatccaagttggtttaacgaggcttggcttcagggaatttccgaggatcctggccccaactggaagttgaaagttagcaacttaaaaatggtgctccggtccctcgttgagtactcacaggacgttttagcccacccagtgagcgaggagcatttgcccgatgtcagcttgatcggggaatttagcgaccccgctgaactaggtaaattgcttcagttggtcttgggctgtgcaatatcttgtgaaaagaagcaggaccacatccagagaataatgactctcgaggaatccgttcagcacgtggtgatggaggcaatccaggagctaatgacaaaagatacacccgactccctgtcccctgagacctatggcaacttcgactcccagagccgcaggtactacttcctgtccgaggaggccgaggaaggcgacgagctccagcagaggtgcctagaccttgagagacaactcatgttgctgtctgaggaaaaacagtccctagcacaagaaaatgccggattacgtgaacggatggggcggcctgaaggtgagggaacccccgggttaactgccaagaagctgttgcttctccagtcccagctcgagcagttgcaggaggagaattttcggttagagagcggcagagaggatgagaggctgaggtgcgccgagttggaaagagaagtagctgaactccaacaccgtaaccaggctctcaccagcttagctcaagaggcccaggccctcaaggacgagatggacgagctccgccagagtagcgagcgcgcggggcagctggaggccacactaaccagctgccgcagacggcttggcgagctccgcgagctgagaaggcaggtgcgccagctagaggaacgaaatgctggacacgctgaaagaaccaggcaattggaggacgagcttagaagggccggtagtctgcgggctcaactagaagctcaaaggcgccaggtacaggaactgcaaggccagcggcaggaggaagcaatgaaggcggagaagtggctctttgagtgccgcaacctcgaagagaagtatgagagcgttaccaaggagaaggaaagacttcttgctgaaagagactcgctgagagaagctaacgaagagctgaggtgtgcccagctgcagcctcgtggcctgacccaggccgatcctagcctggacccgacctccactcctgtcgataacctggccgccgagatcctaccagcagaattgcgggaaaccctcctacggctccagctggaaaataagcgattgtgtagacaagaagcagccgaccgcgagcgtcaggaggaactgcaaaggcacctggaggatgcaaacagagcaagacacggactcgagacccagcaccgcctgaaccagcagcagctcagtgaactgcgcgcgcaggtcgaggatctccagaaggccctgcaggagcaagggggaaaaaccgaagatagtatactgctgaaacggaaactcgaggagcacctgcagaaactccacgaggccgacctggaattgcagagaaagcgcgaatacatcgaggaattagaacccccaacggattcctctaccgcccggcggattgaggagctccagcataacctgcaaaaaaaagatgccgatcttagagcaatggaggaacgctaccgtagatacgttgacaaagcacgcatggttatgcaaactatggaacctaagcagaggcctgccgccggtgctcctccggaactgcattcactccgcacacaactgagagagcgtgacgtgcggattcgccacctggaaatggacttcgagaaaagcagatcccaacgggagcaagaagaaaagttactgataagcgcgtggtacaatatgggcatggcattgcagcagcgagcaggcgaagagcgcgccccggctcacgcccaaagtttccttgcccagcaacgcctcgctaccaatagcagaaggggccccctagggagactcgccagcctcaacctccgccccactgataagcactag

SEQ ID NO: 120176 - DNA, 2160 bp, synthetic construct
  misc_feature 1..2160: note = Description of Artificial Sequence: Synthetic coding sequence
  source 1..2160: mol_type = other DNA
atgtcagtcgacaaggccgaactctgtggctctttgttgacctggcttcagactttccacgtcccaagcccttgtgctagtccacaagatctcagttcgggcttagctgtggcctatgtcttgaaccagatcgatccctcatggtttaacgaagcatggttgcagggcatttccgaagacccggggcccaactggaagctcaaggtctcgaacctgaagatggtgctccgaagtttggtcgaatattcacaggatgtactggcccatcccgtcagcgaggagcacttaccggacgtaagcctcatcggcgaattcagcgaccctgcagaactaggcaaacttttgcaactggtcctggggtgcgccattagttgcgaaaagaaacaggatcacatacagaggatcatgactctcgaagaatccgtgcaacacgtcgtgatggaggcgatccaagagctcatgacaaaagacacacctgatagtctttcacccgaaacgtacgggaatttcgattcgcagtcccggagatactacttcttgtccgaagaggccgaggaaggcgatgagctacagcaaagatgcttagatctagaaagacagctgatgctattgagtgaggaaaaacagtcactcgcacaggaaaatgccggacttagggaaagaatgggacggcctgagggggaggggaccccaggcctcacagccaaaaaattactccttctgcaatctcaactcgagcaactgcaagaggaaaacttccgtctggagtccggtagagaagacgagcgcctgcgatgtgccgagctggagcgggaggtggcagaactgcagcaccgtaaccaggcgttgaccagtcttgctcaggaagcccaagcattgaaggatgaaatggacgagcttaggcaatcctcggaacgcgctgggcagctcgaggcgaccctgacctcttgtcgacgaaggcttggtgagttgcgggagcttcggcggcaggtcagacagttggaggagagaaacgccggccacgccgagagaacacgacagttggaggacgaattaagaagggcaggatctctcagagctcagctggaggcacagaggaggcaagtccaggagttgcagggtcagcgtcaggaagaagccatgaaagccgagaaatggctgttcgaatgcaggaacctggaggagaagtacgagtctgtcaccaaggagaaggaacggctattagcagaacgtgactcactgcgagaggccaacgaagagttacggtgcgcgcagctccaaccgcgcggacttacacaggccgatccaagccttgatcctacgagcactccagttgacaatttagcggcagaaatcctgcccgcagagctgcgtgaaactctcctccgccttcagttagagaataagcggctctgccgccaagaagccgctgatcgggaacgtcaggaggagctgcaacgacacttagaagacgcaaaccgtgcacgccacggcctcgaaacccagcaccgtctcaaccagcagcaactctccgagttgagagcccaggtagaggatcttcagaaagccctgcaagagcagggcggcaagaccgaagatgctatttcaatcctcctcaagcgcaagttggaagagcatctgcagaaacttcacgaagccgacctggaactccagagaaaacgggagtatattgaagagcttgaaccccccaccgatagcagcacagctcgtagaattgaagaattacagcacaatctccagaaaaaagacgcagatctgcgagcgatggaggagcgctaccgacggtacgtcgataaggcccgcatggtcatgcagactatggagccaaaacagaggccagctgcgggcgccccgccagaactccacagcctacgtactcagctgcgcgagcgggatgtaaggatccggcatctggagatggattttgagaaaagtcggagtcaaagggaacaagaggaaaagctgcttattagcgcctggtataacatgggcatggctcttcagcagcgtgctggggaggaacgcgcaccagcccacgcacaatctttcctggcccagcagcggttagccacaaattccaggagaggcccactggggcgtctggcctctcttaatctgcgtcccaccgacaagcactag

SEQ ID NO: 120177 - DNA, 2157 bp, synthetic construct
  misc_feature 1..2157: note = Description of Artificial Sequence: Synthetic coding sequence
  source 1..2157: mol_type = other DNA
atgttctcagtcgaatccctggagcgcgcggagctatgtgagtcactactgacctggattcagactttcaatgtggacgccccgtgccagaccgtggaggatttaacaaatggggtcgtcatggcgcaagttctccaaaaaattgacccagcatacttcgatgagaactggctaaatcgcattaagaccgaagtgggggacaattggcgcctgaagatatctaatttaaaaaagattcttaagggtatcctggattataaccacgaaatcctgggccaacagatcaatgattttacgctcccggacgtcaatttaataggcgagcactctgacgctgctgaactgggccggatgctgcagctcatcttaggatgcgcggtgaactgtgaacagaaacaggaatacattcaagccatcatgatgatggaggagtccgtccaacacgtagtgatgaccgccatccaggagctcatgtctaaggagtccccagtgagcgccggtaatgatgcttatgtagacctggatagacagctcaagaagacaactgaggagctgaatgaagcactttccgctaaggaagagatcgctcagaggtgccatgagcttgatatgcaggtagctgctctgcaggaagagaaatccagtctgctagcagagaatcaggtcttgatggaaaggttgaatcagagcgactctatagaggatcctaactcccccgcaggacgaaggcacctgcagctacagacacagctggagcaattgcaggaagagacctttcgactggaggccgccaaagatgactaccgtatccgatgcgaggagctagagaaagagatctccgagctccgacagcagaacgacgagctcaccacattggccgacgaggcacagagcttgaaggatgagattgatgtgctgagacacagcagtgataaagtcagtaagctggagggacaagtggagagttacaagaagaagctggaagacctgggcgacctgagaagacaggttaaattgttagaggaaaaaaatacgatgtacatgcagaacacagtctcactggaagaagagctgcggaaggcgaacgctgctcgtagccagctggagacgtacaagcggcaggtggtcgaactgcagaatcgcctgagcgaggagagtaagaaggccgataagcttgattttgaatataagcgcctaaaagaaaaagttgacagtttacagaaggaaaaagatcgtctgcgaaccgaaagggacagcttaaaggaaacgatagaggagctcagatgcgtccaggcccaggaaggacagctgacaacacagggcctcatgccccttgggtcccaagagtccagcgacagtttggccgcagaaatagtaactccagagatccgggagaagttaattagacttcagcatgagaacaagatgctaaagctcaatcaggagggttctgacaatgagaagattgccttgctgcaaagcctgctggacgatgctaatcttcggaagaacgaactggagaccgaaaatcgcctggtgaaccaacggctgctcgaggttcagagccaggtggaggaactacagaaatctctgcaggatcagggatctaaggccgaagattctgtcttactgaagaagaagttagaagaacacctagagaagttgcacgaagctaacaatgagttacaaaagaagagagccatcattgaggacctcgagcccagatttaataattcatcacttaaaatcgaagaacttcaggaagcactgcggaagaaggaggaggagatgaagcagatggaggaaaggtacaagaaatacctggaaaaagccaaaagcgtgataaggaccctggacccaaaacagaaccagggcgccgccccagagattcaggctctgaagaaccagctccaagaaagggaccggttattccatagcctcgaaaaggagtacgaaaaaactaaaagccaacgggagatggaggagaaatacattgtctctgcctggtacaacatgggaatgacactgcacaaaaaagccgcagaagacagattggcctccactggtagcggacaatccttccttgctagacagcggcaggccacttcttctcggaggtcatatcctgggcacgtgcagccagccaccgcgcggtag

SEQ ID NO: 120178 - DNA, 222 bp, synthetic construct
  misc_feature 1..222: note = Description of Artificial Sequence: Synthetic coding sequence
  source 1..222: mol_type = other DNA
atgtccgctgagactgctagtggccctaccgaagatcaggtggaaatacttgaatacaatttcaacaaggtagataagcaccccgacagcaccaccctgtgcctgattgccgcagaagctggtctatccgaggaagagactcagaagtggtttaaacagcgtctggcgaagtggcggagaagcgagggccttccttctgagtgtaggtccgtgacagactag

SEQ ID NO: 120179 - DNA, 222 bp, synthetic construct
  misc_feature 1..222: note = Description of Artificial Sequence: Synthetic coding sequence
  source 1..222: mol_type = other DNA
atgagcgctgagactgcttcgggtccaacagaggatcaggtcgagatcctggaatacaacttcaataaggttgataaacatccagattccactaccttatgcctcatagcagctgaagccggactgtctgaagaagagactcagaagtggtttaagcaacggttggcaaagtggaggaggtccgaaggtctgccatctgagtgcagatcagttaccgattag

SEQ ID NO: 120180 - DNA, 222 bp, synthetic construct
  misc_feature 1..222: note = Description of Artificial Sequence: Synthetic coding sequence
  source 1..222: mol_type = other DNA
atgagcgccgaaactgcaagcggaccaacagaagaccaagttgagatattggagtataatttcaataaggtggacaaacatcctgacagcacaaccctatgcttgatcgctgctgaagcaggtttgtcggaggaggaaacgcaaaagtggttcaagcagcgcttggctaaatggcgtagaagcgagggcctgccatccgagtgcagaagcgtcaccgactag

SEQ ID NO: 120181 - DNA, 285 bp, synthetic construct
  misc_feature 1..285: note = Description of Artificial Sequence: Synthetic coding sequence
  source 1..285: mol_type = other DNA
atgagcgcagagacagcttcgggcccgacggaagaccaggttgagattctggagtacaacttcaataaggtggataagcacccagactctaccaccctgtgtctcatcgcggccgaggctggcctttctgaagaggagacacaaggatccgacttgatcagtagatctaagatctggcaccctgagtcatcacctcagagggaaggctacccgcacgattctctgccatgcctggccttcgactatttcagtctcctcccaccacaatgcaaggagatggtgtag

SEQ ID NO: 120182 - DNA, 276 bp, synthetic construct
  misc_feature 1..276: note = Description of Artificial Sequence: Synthetic coding sequence
  source 1..276: mol_type = other DNA
atgctgatcttcctgggctgctacaggcggagactggaggaacgggccggcacaatgagtgctgagactgcatcaggtcccactgaagaccaagtggagatcctggagtataactttaacaaggtggacaaacatccagattcaacgactctctgcctgatagctgccgaagctggcctgtcagaggaggagacgcagaagtggtttaagcagcgtctggctaaatggagaagaagtgaaggcctgccaagtgagtgtcgctctgttaccgattag

SEQ ID NO: 120183 - DNA, 222 bp, synthetic construct
  misc_feature 1..222: note = Description of Artificial Sequence: Synthetic coding sequence
  source 1..222: mol_type = other DNA
atgtctgccgaaacggcatccggtcctacagaagatcaagtggaaatacttgagtataactttaacaaggtggataaacacccggactccacaactctatgtctaattgctgcagaagccgggctttccgaggaggagacccagaaatggttcaagcagcggttggcaaagtggcggcggagcgaggggttgccgtcagaatgtaggtccgtgaccgactag

SEQ ID NO: 120184 - DNA, 285 bp, synthetic construct
  misc_feature 1..285: note = Description of Artificial Sequence: Synthetic coding sequence
  source 1..285: mol_type = other DNA
atgtcagccgagacagctagcggcccgactgaggatcaggtggagatcctcgaatataatttcaacaaggtggacaagcacccggattcaactacgctgtgtctgattgctgctgaggccggactgagcgaggaggagacgcaaggtagcgaccttatcagccggtccaagatctggcaccccgagtccagtccacagcgggagggctacccgcacgacagcttgccctgcctcgctttcgactatttctccctcctgccacctcagtgcaaagaaatggtctag

SEQ ID NO: 120185 - DNA, 222 bp, synthetic construct
  misc_feature 1..222: note = Description of Artificial Sequence: Synthetic coding sequence
  source 1..222: mol_type = other DNA
atgtctgcagagactgcatctggtcctactgaggaccaagtcgagattctcgagtacaactttaataaggtagataagcatccagattcgaccacactctgcctaatcgccgctgaggcagggctgagtgaggaagaaactcagaaatggttcaaacagcgcttggccaagtggcggagaagcgagggcctcccttcagagtgccgatcggttacagattag

SEQ ID NO: 120186 - DNA, 276 bp, synthetic construct
  misc_feature 1..276: note = Description of Artificial Sequence: Synthetic coding sequence
  source 1..276: mol_type = other DNA
atgttaatttttctggggtgttacaggagaagactcgaagagagggctggtacaatgagcgccgagaccgcttccggacctacagaggatcaagtcgagattctggagtataacttcaataaagtcgacaaacaccccgattctaccactttatgcctaattgcagctgaagctggactcagtgaagaagagacccaaaaatggtttaaacaaaggctggctaagtggcggagaagcgagggactcccgagcgaatgtaggtcagtaactgattag

SEQ ID NO: 120187 - DNA, 285 bp, synthetic construct
  misc_feature 1..285: note = Description of Artificial Sequence: Synthetic coding sequence
  source 1..285: mol_type = other DNA
atgagcgcagaaaccgctagcggtccaacagaggaccaggttgagatcctggagtacaacttcaataaagtggacaaacatcctgacagcactacgctttgtctaatcgccgctgaagcgggactttccgaggaagaaacgcagggaagtgacctgatcagcaggagcaagatctggcacccagaatccagcccacagcgcgaaggatatcctcatgatagtctcccgtgtctcgcatttgactattttagtctgctcccgccacagtgtaaagagatggtgtag

SEQ ID NO: 120188 - DNA, 222 bp, synthetic construct
  misc_feature 1..222: note = Description of Artificial Sequence: Synthetic coding sequence
  source 1..222: mol_type = other DNA
atgtcggccgagacggcatctggtcctacagaagatcaggtggagatactggagtacaactttaacaaggtggataagcatcctgattctaccaccttgtgcctgattgctgcagaggcaggtttaagcgaggaggaaacacagaagtggttcaagcagagacttgccaagtggcgtaggtccgaaggactcccgagtgaatgtaggagcgtgaccgattag

SEQ ID NO: 120189 - DNA, 222 bp, synthetic construct
  misc_feature 1..222: note = Description of Artificial Sequence: Synthetic coding sequence
  source 1..222: mol_type = other DNA
atgagcgctgagactgcaagcgggcctacagaggaccaggtggagattctggaatacaacttcaacaaggtggataagcatcctgactccactaccctgtgtctgatcgctgccgaagctgggctatccgaagaggaaacccagaagtggtttaagcagaggttggcgaagtggagaagatctgagggcctgcccagtgagtgccgctcagtcacagactag

SEQ ID NO: 120190 - DNA, 339 bp, synthetic construct
  misc_feature 1..339: note = Description of Artificial Sequence: Synthetic coding sequence
  source 1..339: mol_type = other DNA
atgctgatctttttgggatgttaccggcgcaggctcgaggagcgtgccgggaccatgagcgctgagactgccagcggtccaaccgaggaccaggtcgaaattttggagtataacttcaacaaagtggataagcaccctgattcgacgactctgtgtctgatcgcggcagaggcaggtctgtccgaggaagagactcagggttccgacctgatatccaggagcaaaatatggcaccccgaatcatctccacagcgtgagggatatcctcacgatagcctgccctgtctggctttcgactatttctcgctgctgcctcctcagtgtaaagaaatggtgtag

SEQ ID NO: 120191 - DNA, 222 bp, synthetic construct
  misc_feature 1..222: note = Description of Artificial Sequence: Synthetic coding sequence
  source 1..222: mol_type = other DNA
atgtccgccgaaactgcctccggacccacagaagatcaggtcgagattctggagtacaactttaataaggtggacaagcaccccgattcgacaactctgtgcctgatagctgccgaggcaggcctctcggaggaggagacccagaagtggtttaaacaacgtctagcaaaatggcggagaagcgagggcctaccatctgagtgcaggtccgtcactgactag

SEQ ID NO: 120192 - DNA, 222 bp, synthetic construct
  misc_feature 1..222: note = Description of Artificial Sequence: Synthetic coding sequence
  source 1..222: mol_type = other DNA
atgtctgcggagactgcgagtgggccaacagaggaccaagttgaaattctcgagtacaacttcaataaagtagacaaacatcccgactctactaccctgtgcctcattgccgctgaggccggcctgagcgaagaagagacgcagaagtggtttaaacagagactggccaaatggcggaggtctgaaggactacccagcgagtgtcggagcgtgaccgactag

SEQ ID NO: 120193 - DNA, 222 bp, synthetic construct
  misc_feature 1..222: note = Description of Artificial Sequence: Synthetic coding sequence
  source 1..222: mol_type = other DNA
atgtccgctgaaaccgcaagcggacctaccgaagaccaagtcgaaattcttgagtacaacttcaacaaggtggacaaacatcctgactcaactacactgtgccttatcgcagcagaggcagggctgtccgaggaagagacacagaagtggtttaagcagcggcttgctaaatggcggcgttccgagggcttgccctcagaatgtcgtagcgtaaccgattag

SEQ ID NO: 120194 - DNA, 144 bp, synthetic construct
  misc_feature 1..144: note = Description of Artificial Sequence: Synthetic coding sequence
  source 1..144: mol_type = other DNA
atgtcggccgaaacagcatccggtccaacagaggatcaagtcgaaatcctggagtacaacttcaacaaagtcgataagcatcccgacagtacaacactttgtctgattgccgctgaggctggtctgtcagaggaggagacctag

SEQ ID NO: 120195 - DNA, 1164 bp, synthetic construct
  misc_feature 1..1164: note = Description of Artificial Sequence: Synthetic coding sequence
  source 1..1164: mol_type = other DNA
atggctacggctcaactgcagcgcacccctatgtccgctctggtgttccctaacaagatctcaacagagcaccagtccctggttcttgtgaaacggctcctggccgtgtccgtgtcctgcataacctatttgcgcggaatattccctgagtgtgcgtacggtacccggtaccttgatgacctttgtgtcaagatactgagagaggacaaaaattgtcccgggtcaactcagttggttaaatggatgcttgggtgttacgacgcgctgcagaagaaatatgtatatacgaatcctgaagatccacaaacaattagcgaatgctatcagtttaaattcaaatacactaacaacggcccacttatggatttcatttccaagaaccagagcaatgagtcttcaatgttgtccactgacaccaagaaggcaagcatactgctgatacgaaaaatctacatacttatgcagaacttgggccctctccctaatgatgtatgtcttactatgaaactcttctattacgacgaggttactcctccagactaccagccaccgggcttcaaagacggagattgtgaaggtgtgattttcgagggcgaaccaatgtatctcaatgtcggagaggtgtcaaccccttttcacatcttcaaggttaaagttacaaccgaacgcgaaagaatggagaacatcgattccacaatcctctctcctaaacagattaagacacctttccagaagatcctgcgcgacaaggatgttgaggatgaacaggagcactatacatccgacgacctggatattgagaccaaaatggaggagcaggaaaaaaaccctgcgtcttcagagctggaagagccatccctcgtatgcgaagaagacgaaattatgcggtctaaagaaagtcccgatctatctatatcacactctcaggtggagcaacttgtgaacaagactagcgagctggacatgagcgagagcaagacccgctccggaaaagttttccagaacaagatggccaacgggaatcagccagtcaaatcatcaaaggaaaaccgaaaaaggagtcaacacgaatcaggccggatagttctgcatcacttcgacagctcgtcacaagagtccgtgccaaaacggcgaaaattcagtgagccaaaggaacacatttag

SEQ ID NO: 120196 - DNA, 1185 bp, synthetic construct
  misc_feature 1..1185: note = Description of Artificial Sequence: Synthetic coding sequence
  source 1..1185: mol_type = other DNA
atggcaaccgcccaattacagaggaccccaatgtcagccttagtatttcccaataagatcagcaccgagcatcaaagtctggttcttgtgaagagactgcttgcggtctcggtttcttgcatcacctatttgcgtggcatttttcccgagtgcgcctacggtaccaggtatctggatgatctgtgcgtaaaaatcctgagagaagacaagaactgcccaggctccacccagctagtcaagtggatgctcggatgctacgatgcgctccaaaagaaatatctccggatggtggtcctggccgtttataccaacccagaggatccccagacgattagcgaatgttaccaattcaaatttaagtacactaacaacggccccctgatggattttatctccaagaaccaaagcaatgagtcttccatgctgtcgactgatacaaagaaagccagtattctgctaattaggaagatttatattctcatgcagaatttgggccccctgcctaacgacgtctgtctgaccatgaagttgttctattacgacgaggtcacgcctccggattatcagccaccgggcttcaaggacggcgactgtgagggagtaatatttgagggagagcccatgtaccttaacgttggcgaggtttctaccccattccatatattcaaagtgaaggttaccactgagagggagaggatggagaacattgattctactattctgtctcctaagcaaatcaagacaccattccagaaaattctgagagacaaggatgtggaagatgaacaggagcactacactagtgatgatctggacatcgagaccaaaatggaagaacaggaaaagaatccagccagctccgagcttgaggaacccagtctggtgtgcgaagaggacgagatcatgcgcagtaaggaaagtcctgacctgtccatctcacactcccaggtcgagcagctggtgaacaagacgtccgaactggatatgagcgaatcaaaaacgcgtagtggcaaagtgtttcagaacaagatggccaacgggaatcaacctgtaaagtcctcaaaggaaaacagaaagcgctcccaacacgagagcgggcgtatcgtcttacaccactttgactcgtcatcacaagaaagcgtccccaaaagaaggaagttctctgaacccaaggagcacatctag

SEQ ID NO: 120197 - DNA, 573 bp, synthetic construct
  misc_feature 1..573: note = Description of Artificial Sequence: Synthetic coding sequence
  source 1..573: mol_type = other DNA
atgaggctctggaacaagattagccggtggatgctgggctgttatgatgcactccagaaaaaatatctccgcatggttgtgttggctgtttacaccaatcccgaagatccgcaaacaatatctgagtgctaccagtttaaatttaaatataccaacaacggaccattaatggacttcatttccaagaatcagagtaacgaatcaagcatgctctcaacagatacgaaaaaagcaagcattctgctgatacgcaagatatacattttgatgcagaatctgggccctctgcctaacgacgtttgtctgactatgaaactgttttattacgacgaggtaacaccgccggactaccagcccccaggatttaaggatggagattgtgaaggcgttatattcgaaggggagccaatgtatctgaatgtgggagaggtatccactccgtttcatatcttcaaggtcaaggtgaccacggaacgcgagaggatggaaaacatcgactccactattcttagcccaaagcagattaagactccattccaaaaaattctgcgcgataaggatgtagaagattag

SEQ ID NO: 120198 - DNA, 972 bp, synthetic construct
  misc_feature 1..972: note = Description of Artificial Sequence: Synthetic coding sequence
  source 1..972: mol_type = other DNA
atgcggttgtggaataaaattagccgatggatgctgggctgctatgatgccctgcagaagaaatatctcaagatcatggagctcacagtgtacacgaacccggaagatccccagactatatcggaatgttaccaattcaagttcaagtataccaataacggacctctgatggatttcatttctaaaaaccagtcaaatgagtcttccatgttgtccacagacactaaaaaggccagcattctgctgatcagaaagatctacattctgatgcagaacctggggcccctgcccaacgatgtttgtctcaccatgaagctgttctattacgatgaagtcacacctcccgattaccaaccgcctggattcaaagatggcgattgcgaaggggtgatattcgaaggagagcccatgtacttaaacgtgggggaagtgtcaacaccgtttcacatttttaaggtaaaagtcaccacagagagggagagaatggagaatatcgattctacaatcttgtctccaaaacagataaagacgcccttccaaaagattctgcgcgataaggacgttgaggatgagcaggagcactacactagcgacgacctggatatcgaaacaaagatggaggaacaggagaaaaaccccgcctcatcagaacttgaggagcccagcctggtatgtgaggaggacgaaataatgcggtctaaagaaagtccagacctgagcatctcccatagccaggttgagcagttagtcaacaaaacctctgaattggacatgtccgaaagtaaaactagaagtggtaaggtgttccagaacaaaatggcaaatggcaatcagcccgtcaaatcctccaaagagaatagaaagcgatcccagcatgagtcaggcaggatcgtcctgcatcattttgattcatcttcccaggagagcgtccccaaacggagaaagtttagcgagcctaaggagcacatctag

SEQ ID NO: 120199 - DNA, 1185 bp, synthetic construct
  misc_feature 1..1185: note = Description of Artificial Sequence: Synthetic coding sequence
  source 1..1185: mol_type = other DNA
atggcgaccgcccaactccagcgcaccccaatgagcgcccttgtgtttcccaacaaaatttcgacagaacaccaaagcctggtgttggtaaagaggctcctggctgtttccgtgtcctgcataacatacctgaggggtatttttccggagtgcgcctatggcactcggtacctggacgacctgtgtgtgaagattctcagagaagacaaaaattgcccaggatcgactcagctggttaaatggatgctggggtgttacgatgctctccagaaaaagtatctgaagatcatggaactgacggtatatacgaatccagaagatccacagaccatatcagagtgctatcagttcaaattcaagtacacaaataacggccctctgatggattttatctccaaaaatcagtctaacgagtcttcgatgctgagtacggataccaagaaggcgtctatccttctgatccggaagatatatattctgatgcagaatttaggcccacttcctaatgatgtttgtctcacgatgaagctgttttattacgacgaggtcactcccccagattaccagcctccggggttcaaggacggtgactgcgaaggcgtgatttttgaaggagaacccatgtatctcaatgttggcgaagtaagcactccattccacatttttaaggtgaaggtgacaaccgaacgagaacggatggagaacatagacagcacaattctgtcccccaaacagatcaaaaccccatttcagaagattctgcgggataaggacgttgaagacgagcaggaacactacacgagcgatgacctggacatcgaaacaaaaatggaagagcaagaaaaaaacccagctagcagtgagcttgaagagccttcgctggtgtgtgaggaggatgaaattatgcggtctaaagagtcacctgacctcagcatttctcactcccaggtggagcagctggtgaacaaaacatctgagcttgatatgtcagaaagcaagacccgtagcggcaaggtgttccagaacaaaatggccaacgggaaccaaccagtaaaaagctctaaggaaaatcgcaagcgaagccagcacgagagcgggcggattgtgctgcatcacttcgacagctcaagtcaagagtcagtgccgaagagacggaagttctcagagccaaaggagcacatctag

SEQ ID NO: 120200 - DNA, 945 bp, synthetic construct
  misc_feature 1..945: note = Description of Artificial Sequence: Synthetic coding sequence
  source 1..945: mol_type = other DNA
atgcgtctatggaataagatctcccggtggatgttgggatgctatgacgctctccaaaaaaagtaccttcgcatggtagtgctggccacaatctcagagtgctatcagttcaagtttaagtacacgaacaacggcccattgatggattttattagtaagaaccagtccaatgagtcctccatgctatctaccgatacaaaaaaagcaagcatccttcttatccgaaagatttacatcctgatgcagaatctgggtccgctccctaatgatgtgtgtctcacaatgaagctcttttattatgacgaggttaccccccctgactaccagccaccaggatttaaagacggagattgcgagggggtgattttcgaaggggaaccgatgtatctgaacgtgggtgaagttagcaccccgttccacattttcaaggtgaaagtgacaacggaaagggagcgtatggaaaacattgattctacaatcctgtcccctaagcagattaaaacacctttccagaagatcctgagggataaagacgtcgaggacgagcaggaacattacacaagtgatgacctggacatcgagaccaaaatggaagagcaggagaagaatccagcaagttctgaacttgaggagccaagtctggtgtgtgaagaggacgaaatcatgaggtctaaggaatcgcccgatctgtcaatctcccactctcaggtggagcagctcgtcaacaagacctcagaactggacatgtctgagtccaaaacaaggtcaggtaaagtatttcagaataaaatggcaaatggcaatcaacccgtgaagagctctaaggagaaccggaagcgttctcagcatgaatctggacgcatcgtgttacaccacttcgactccagctcccaggaaagtgtgcctaagcggcgcaaattctctgaaccgaaggagcatatctag

SEQ ID NO: 120201 - DNA, 495 bp, synthetic construct
  misc_feature 1..495: note = Description of Artificial Sequence: Synthetic coding sequence
  source 1..495: mol_type = other DNA
atgcgcctatggaataagattagtagatggatgctgggatgctacgacgccttacaaaagaagtatgtatatacaaatccagaggatcctcagacaatctctgagtgctatcagtttaagttcaagtatacgaacaacggccccctcatggatttcattagcaaaaatcagtccaatgagtcgagcatgctctccacggacactaaaaaggcaagcatacttctgattcgcaaaatttacattcttatgcagaatctaggtcccttaccgaatgacgtgtgcctgactatgaagctgttttattatgatgaagtgactcctccagattaccagccccctggtttcaaggacggcgactgcgagggcgtaatattcgaaggagagccaatgtatctgaatgtcggcgaggtgtcgacaccatttcacattttcaaagtaaaggtgacaactgaaagggagcgcatggagaatattgactctacaatacttagctag

SEQ ID NO: 120202 - DNA, 945 bp, synthetic construct
  misc_feature 1..945: note = Description of Artificial Sequence: Synthetic coding sequence
  source 1..945: mol_type = other DNA
atgagactgtggaacaaaattagccgctggatgctcggatgctacgacgctttgcagaagaagtatttaagatatttcctttttaaaaccatctcagaatgttatcagtttaagtttaagtacaccaacaacggccccctaatggattttatcagcaaaaatcagagtaacgagtcaagtatgctttctactgataccaaaaaggcaagcattttgctgatcaggaaaatctacatcctgatgcagaacttggggccgctgccgaacgatgtttgcctgactatgaaactgttttactatgatgaggtcacgcccccggactaccagcctcccggattcaaagatggcgattgcgaaggggtaatttttgagggcgaacctatgtaccttaatgtaggggaggtgagcacaccttttcatatttttaaggttaaggttacgacggaaagggagcggatggagaacattgattctactatcctttctcccaagcagatcaaaacaccatttcagaagattctgcgcgacaaggacgtcgaggatgagcaagagcactacactagtgacgatttagacatagagaccaaaatggaagaacaggaaaaaaatccagcctcaagcgaacttgaagaaccttcactcgtatgcgaggaagatgagatcatgaggtccaaggagagccctgatctctccatcagccatagccaagtcgaacagcttgtcaacaagaccagcgagctggacatgtccgagagcaagacacgaagtggcaaggtttttcaaaacaagatggcaaatggcaaccagcctgtcaagtccagcaaggagaaccggaaacgtagtcagcacgagagcggacgcatcgtgctacatcactttgactcctccagccaagagtctgtcccaaagaggcggaaattctcagaacccaaggagcacatctag

SEQ ID NO: 120203 - DNA, 6108 bp, synthetic construct
  misc_feature 1..6108: note = Description of Artificial Sequence: Synthetic coding sequence
  source 1..6108: mol_type = other DNA
atggcatccgccgtctccccagccaatcttccagctgtgttactccaaccaaggtggaagcgcgtcgtcggatggtctggacccgtccccagaccacggcatgggcatcgcgctgtggctatcaaagaactaatcgtggtgttcggcggagggaatgaaggaattgtcgacgagttgcacgtgtataataccgctacgaaccagtggttcattccagccgtgcgcggcgatattccacccggctgcgccgcttatggtttcgtctgtgacggaacacgcctactagtcttcggagggatggtggagtacgggaagtactccaacgatttgtacgagcttcaggcatctagatgggagtggaaacggttaaaagctaaaacgccaaaaaatggacctcctccatgccctagactcgggcattcgttctccctggttggcaataagtgctatttattcggaggccttgctaacgatagtgaagaccccaagaataacattcccaggtatctgaacgatctttatattctcgagcttcgcccgggtagcggcgtcgtggcatgggatattcccattacctacggcgttctgcctccaccacgcgagagtcacaccgctgttgtgtacactgagaaggacaataagaagtcaaaactggtcatctatggaggaatgagcggatgcaggctcggagacctctggaccttggatatcgacaccctgacatggaacaagcccagtctgtcaggagtcgcacccctgccacgatctctgcacagcgctacaaccattgggaataagatgtacgtgttcggcggatgggtacctttggtgatggatgacgtcaaagtggcaacccacgagaaggagtggaaatgtacaaacacgctggcctgtctgaatctggatacaatggcctgggaaacgattctgatggacacactagaggacaacatcccccgggcacgcgctggccactgcgcggtggcgataaacacgagactatacatttggagcgggcgcgacggctatcggaaagcctggaacaatcaggtgtgctgtaaagacctgtggtacctagagaccgaaaagccccccccccccgctcgggtccagttggtaagagcaaacacaaattccttggaggtcagttggggggccgtggcgaccgcagactcatacctcttgcagctgcagaagtacgatatccccgctactgccgcgacagctacctcccctactcctaatccagtgccatccgtgccagcgaaccctcccaagtctcctgctccggctgccgccgcaccagctgtgcagcccctgacccaggttggcattaccttgctccctcaagcagcccccgctcctcctaccacgaccactatccaggtcttacccactgtgccgggcagttctatttccgtgcccaccgcggctaggacccagggagtccccgccgtgttaaaggtgaccggaccacaggcaaccaccgggacacccttggtgacaatgcgccctgcatcccaagccggtaaagcacctgtaactgttacgagcttgcctgctggagtgaggatggtcgtgcctacccaaagtgcccaaggcactgtcattggctctagtccacaaatgagcggaatggcagcactagcagctgccgcagctgccacacaaaaaatacctccttcaagcgcacctactgtcctctctgttcccgcagggaccaccatcgtcaagactatggccgttacgccaggaactacaacattgcccgctacggttaaagtagcatctagcccagtcatggtgagtaatccagccaccagaatgctgaaaaccgcagctgctcaggtggggacaagtgtttcatcagccaccaacacctcaacacggccgattatcacagtccacaaatccggcaccgtcacagtggctcagcaagctcaggtcgtgaccacagtggtgggaggtgtgacaaaaacgattacattagtgaaaagccctatttccgtcccaggaggttctgctttgatttccaacctgggcaaggttatgtccgtcgtccagacaaagcctgtccagacatccgctgtaactggtcaagcttctaccggccccgttacacagatcattcagaccaaaggaccacttcccgcaggaaccattctgaaattggttactagtgcagacgggaagccaactactattatcacaacaacacaggcctctggcgcaggaaccaaacccacaattctggggatttcaagcgtctccccttctactactaaaccagggactactaccatcattaagaccatcccaatgtcggctattattacccaggccggagccacgggcgtgaccagtagcccaggaatcaagtctcctatcacaataattaccacaaaggttatgacatctggcacaggtgccccagccaagatcatcaccgccgtgcctaagatcgctacaggacacggccaacagggagtcactcaggtcgtgttaaaaggcgcccctgggcagccaggaacaatcctgaggactgtgcccatgggtggtgtccgcctggtcacccccgtgaccgtgagtgcagtcaaaccggcagtgacaaccctcgtggtaaagggaacgacgggcgtaacaaccctgggaaccgtaacagggacagtgtccacaagcctagctggcgccggaggtcactccacatctgcttcacttgccacacctatcaccacactgggaaccattgctaccctcagttcccaggtcatcaatcccacagcaataaccgtgtccgcggcgcagactacgctcacagcggctggagggttgactacgcccactatcaccatgcagcccgtttcccagccgactcaggtgaccctgatcactgcccccagtggggtggaggcccagccggtacatgaccttcccgttagcattcttgccagccccactactgaacaacccacagcaactgtgacaatcgctgacagcgggcagggggacgttcagccaggcaccgtgacactggtgtgctccaatcctccctgcgagacccatgagacaggaactacaaacacggcgaccaccacagtggtcgccaacttgggaggacatcctcagccaacgcaggtacagtttgtgtgcgatcgacaggaagcagcagcatcattggtgaccagtacggtgggacagcagaacggctcagtggtgcgagtctgctccaatccaccctgtgagactcatgagaccgggaccactaacacagcaacaactgctacgtcgaacatggcaggacagcacgggtgcagcaatcctccctgtgagacccatgagaccggtacgactaatactgcaaccaccgccatgagtagcgtgggagccaaccaccaacgagatgccagaagggcctgcgcagccggcacaccagcggttattaggataagtgttgctactggggcactcgaagccgctcaagggagtaaatcccagtgccagacacgtcagacaagtgctacatcaaccacgatgaccgttatggccacaggcgctccatgcagcgccggccctctgctgggaccctctatggctcgggagccgggaggcagaagcccggcctttgtccaactggctcccctctcctctaaggtgcgcctttctagcccatcaatcaaggatttgcccgccggacgacactcacatgctgttagcaccgcggccatgacacgttcttctgtaggggcgggtgagcctcgcatggcccccgtttgtgaaagtcttcaaggtggctctccttcgacgaccgtgactgttacagcccttgaggcattgctctgtccttctgcaactgtgacccaggtgtgtagcaaccccccatgcgaaacccatgaaacagggacgactaataccgccaccacatccaacgcagggagtgcacagcgggtgtgcagtaaccccccctgtgagacccacgaaacagggactactcataccgcgaccactgccacatccaacggggggaccggccagcccgaggggggacagcagccgcccgccggcagaccctgcgaaacccatcaaactacctccacaggtacaacaatgagcgtctccgtgggagcactcttgcccgacgctacctcgagccaccgaacggtcgaaagcggtctggaggttgctgcggctccctccgtcaccccccaggccggcactgctttactggctcctttccctacgcagcgcgtgtgtagcaatcccccttgcgaaacccacgaaaccggtactacccacacagcaaccacagtgacatctaatatgtcgagtaatcaggacccccctccagcagcttcagaccagggggaggtagaatctactcagggtgacagtgttaacattacctccagttctgccattacaacaactgtttctagcaccctgactagggcggtcaccacagtgacccaatctacaccggtgcctggcccctccgtgccaccaccagaagagctacaggtaagtcctgggcctcggcaacagctgcctcctcgccagttgcttcagagtgccagcactgctctgatgggagagtccgcagaggtcctctccgcttcacagacccctgagttaccggcagctgtcgatctgagttctaccggagagccatcatcggggcaggagagtgctgggagcgccgtcgtggctacggtcgtagttcagccaccacctccgacacagtctgaagtcgatcagctgtcccttcctcaggagctcatggccgaagctcaagcggggaccacaaccctgatggttacgggcctgaccccagaggagctcgctgtcacagcggcagcagaagcggccgcgcaagctgctgcaactgaggaagcccaggctttggccatccaggccgtgctgcaggccgcccaacaggccgtcatgggaacaggcgagcctatggacacctccgaagctgccgctaccgtgacacaggctgagctgggacacctctcagccgagggacaggaaggacaggccactaccatcccaatagtactgacccagcaagaactcgccgcactcgtccagcaacagcaattgcaagaggcccaggcgcagcagcaacaccatcacctccctaccgaggctctcgccccggcagatagcctcaacgatcccgccatcgaaagcaactgcctcaacgaactcgctggaactgtgcccagcaccgttgccctactgccatcaacagccacggagtccttggcgccctctaacacctttgtcgcacctcaacccgtggtcgtggcctcccctgctaaactacaagcagcagctacattgaccgaagtggccaacggcattgagagcttgggagtcaaaccagatctgccaccaccaccatccaaggctcccatgaaaaaggagaaccagtggtttgacgttggggtcattaagggcacaaacgtgatggttactcactacttcttaccccctgatgatgcggtcccttcagacgacgatctaggcactgttccagactacaaccaactgaagaaacaggaactccagccaggcactgcatataaattccgggtggctggcatcaatgcatgtggcaggggtcctttctctgaaatctcagcgttcaaaacttgtctgcccggcttcccaggcgctccctgtgctatcaagatttccaaatcgccagatggtgctcacctcacatgggaacccccatctgtgacaagcggaaaaatcattgagtactctgtgtacctggccattcagtcctcacaggccggcggagaattaaagtcttccaccccagctcaacttgcgtttatgcgagtatactgcgggcctagtccttcatgcctggttcaatcgagtagcttgagcaatgcacatattgactatacaaccaagcccgccatcattttccggattgccgcacggaatgagaaaggctatgggccagcaacacaggtgaggtggctccaggagacttccaaagattcaagcggaacaaaaccagccaataagagacctatgtcaagtccggaaatgaagagcgctcctaaaaaatccaaggccgatggacaatag

SEQ ID NO: 120204 - DNA, 5901 bp, synthetic construct
  misc_feature 1..5901: note = Description of Artificial Sequence: Synthetic coding sequence
  source 1..5901: mol_type = other DNA
atggccagtgctgtgtccccggctaatttgcctgccgtgctcctgcaacccaggtggaagagagtcgttgggtggtctggcccagtccctaggccacggcacgggcaccgagctgtcgccataaaagagctgatcgtggtttttggaggaggcaatgagggaatagtggatgaactgcatgtgtacaacacagcaaccaaccagtggtttataccagcagtgcgaggcgatatccctcccggctgtgctgcctacgggttcgtatgtgatgggaccaggctgctcgttttcggcggcatggttgagtatgggaaatactccaacgacctgtacgaacttcaagctagcagatgggagtggaagaggctaaaggctaaaacaccaaaaaacgggcctcccccgtgtccccgactaggccattccttctcccttgtcggcaataagtgttatctcttcggtggcctcgccaacgattctgaggacccgaagaataacattcctaggtatctgaatgatctgtacatcctcgaactcaggcctggatccggcgtggtggcctgggatatcccaattacatacggcgttctgcctcctcccagggaaagtcacacagctgtggtgtacacggaaaaagacaataagaagtctaagctggtcatctacggaggcatgagcggctgccgcctgggagacctgtggaccttggatatcgatacccttacttggaataagccgtcccttagcggcgtggcaccgttaccaaggagcctgcattcagccaccacaatcgggaataagatgtacgtttttggcggatgggtacccctggttatggatgacgtcaaagtggctacacacgaaaaagaatggaaatgcacaaataccttggcttgtcttaatttggacaccatggcatgggagaccatcctcatggacaccttggaagataacattccaagagcccgagccgggcattgtgcagtggcaatcaacaccagactgtatatttggtcaggtcgagacgggtataggaaggcgtggaataaccaagtatgttgtaaggatttatggtacctagagactgaaaaacctcccccacctgcacgggtccagcttgtgcgtgcgaataccaactctcttgaggcggcccctgcacctccaacgaccactacaattcaagtattgccgactgttccgggctcgtcaatctccgtgccaaccgccgccaggacccagggcgtgcccgcagtcctcaaggtgaccggccctcaggccacaactgggacaccattggtgacgatgcggcccgctagccaagctggaaaagctcccgtcacagtcaccagcttgcccgcaggcgtccgtatggttgtgccaacacagtccgctcagggtacagtaataggaagttctccccaaatgagcggtatggccgccctcgctgcggccgcagcagccacacagaagatccctccctccagtgcccctactgtgctcagcgtccccgctggaaccaccatcgtgaaaaccatggctgttacccctggcacaactacgttgcctgccacagtaaaggtcgctagttcaccggttatggtgagcaacccagccacaaggatgctgaagaccgctgccgctcaagtgggaacaagcgtctcaagtgccacaaataccagtacccgccccattattaccgtgcacaagtccggaaccgtgaccgtggcccagcaagctcaagtcgtgacaaccgtggtcggcggcgtcaccaaaaccatcacgctggtgaaatcccctatcagcgttccaggaggttctgcactcatctctaacctggggaaagtaatgtcagtggtgcagactaaaccagtgcagacctctgctgtgaccggccaggccagcacagggcccgtcacacaaatcatacagaccaaaggcccattgcccgccggcacaatcctgaagttagtgacttccgctgatggcaagcctacaactatcattactacaacgcaagcctcgggtgctggcacaaagcctacgattctcggcatttctagcgtgtcaccctcaacaactaagcccggaaccaccactattattaaaactatcccaatgagcgccattattacccaggcaggagcaacaggcgtaaccagctcccccggcattaagtctcccatcaccatcattaccacgaaagttatgacctccggaacaggcgcccccgcgaaaattattaccgctgtacccaagatagcaacaggtcacggacagcaaggagtgacccaggtcgtgctgaaaggagctcccggacagcctgggactatacttagaacggtgcctatggggggagttcgccttgtaactcctgtcacggtcagcgcagttaaaccagccgtgacaaccctggtggtgaaagggaccacaggtgttacgaccctgggaaccgtcaccgggactgtctcaacctccttggcgggcgcaggggggcactccacatcagcttctcttgcgactcctattaccactctaggtactattgccactctgagttcgcaggtgattaacccaactgccatcacagtatcagccgcacagaccaccttgacagctgccgggggtctaaccacccccaccatcaccatgcaaccagtttctcagcctactcaagttacattaatcacagccccttcaggagtggaggcccaaccagttcacgacctccctgtgtcaatcctggcttctcctactaccgaacaacccaccgcaactgtgactattgctgattctggccagggcgatgtccagccaggcacagtgactctggtttgttcgaaccccccgtgcgaaacacacgagaccggcaccacaaatacagctactacgactgttgtggcaaaccttgggggacaccctcagcccactcaggtgcaatttgtttgtgatcgccaggaggcggccgcatcattagtgacctctaccgtaggccagcagaacgggagtgtggtgcgggtgtgcagtaatcctccctgcgaaacccacgagaccggcacaacaaataccgcaaccaccgccaccagcaacatggcaggccagcatgggtgctcaaacccaccctgcgaaacacacgagactggtactaccaatacagcgactacagcaatgagctccgtcggtgccaatcatcagcgggatgctcgaagggcttgcgccgccggaactcctgccgtgattcgaataagtgtggcaacaggtgctctggaggccgcacaaggctctaaatctcagtgccagacgcggcagactagtgcaacaagcacaactatgacagtgatggccactggtgccccgtgctctgcaggaccgctgctgggaccaagcatggctcgggaacctggtggtcgctcacccgcgttcgtgcagctcgcgccactgtcttctaaagtgcgtttatctagcccttctataaaggatctcccagcgggcaggcactcacatgctgtcagcactgccgccatgacaagatcatctgtgggcgcaggagagcctcggatggcccctgtctgcgagtcgctccagggaggtagcccttcaaccactgtgaccgtcactgcattagaagctctcctgtgcccatctgccaccgtgacacaagtctgtagcaatcctccctgtgaaacccacgaaactggtactactaacactgccactactagtaacgctgggtcagctcagagagtatgttctaaccccccatgcgagactcatgagacaggcactacacatacagccactactgccaccagcaacgggggcacaggacagcccgaaggaggccagcaaccccctgcaggccggccgtgtgagactcaccagaccacatcaaccggaacaacgatgagcgtgtctgtaggggctcttctgcccgatgctacttcctctcatcgtacagtggagagcggcctggaagtcgctgcggcgcccagcgttacacctcaggccgggacagccctactggcgcctttccctactcagagggtatgttcaaaccctccatgcgagactcatgagacaggtacgactcatacagccactacggtgaccagcaatatgagctccaatcaggatccccctcccgcagcatcagaccagggggaggtggagtcgactcaaggagattctgtcaatatcacatctagctccgcgattaccacaacagtgtctagtactctgacacgcgcggttactactgtgactcagtccacacccgtgcccggaccctccgtaccaccacccgaggagctgcaggtctcaccagggcccaggcagcagcttcctcctaggcagctactgcagtctgcttccacagccctgatgggtgagtcagccgaggtgctgtctgcatcccagaccccagagttacctgcagccgtagatctgtcatccaccggcgaaccttcatccggccaagaaagcgctggctccgccgtagttgccacagtggtggttcagccccccccgcctacgcagagcgaggtcgaccaactctctctcccgcaagaactaatggccgaagcccaggccggaacaaccaccctgatggtgaccggtctgacgcccgaagaactggcagtgaccgcagctgcggaggccgctgcccaggctgccgccacagaggaagcccaggccctcgcaatccaagccgtactgcaagccgcccagcaagcagtgatgggcaccggtgaaccaatggacacatctgaagctgcagccaccgtgacccaagccgagctgggtcatctcagtgctgagggacaggaggggcaagctacaactattcctattgtcttaacccaacaagaactggccgccttggtccagcaacaacaattgcaggaggcccaggcacaacagcaacaccaccatctgccaactgaagcactggctcctgcggatagtctcaatgatcccgccatcgagagcaattgtctgaacgagttggccggaacagttccttccaccgtggctctactgcctagcactgccactgaatcccttgctccttctaacaccttcgtagcgccccaaccagttgtggtggcatctccagctaagctgcaagcagcagccacccttacagaagttgccaacggcatcgagtctctgggagttaaaccagatctgccaccgccgcccagcaaagcccccatgaagaaggagaatcagtggttcgatgttggggttatcaaaggcaccaatgtcatggtcacccactactttttgccacctgatgatgccgtgccgtctgacgatgatttaggaactgtgcccgactacaaccagctaaagaaacaagaattacagccgggtactgcttataaatttcgtgtggccggcatcaacgcatgcgggagggggccatttagcgaaatctccgcgttcaaaacttgcctcccagggttcccgggggcaccatgtgctattaagattagcaagagcccagacggagcgcatcttacctgggagcccccctccgtaacatcagggaagataattgagtactctgtttatttggccattcagtctagccaggccgggggagagctaaaatcctctacgcccgcacagctggcctttatgcgtgtgtactgtggaccctcaccaagttgtctggtgcaatcatcctccctctcgaacgcccatattgactacactaccaagcctgcaatcatctttcgcatcgctgcccgtaacgaaaaaggatatgggccagccacccaggtccggtggttgcaagagacttctaaagattcttccggaactaagccagcaaacaagagacctatgagtagcccggagatgaagtctgctcctaaaaagtctaaagccgatggtcagtag

SEQ ID NO: 120205 - DNA, 6243 bp, synthetic construct
  misc_feature 1..6243: note = Description of Artificial Sequence: Synthetic coding sequence
  source 1..6243: mol_type = other DNA
atggcctccgcagtctcgccagccaacctacccgctgttctgctgcagcctaggtggaaacgcgtggttgggtggtccggtcccgtccctaggccaaggcacggccaccgagcggtggcaatcaaggagctgatcgtggtgttcggcggaggcaacgaggggattgtagacgagttgcatgtgtataataccgccaccaaccaatggtttatcccagccgtcaggggcgacatccctcctggatgcgctgcatacggattcgtgtgtgatgggacaaggctcctggtgttcggcggaatggtggagtatggcaagtattcgaatgatttgtatgagctgcaggctagtaggtgggagtggaaacgacttaaggcaaaaacaccaaagaatggcccccctccatgtccccggcttgggcattccttcagtttggttgggaacaaatgctatctgtttggcggcctcgccaatgatagtgaagaccccaagaacaatataccccggtatcttaacgatttgtacatccttgaactgaggccggggagtggcgtggtggcctgggacatcccaattacatatggggtgctgccaccgcctagggagtcccacaccgctgtcgtatacactgaaaaggacaacaagaaatccaagctcgtgatctacgggggcatgagcggttgtaggcttggggacttgtggaccctcgacatcgatactcttacctggaacaaacctagcctgtctggcgtggcccccctgccgcggagcctccattcagctaccaccatcggcaacaagatgtacgtcttcgggggctgggttcctctcgttatggacgacgtgaaggtcgcgactcacgaaaaggagtggaaatgcacgaacacactggcatgtttgaatctggacacaatggcatgggaaactattttgatggacaccctggaggacaacatacctcgggctagagccggtcactgtgctgtcgccataaacaccagactatacatttggtccggacgagacggctaccggaaggcttggaataaccaggtgtgttgtaaagacctgtggtacctcgagacagaaaaacctccgcctcctgcccgtgtccaactcgtacgcgcaaatacaaacagtctggaagtgagctggggtgcagtggccactgccgattcctacttactacagttacagaagtatgatatcccagccaccgccgccactgctacatctccgacacccaaccccgtgccttcagtacccgctaaccccccgaagagtccggctcccgccgccgcagcgcccgcagtgcagccacttactcaggtgggtataacccttctgccacaagcagcccccgctcccccaacaaccaccacgatccaggtgctcccaacagtaccaggcagctccatttccgtgccgacagcggcaaggacgcagggtgtaccagcagttctgaaggtgactggtccgcaggcgaccacgggcactccgcttgtgactatgcgacctgccagccaggctggcaaagcacctgtaacagtgacgagcctccccgcaggggtccggatggtcgtaccaacacagagcgctcaaggcaccgtgatcgggagcagccctcaaatgtccggcatggccgcactggctgccgcagcagccgccacacaaaagatcccaccatctagtgctcccacggtgctgtcagttcctgccggtaccaccattgtgaagactatggcggtcacgcctgggacaaccacccttcccgcgaccgttaaggtagcaagcagcccggtcatggtctccaaccccgctactcgcatgctcaagaccgcagctgctcaagtagggacctcagtctcatccgcgaccaacacatcgaccagaccaatcatcaccgtgcacaaaagtggcacagtgacggtcgcccagcaggctcaagtcgtcaccactgttgtggggggagtcaccaagaccataaccttagtgaagagccctataagtgtgcccggcggttccgcgctgatcagtaatctcggcaaagtcatgtctgtggtgcaaaccaagcctgtccagacatccgccgtcacaggccaggcgagcactggcccagtgacacagatcattcagactaagggacctctcccagcagggacgatcctgaagttggtcacctctgcagacggcaagcctaccaccataatcacaacgactcaggcaagtggcgcaggcacgaagccaacgattctgggcatatcttccgtgtctcctagcacaacaaaacctggcaccacaactatcattaaaactatcccaatgtcagccattattacacaagcaggtgccaccggtgtgaccagtagtccgggcattaagagccctatcaccattattaccacaaaggtcatgacaagcggaaccggtgcacccgctaagatcataacagccgtgccaaaaatcgcaacggggcatggacagcagggagtaacgcaggtagtattgaaaggggccccaggtcaacccggtactatcctgaggactgtgcccatgggtggagtgcgactggtaacgcctgtgaccgtatccgccgtgaagccagctgtgacgacattggtggtcaaaggcaccactggagttacgacacttggtaccgttactggaacggtgtccacaagtctggctggtgccggcggtcattccacctccgcttcactcgcgaccccaatcactactcttggtaccatcgctactctcagctcccaagtaatcaaccctactgctataaccgtgtcagccgctcagactacattaaccgcagctggtgggcttaccacacctacaatcaccatgcaacctgttagccaacccactcaggttaccttgataactgcgccatcaggtgttgaggctcaacctgtccacgatctccccgtgtctatcctcgcttcccctactactgagcagccaaccgcaaccgtaacaatagctgacagcggtcaaggtgacgtgcagcccggaaccgtaacactggtgtgttccaaccccccatgcgagacacacgaaaccggcacaaccaacactgcaacaaccactgtcgtcgccaatctgggtggccatccccagcccactcaggttcagttcgtgtgtgacagacaagaagcggccgccagcttggtaacgagcactgtgggtcagcagaacgggagcgtggtgcgtgtctgtagtaatcccccatgcgagactcacgaaacagggaccactaacacagcgacgaccgctacctcgaacatggccggacagcatggttgctctaatccaccctgtgaaactcacgaaactggaactactaataccgctactacggcaatgtcatccgttggggccaaccaccagcgcgatgcacgccgggcttgcgcagctgggacccccgccgttattcggatatcagtcgctacaggcgccctagaggcagcccaggggtctaaaagccagtgtcagacccgtcagacttccgcaacatctacaacaatgactgtcatggccacaggggcaccttgctctgccggccccttgctgggtccctcaatggctagggaaccggggggtcgatcacctgctttcgtgcagctcgcccccctgagcagtaaagtcagactgtcctctccatcaattaaggatctcccagccgggagacacagccatgctgttagcaccgctgctatgaccaggagctctgttggggcaggagaaccccgcatggcccccgtctgtgagagcctgcagggcggaagcccatcgacaacagtgacagtgaccgccttggaagcactactgtgcccctcagccacggtaacccaggtatgctccaatcctccgtgcgagactcatgagacaggcaccaccaacacggctaccacctcgaacgcagggtctgctcagcgagtatgctctaacccaccctgtgagacacatgaaacagggactacgcacacagcaaccacagctacctctaatgggggtacaggccaacccgaaggcggccagcagccgcctgctggtaggccctgtgaaacacaccaaacaacatccaccggcacaaccatgtccgtttccgttggcgccctgctccctgacgccacaagctctcaccgcacagtggaatccggcttagaagtggcagcagccccctcagtgacaccacaggctggcaccgcactgttggcccccttccctactcaaagagtgtgctccaaccctccctgtgagacacacgagactggcactacacatactgccacgactgtcactagcaacatgtcctcaaatcaagacccgccacccgccgccagtgaccaaggcgaggtcgaatccacccagggggactctgtgaacataacctcgagttcggccattaccactaccgttagttctacgctcacacgtgctgtcactactgttacacaaagcaccccagtccccgggccaagtgtgcccaaaatttcatccatgacagagactgccccccgtgccctcaccactgaagtaccgattcctgcaaaaataacggtcaccatcgccaacactgagacaagcgacatgcctttctctgccgtcgacattctgcagcctcccgaggaattgcaagtgagccctggccctaggcagcagctgccacctcggcagttgctgcaaagcgcttctactgcccttatgggcgagtccgccgaagttttgtctgcctctcaaacacccgagctgcccgctgcagtggacttgtcgtcaaccggcgagccaagttctggacaggagagcgccgggagtgccgtagtggcaaccgtggtcgtgcagccaccgcctcctacccagagtgaggtggatcagctttcattgcctcaagagctgatggccgaggctcaagcagggacgactactttgatggtaaccggcctgactcccgaagaattagccgtgacagctgccgctgaggctgcagcacaggcggccgccacagaagaggctcaagctctggcaatccaggcagtgctgcaagcagcgcagcaggctgtcatggccggcaccggtgaaccaatggacactagtgaggccgccgccacagtaacgcaggcggaattgggccacctctctgccgagggacaggaaggccaggcgacaaccattcccattgtgctaacacaacaagaactagccgccctggtgcaacagcaacagctgcaagaggcacaggcccagcagcagcatcaccatctcccaacggaggctttagccccggccgacagcttaaacgaccccgcaatcgaaagtaactgcttgaacgaactggctgggacagtccctagcacagttgccctactgcccagcacagcaaccgaaagcctggcgccatctaatacattcgtcgcaccccaacccgtggtagtcgcttcccctgccaagttgcaagcggcggctactctcactgaagtggctaatggtatcgagtctttaggggtgaagcctgacctccccccccccccgtcaaaggcacctatgaagaaagagaatcagtggttcgatgtgggtgtaattaaggggacaaacgttatggtaacccactatttcctgccacctgacgacgcagtgccgtcagatgatgacttggggactgtgcccgactataatcagctgaagaagcaggaactgcagcccggcaccgcctataaattccgagtagccggcattaacgcctgcggacgggggcctttctccgagatctctgccttcaaaacatgcctaccagggttccccggcgcgccatgtgccattaagatctctaaatcacccgacggcgcccacctcacctgggaacctccaagtgttacctcaggcaagatcattgaatacagtgtgtaccttgccatccagagctctcaggccggtggtgagctgaaatcgtctaccccggcccaattggctttcatgagagtgtattgtgggccatccccaagctgtttagtgcagtcttcctcactaagtaatgcccatatcgactacaccacgaagccagccataatctttcgaattgccgctcgcaacgagaagggatacgggcctgctacgcaggtccgatggctgcaagagacatctaaagacagtagcggaacaaagcctgccaataaacggccaatgagctctcctgagatgaaaagcgcccctaagaaatcaaaagctgacggccagtag

SEQ ID NO: 120206 - DNA, 1305 bp, synthetic construct
  misc_feature 1..1305: note = Description of Artificial Sequence: Synthetic coding sequence
  source 1..1305: mol_type = other DNA
atggactctgttgagaagggtgccgcgaccagcgtttcaaatcctcgcgggagaccttcgagaggtaggcctccgaagcttcagaggaattcaagaggcggccagggccggggggtggagaagcctccacatttggcggctttgatcttggctcgaggaggtagcaagggcatacccttgaagaacatcaagcatctggctggcgtcccactgatagggtgggtactccgggccgcgctagacagcggggcatttcagtccgtgtgggtgagtactgatcatgacgagattgaaaacgtggctaagcagttcggagcgcaagtgcatcgtcgctcatctgaagtgtccaaagactcctctacatccctggacgccattatcgagttccttaattatcacaatgaagtcgatatcgtaggcaatattcaggccacatcaccctgtctccaccctacggatttgcaaaaggtggcagaaatgatccgggaggagggctacgactccgtctttagtgtggtgcgcaggcaccagttcaggtggtcagagatccagaagggcgtgagggaagtaacagaaccactgaacctgaaccctgccaagcgaccccgtcgccaggactgggatggcgaactttatgagaacggaagcttttactttgccaagcgccacttgattgaaatgggatatttgcagggtggtaagatggcttattatgagatgagagctgaacactctgtcgacatcgacgtggacatcgactggcccattgccgagcaacgcgtgctgagatatggatacttcggaaaagaaaagctgaaagagatcaaactgctggtgtgtaacatcgatggctgcttgacaaacggccatatttatgtgtcgggagatcaaaaagagattatatcatatgacgtgaaagacgccatcggcatttcattactgaaaaaaagcggcatcgaggtaaggttgatctccgaaagggcctgcagcaaacagacactgagttcccttaaattggactgtaaaatggaagtgtccgtgagtgacaaactggctgtcgtcgacgagtggcggaaggaaatgggactgtgctggaaagaggtggcgtacctggggaacgaagtctcagatgaggagtgtctgaaaagagtgggcctgtcaggtgcacccgcggacgcctgcagcacagcgcagaaggccgttggatacatctgtaagtgcaacggagggcgaggagcaatccgcgagtttgccgagcatatctgcctgctcatggaaaaagtgaataattcttgccagaagtag

SEQ ID NO: 120207 - DNA, 507 bp, synthetic construct
  misc_feature 1..507: note = Description of Artificial Sequence: Synthetic coding sequence
  source 1..507: mol_type = other DNA
atggcatttaatgattgcttctcactaaattacccaggtaacccctgccccggcgacctgattgaagtgtttaggcctggttatcagcattgggccctgtaccttggcgacgggtacgtgatcaacattgctccggtggacgggattcccgcctccttcacaagcgcaaaaagcgtgtttagtagcaaggctctcgtgaagatgcagctccttaaggacgtggtcggcaatgacacctaccgtattaataacaagtatgatgagacctatccaccactgcccgtggaagaaatcattaagagatctgaatttgtcattggccaggaagtcgcctacaacttgcttgtaaacaattgcgagcacttcgttacactgctgaggtacggcgaaggcgtgagcgagcaggctaaccgagccatctcaactgtcgaattcgtgactgcagcggtgggagtcttttcctttctcggactcttccctaagggacaaagagcgaagtattactag

SEQ ID NO: 120208 - DNA, 489 bp, synthetic construct
  misc_feature 1..489: note = Description of Artificial Sequence: Synthetic coding sequence
  source 1..489: mol_type = other DNA
atggctttggcacgccctagacccagactgggggatctgatcgagatttctagattcgggtatgctcattgggccatatacgttggggatggttatgttgttcatcttgcacctgctagcgagattgcaggcgccggagccgctagcgtcctttcagctctgaccaataaggccatcgtgaaaaaagagttactgagcgtagtggctggtggtgacaactacagagtgaacaataaacacgacgatagatatacacctttacccagcaataaaattgtgaagcgagcagaagagcttgtgggacaggagcttccatactccctcacttccgacaattgtgagcatttcgtcaatcaccttcggtacggagtatctcgaagcgaccaagtgactggtgccgtaacaacagtcggcgtggctgcaggtctgctcgccgccgcatcactggtggggattttgttggcaaggtccaagcgcgaaaggcagtag

SEQ ID NO: 120209 - DNA, 1023 bp, synthetic construct
  misc_feature 1..1023: note = Description of Artificial Sequence: Synthetic coding sequence
  source 1..1023: mol_type = other DNA
atgaaggaggaccaggtggtggccgaggagcctggcttccaagacgaagaagaatcactgtttcaggatatcgatctccttcagaaacatggcatcaacgtggcagatatcaaaaaactgaaaagcgtgggcatatgtacaataaagggaatacagatgaccacgcggagagcgctctgcaatgttaaggggctgtccgaagctaaggtggataagattaaggaggctgccaacaagctgatagaaccagggtttctgaccgcattcgagtatagcgaaaagaggaagatggtattccacattaccacgggttcacaggaattcgacaagctgctgggcggcggtatcgagagcatggctattactgaggcctttggcgagtttcgcacagggaagacccaactttctcatacgctgtgtgtaacagcccaactgcccggcgctggcggttaccccgggggcaagattattttcattgatacggagaatacatttagacccgatcgcctcagggatattgcggacagatttaacgtggatcacgatgctgtcctggacaatgtgctttatgcccgtgcctacacgagtgagcatcaaatggaacttctggattacgtggcggccaagttccacgaagaggccgggatcttcaagctgttgataattgattccatcatggctctgtttagagtcgattttagcggaagaggagaactcgccgagagacagcagaagttggcccagatgctgtcccgtttgcagaaaattagcgaggaatataatgttgccgtgttcgtcaccaatcagatgactgctgaccccggggctaccatgacatttcaagcagaccccaaaaagcctattggcggtcacatcctggcacacgcgtcaactaccaggatctcgcttaggaagggaagaggagagctgcgcatcgccaagatatatgactcccccgagatgccagagaatgaggctaccttcgctattaccgcgggtggaatcggggacgcgaaggaatag

SEQ ID NO: 120210 - DNA, 1080 bp, synthetic construct
  misc_feature 1..1080: note = Description of Artificial Sequence: Synthetic coding sequence
  source 1..1080: mol_type = other DNA
atgagtgacgaaggcagtcgcggctctcgccttccactggccctgcccccagccagtcaaggctgcagctcaggcggtggaggaggcggatcaagtgccgggggctcaggcaactctaggccacccagaaacctccagggattgctgcagatggccataacagccggttctgaggaacccgacccgcccccagagcccatgagtgaagaacgccgccagtggctgcaggaagctatgtcggccgcattccgcggccagagggaggaagtggagcagatgaaatcttgccttagggtcctttcacagcccatgcctcccactgcaggtgaagcagaacaagcggcagatcagcaagagcgcgaaggggccctggagctgctggctgacctgtgcgaaaacatggataacgccgcagacttctgccaactgtctggaatgcatttgcttgtgggacgttatctggaggcgggcgccgcaggactcaggtggagggccgcccagctgatcggcacttgctcacagaacgtggctgctattcaggagcaagtactgggccttggcgccttgaggaagctgcttagactgcttgacagggatgcctgtgatacagtgcgcgtgaaagcactgttcgcaatctcatgcctcgtgcgagagcaggaagcagggctcttacagttcctgcggttggacggcttttccgttttgatgagagcaatgcaacagcaggtacagaagctaaaagtaaagtctgctttcctactccagaatctacttgttgggcatccagagcataagggtacactgtgctcaatgggcatggttcaacaacttgtggctctcgtgcggactgaacattcaccctttcacgaacacgtgcttggggctctctgtagtctggtcacggatttccctcagggcgtccgcgagtgccgcgagcccgaactggggcttgaagaactcctacggcacagatgccaactgctgcagcagcacgaggagtaccaggaggaacttgagttttgcgaaaaactgctacagacgtgcttctcttcccccgccgacgattcgatggatcgctag

SEQ ID NO: 120211 - DNA, 774 bp, synthetic construct
  misc_feature 1..774: note = Description of Artificial Sequence: Synthetic coding sequence
  source 1..774: mol_type = other DNA
atgtctgacgagggtagtcgaggttctcgccttcctctggctctaccaccagcttcgcagggctgttcttccggcggagggggaggaggctcttccgcaggaggtagcggcaactctcgcccaccgagaaatttacaagggctcctgcagatggccatcactgcaggatctgaagaacccgacccccctccagagccaatgagtgaggaaaggcggcagtggcttcaggaggcaatgtctgctgcattcagagggcaaagagaggaggtcgaacaaatgaagagttgcctgagggtgctgtctcaacctatgcctcccactgcgggagaggctgaacaggccgctgaccagcaggaacgcgaaggcgcattggaactgcttgctgacttatgcgagaatatggacaacgccgctgacttttgccaactgtcaggtatgcacctgttggttggcaggtacttagaggctggagcagccgggctcagatggagggctgcgcagctcatcggaacctgtagtcagaacgtggccgctatccaggagcaggtgctggggttgggggctctgagaaagcttctccgcctcctcgaccgtgatgcctgcgacacgggcgtcagagagtgtcgagagccagaactcggtctcgaggaactactgcggcataggtgccaactcctccagcaacatgaagagtatcaggaagaactggaattctgtgaaaaactgcttcagacctgcttcagctcacctgccgatgattccatggacaggtag

SEQ ID NO: 120212 - DNA, 1080 bp, synthetic construct
  misc_feature 1..1080: note = Description of Artificial Sequence: Synthetic coding sequence
  source 1..1080: mol_type = other DNA
atgtccgacgaggggagccgggggtctcggctgcccctggctttgcccccggcttctcaaggctgcagctcaggaggaggaggaggaggctcgtccgccggtggttctggcaacagcaggccgcccagaaacctgcagggcctgctccagatggccatcaccgcagggtctgaagaaccagacccccctcccgagcctatgagcgaagagcggcggcagtggctccaagaagctatgagtgcggcgtttcggggccaaagggaggaagtggagcaaatgaagagctgcttgcgggtgctgtcgcagccaatgccacccacggcaggagaagctgaacaggccgctgaccagcaagagagagaaggcgctctggagctgttggctgatctttgcgaaaacatggacaacgccgccgatttttgccaactgagcgggatgcacctcctggtggggcggtacctggaagccggagccgctggcttgcgttggcgcgccgcccagcttatcggcacttgctcccagaacgtggctgccatacaagagcaggttctgggtctgggcgcactgaggaagctgctgagactcctggatcgggatgcatgcgatacagtgcgtgtgaaagctctttttgctatatcctgtctggtacgggagcaagaggcaggcttgttgcaattcttgagactagatggattcagtgtgctgatgcgggccatgcagcaacaggttcagaagctaaaggtgaaatccgcattcttgttgcagaacttgctcgtaggtcatccggagcacaagggtaccctctgctccatgggaatggtccagcagctggtagcattagtgcgcactgaacactcaccctttcatgagcacgtgcttggggctctgtgctctctggtgactgactttcctcagggcgtccgagagtgcagagagcccgagctcggactcgaagagcttcttcgccaccggtgccaacttctgcagcaacatgaggaatatcaggaagaactggagttttgtgagaaactactgcagacctgcttctcaagtcccgctgatgatagcatggaccggtag

SEQ ID NO: 120213 - DNA, 1443 bp, synthetic construct
  misc_feature 1..1443: note = Description of Artificial Sequence: Synthetic coding sequence
  source 1..1443: mol_type = other DNA
atgcagattccacgcgccgcattattaccactcctgctactcctacttgcggctcctgctagcgctcagctgtccagagcagggcggtctgctccactggccgccggatgccccgaccgatgcgagcccgccagatgtccgcctcagcccgagcattgtgagggggggagggcacgcgacgcatgtggatgttgcgaggtgtgcggtgcgccagagggtgccgcctgcggcttacaggagggcccttgcggcgaagggttacaatgcgtggttccattcggagtgcctgcctctgctaccgttcgcagacgtgcacaggcaggtctttgcgtttgtgccagttcagaaccagtatgtggaagcgacgctaatacctacgccaatttatgccagctgcgcgctgcaagccgtagatctgaacgactgcatcgacctcccgtgatcgttttgcagcgcggggcatgtggccaaggccaggaggacccgaactccttacgacataaatataacttcatcgccgacgtagtagagaaaattgccccagctgttgtccacatcgaactttttcgcaagctcccctttagcaaaagagaggtccccgtggcctctggcagcggattcatcgtctctgaggacggccttattgtcacaaacgcccacgtggttaccaacaagcaccgggtcaaggtggaactgaaaaacggtgctacctatgaggcaaagataaaggacgtggatgaaaaggcagatatcgctctcatcaagatcgatcatcagggcaagctgcccgtgcttctgctaggcagatcatccgagctgcgtccgggagagttcgtggtggccatcggatccccattttcccttcagaatactgtcaccaccggcatcgtctctacaactcagagagggggaaaggagttgggccttaggaactctgatatggactatatacagacagatgcgattataaactatggcaattccggcggccctctggtgaatctggacggagaggtaatcggtatcaacaccctcaaagttaccgctggaataagctttgccatcccctcagacaagatcaaaaagtttttgacagagagtcatgacagacaggccaaggggaaggccattacaaaaaagaagtatattggtattcgcatgatgtccctaactagttccaaggcaaaagaactgaaagacagacaccgggatttcccagatgtgatcagtggcgcctatattattgaggtgatccccgacacccccgcagaggcaggtgggctcaaggaaaatgatgtcataatctcaattaatggccagtccgtggtgagtgcaaacgatgtttctgacgtgatcaaaagagaatcaactctaaacatggtggtgagacgggggaacgaggacattatgatcacggtcattcccgaagagattgacccttag

SEQ ID NO: 120214 - DNA, 666 bp, synthetic construct
  misc_feature 1..666: note = Description of Artificial Sequence: Synthetic coding sequence
  source 1..666: mol_type = other DNA
ggcaaactccccgtgctgctcctcggtagaagctctgaactgcgcccgggagagtttgtggtcgccattgggagccctttctctttgcagaacaccgtgactactggcatcgtgagcacgactcagcggggaggtaaggagctgggccttcgcaacagtgatatggactatatccaaaccgatgctatcattaactatggtaacagcggcgggccccttgtaaatctggatggggaagtgatcgggattaacaccctcaaagtgacggctggaatcagcttcgctatcccatctgataaaataaagaagtttctgacagaaagccatgatcgccaggctaaagggaaggccatcactaagaagaagtatatcggtatacgcatgatgtccctaacgagtagcaaggcaaaggaactcaaagaccggcaccgtgactttccggatgtcatcagtggcgcttacatcatagaggtgatcccagatacgcccgctgaagccggcgggctgaaagaaaacgatgtcatcattagtatcaatgggcagagcgtcgtctccgctaacgatgtgagtgacgtgatcaaaagagagtccacactgaatatggtggttaggcgcggcaatgaggatattatgatcaccgtcattccggaggagattgacccttag

SEQ ID NO: 120215 - DNA, 1344 bp, synthetic construct
  misc_feature 1..1344: note = Description of Artificial Sequence: Synthetic coding sequence
  source 1..1344: mol_type = other DNA
atgggctgggccgccaggccacgggcacttgcacctgctgcaccagaggctctgcttcacagtccccgtagacgctcccctgccctcgccctgtctgcagccaccgctgcagcagcccgcggaccgggccgagttcgactattaaggggagtgcgcagggctcgtggtcggagagtaagacctgccggcggtcctgttcgccggggtgctgcagttcggggcgcccttcggggggcgtccctgggccatggcgctgcggctcgtgctggccggcctctgtgcgtgcgtcagcagctgagagcagcttcccggagaagcgagcgactgcaccgaccaccagtcattgtgcttcagaggggcgcctgcggtcagggtcaagaggacccaaattcattaagacataaatacaactttatagcagacgttgtcgagaagatagcacccgccgtggtccacatcgagttattccgcaagctgccgttcagtaagagggaagtgcccgtcgcatcaggtagtggcttcattgtgtccgaggatgggttgattgtgactaacgcacacgtcgttacaaacaaacatcgagtcaaggtggagctgaagaacggcgccacctacgaggcaaaaattaaagatgtggatgagaaggcggatatagcgctcatcaaaattgaccatcaggggaaactgccggtactgttgctgggcagaagcagtgaactgcggcccggcgagtttgtggtagccatcggctcacctttctctctgcaaaataccgtcacaaccggaatcgttagtaccacccagaggggtggaaaggagctgggccttcgaaactctgacatggactatatccagaccgacgccatcatcaattatggcaatagtggtggcccactggtgaacctggatggagaagtgatcggtattaacaccctcaaggtcaccgcgggcatctctttcgcaattccctccgataagatcaagaagttcctcacggaatcacatgatcgacaggccaaggggaaagcaatcacaaaaaaaaaatatatcggcatcaggatgatgagcttgacatcttccaaggcaaaggaattgaaagatagacaccgggacttccctgatgtaatttccggggcctacatcatcgaggtcattccagacacccctgctgaggctggaggcctgaaagaaaatgacgtcattattagtataaatggacagtccgtcgtcagtgccaacgatgtcagcgacgttatcaagcgcgaaagtacgctgaatatggtagtccgccgtgggaatgaagacattatgatcacggttatccccgaagagattgacccatag

SEQ ID NO: 120216 - DNA, 1377 bp, synthetic construct
  misc_feature 1..1377: note = Description of Artificial Sequence: Synthetic coding sequence
  source 1..1377: mol_type = other DNA
atggccgctccacgcgcgggtagaggtgccggatggtcactgcgcgcttggcgcgccttgggcggaattagatggggaagacgcccgaggctgacccctgatttgagagccctcctgaccagcgggactagtgatccacgggcccgagttacatacggaactccgtctctgtgggcacggctttcagtgggcgttacagagcccagagcttgcctaacttctggcaccccggggccccgggcccagctcactgccgtcaccccagacacgcgcacccgtgaagcttctgaaaatagcgggacacgcagccgtgcttggcttgcggtggctctgggtgccggcggggcagtccttctcctactgtggggcggggggcggggtccccccgccgtgctggcggccgtgccaagtccaccccccgcatcacctaggagtcagtacaactttatcgccgacgtggtggagaaaacagccccagccgtggtatacatcgagatacttgataggcatccttttctgggccgtgaagttcccatcagcaatgggtctggattcgttgtagctgctgatggactgatcgtgactaacgcccatgtcgttgcggatagacgaagagtaagagtacgccttttgtcaggcgatacatatgaggccgtcgtgacagcggtcgacccagtggcggatatcgctactcttcgcattcaaaccaaggagcccctgccgacacttcccctgggacgatctgccgacgttaggcagggggaattcgtggtggccatggggtcccccttcgccttacagaacaccatcacaagcgggattgtgagttcggcacagcggccagctcgcgacctcgggctgccacaaacaaacgttgagtacatccagacagatgctgccatcgattttgggaatagtggtggcccacttgtgaacctggacggcgaagtgataggagtaaatacaatgaaggtcacagccggaatttccttcgcaatcccatccgacagactgagggagtttctacacagaggcgaaaaaaagaactctagcagcggaattagcggatcccagagacgctacataggggttatgatgctcaccctgtctccttcaatcctagcagaacttcaacttcgagagccgagtttcccagacgtgcagcatggtgtgctaatccacaaagtgatacttggttccccagctcatagggcaggattacggccaggggatgtcatactggccatcggagagcagatggtgcagaatgcagaggatgtgtatgaagccgtcagaacacagtcccagctggcagtccagattaggcgcggacgagagacgctgaccctgtacgtgacccccgaagtcacagagtag

SEQ ID NO: 120217 - DNA, 1086 bp, synthetic construct
  misc_feature 1..1086: note = Description of Artificial Sequence: Synthetic coding sequence
  source 1..1086: mol_type = other DNA
atggctgctcccagggccggacggggggctggttggagcctgcgggcgtggagggcgctgggcgggattaggtgggggcggaggcctcggctaacacccgatctcagagccctactgactagcggaacgagcgatccgcgggcccgggttacctacggtaccccctctctgtgggcccggctgtctgttggcgtgaccgaacctagggcatgcctgacctccggtacaccaggccctcgcgctcagctgacagccgtgacccccgatactcgaacacgagaagcttcagagaattccggaacacgctcccgcgcctggttagctgtggcactgggcgctggtggcgccgtgcttctcctcctctgggggggcggacgcggtccacctgctgtgctggcggctgtcccctctccccctcctgctagcccccggtctcagtataacttcatcgcagacgtagtggagaaaactgcgcctgccgtggtgtacattgaaatactcgacagacatccgtttttgggcagagaagtacctatctctaatggaagtgggtttgttgtggccgccgacgggttgatcgtgactaatgcccatgtggtcgccgatcgtcggcgggtgagggtgaggcttcttagcggggatacatacgaggccgtggtgacagcggtggatccagtagctgacatcgcaaccctaagaattcagactaaattcgggaacagtggaggaccattggtaaacctggatggcgaggtgatcggtgtaaatactatgaaggtaacagctgggatatcattcgcaattccgtcggatagattaagagagttcctgcatcgaggtgaaaagaaaaatagtagctcaggtatctccggcagccagcgaagatatattggggtaatgatgctgacactctcccctcgagctggcttgaggcctggagacgttatactggctattggtgagcaaatggttcaaaacgccgaggacgtatacgaggcagtgaggacacagagtcagctagctgtgcagataaggcgaggacgcgaaacgctgacactctatgtcactccagaggtgaccgagtag

SEQ ID NO: 120218 - DNA, 1362 bp, synthetic construct
  misc_feature 1..1362: note = Description of Artificial Sequence: Synthetic coding sequence
  source 1..1362: mol_type = other DNA
atgcaggctagagccctcctgttggccgcgctagctgctcttgccctggcacgggaacctccagcggctccatgcccagcccgatgtgacgtgagcaggtgtcccagcccgcgctgcccaggcgggtacgtgcctgatctctgtaattgctgtctcgtgtgcgcagcctctgagggagaaccctgtggcggacctctcgacagcccatgtggggagtcgctggagtgtgtgagaggtttatgtaggtgtaggtggagccacgccgtatgtggcaccgacgggcacacctatgccaatgtgtgcgccctgcaggcggccagtcggcgggcactgcagttatcggggacccccgtacgacaactgcagaaaggagcttgtcctcttggacttcaccaactctcctccccgcgctacaagtttaatttcatagctgatgtcgtcgaaaaaatagcacccgcggttgtccacatagaactgttcctcaggcaccctctgtttgggcggaatgtgcccttgtcttcaggatctggtttcattatgagcgaagcagggttgatcatcaccaatgcccacgttgtatcttcgaacagcgcggctcccgggaggcagcagctcaaagtacagttacagaatggggactcatatgaggctactataaaggacatagacaagaaaagcgatatcgcaacaataaagatccatcctaagaagaagttgccagtcttactcctgggtcactcggccgacctgcgccccggcgaatttgtcgtcgccatcgggtccccatttgcgcttcagaataccgtcacgaccggaattgtgtctacagcccagagggagggcagggaacttgggctcagggactcagatatggactacatccagaccgatgccattattaattacggcaactccgggggccctctcgtcaacctggacggtgaggtaatcggaataaataccctcaaagtgaccgccggcatctcattcgccatcccctctgaccggataacacgatttctgactgaattccaagacaagcagatcaaggactggaagaagagattcattggtataagaatgaggacgattaccccaagtctggtggacgaactcaaggcatcaaacccggacttcccggaggtttcctcgggtatttacgtgcaggaggtggctccaaactcccctagccaacgcggagggatccaggacggggacataattgtgaaggtgaatggtcggccgctggtcgattccagtgaactgcaggaggctgtgttgaccgagagtccattgctcttggaggtcaggcgggggaacgacgacttgctgttttctatagcccccgaggtggtgatgtag

SEQ ID NO: 120219 - DNA, 1431 bp, synthetic construct
  misc_feature 1..1431: note = Description of Artificial Sequence: Synthetic coding sequence
  source 1..1431: mol_type = other DNA
atgataagacctcaacttaggacagccggtcttgggagatgcctcttgcccggcctgctgttgctgctggtgcccgtgttatgggccggcgcagagaagttgcacacccagccgagctgcccagccgtgtgccaacctacgcggtgtcctgctttacctacatgtgctcttgggaccacccccgtattcgacctttgtaggtgctgtcgtgtgtgcccggccgctgagcgggaagtgtgtgggggagctcagggtcagccttgcgctcctggcctgcagtgcctacagcccttgcgacctggcttccccagcacttgtggatgcccaacactcggcggcgccgtgtgcgggtctgatagacggacgtatccaagtatgtgcgctctccgcgcggagaatagggcagcccggcgcctgggcaaagtgccagccgttccagttcagtggggaaattgtggcgataccggcacacggtccgcgggacctctgcggcggaattacaactttattgccgctgtggtggagaaggtggcaccttcagtggtgcacgtgcagctttgggggcgattgctccacggctcacgtttggtgccagtgtacagcggatccggattcatagtgtcagaggatggcttgattatcacgaatgctcacgtagtccgaaatcagcaatggattgaggtcgtgctgcagaatggcgctagatatgaggccgttgtgaaagacatcgacctgaaattagacctggctgtcatcaaaatagaatcaaacgcagagttacccgttctgatgctggggcggtcttctgacctccgggcgggcgagttcgtggtggcgctcggttcccccttttcactgcagaacaccgccactgccggcattgtttctaccaaacagagaggaggtaaagagctgggaatgaaagacagtgatatggattacgtgcagattgatgcaaccatcaattacgggaattccggtggtcccctggtgaatctggatggggatgtgatcggtgtgaacagccttagagtaaccgacgggatctcatttgcgatccctagcgacagagtgcgccagttcctggctgagtaccacgagcaccaaatgaagggaaaggcgttttctaataagaagtaccttgggctgcaaatgttatcattaacagtgccactttccgaagaacttaaaatgcattaccctgactttccagacgtgtcctcaggagtgtatgtgtgcaaagttgtagagggaactgccgcccagagttccggacttagagaccacgacgtgattgtgaatataaatggaaaacctatcactactactacggatgtagttaaagctctggactctgactctctgtcaatggccgtgctgagaggaaaggataacctgctgctcaccgtcatacccgagactattaattag

SEQ ID NO: 120220 - DNA, 8157 bp, synthetic construct
  misc_feature 1..8157: note = Description of Artificial Sequence: Synthetic coding sequence
  source 1..8157: mol_type = other DNA
atgccgagaactaagcagatacatccaaggaacctcagggacaagatcgaggaggcccagaaagagctcaacggagccgaggtgtctaagaaggagattctgcaggcaggagtgaaaggaacatctgaaagccttaaaggcgtaaaacggaaaaagatcgtcgctgaaaatcacttaaaaaagatcccaaaatcccccctgagaaatcccctgcaagccaaacacaagcaaaatacagaggagtcaagctttgcagttctgcattccgcctccgaaagccataaaaagcagaactatattcccgtaaagaacggaaaacagttcaccaaacaaaacggcgagacacctggcattattgccgaagcttctaagagcgaagaaagtgtgtccccaaaaaagcccctctttctgcagcagccatccgagcttcgccgatggcggagcgagggggccgaccccgctaagttctcagacctcgacgagcagtgtgattcttcatccctgagttcgaaaactcgtacagacaattccgaatgcatctctagccattgcgggactaccagtccctcctatactaatacagccttcgatgtgcttctcaaggcaatggagcccgagctgagcaccctgtctcagaaggggtctccatgcgccatcaagacagagaaactgagacccaacaagaccgctcgatccccccccaaacttaagaatagttcaatggacgcaccaaaccagacttcccaagaattagtggcagagtcacaaagcagctgtaccagctataccgtgcacatgagcgctgcacagaaaaatgagcagggcgctatgcagagcgcctctcatctttatcaccagcacgagcactttgttcctaagtccaaccagcacaatcaacaattgcctggctgctccggtttcacagggtcgctaaccaacctgcaaaatcaggaaaacgcgaaactggagcaggtctacaatatcgcagttaccagctctgtcggactcacatcgccctcctccagatcccaggtcactcctcaaaatcagcagatggatagcgcgtccccactgagcatttctccggccaattccacccagtcaccccccatgccaatctataactcaacccacgttgcatcagtagttaaccagagcgtcgaacagatgtgtaatctgctgttgaaggatcagaagcccaaaaagcagggtaaatacatttgtgagtattgcaatagagcatgcgctaagccctctgtattgttaaaacacattaggagtcacaccggagaaagaccctatccctgcgtcacttgtgggtttagctttaagacaaagtcaaacctgtacaaacataagaaatcacacgctcacacaattaaattggggctcgtactccagcccgatgctggcggtctttttctatctcatgagagcccgaaggccctgtccatacactcagatgtcgaagattcgggggaatccgaggaggagggagcaactgacgaaaggcagcatgatctgggggccatggaattacagccagtccatatcattaagcggatgagcaatgcagagacactgctgaagtcgtcctttacaccctcctctcctgaaaatgtgattggcgattttctgttgcaggatcggagcgctgaaagccaggcagttactgagctaccaaaggtggtggttcaccacgtgactgtttctccactgagaacagactcacccaaggccatggaccctaagccagaattaagcagcgcccagaagcagaaagacttgcaagttactaatgtccagcccctgtctgctaatatgagtcaggggggagtgtctaggctggaaactaatgagaactctcatcaaaaaggagatatgaatcctttggagggtaaacaagactcccatgtgggaactgtccatgcacagctgcaacgccaacaggctacagactattcccaggagcagcaagggaaactgttgtcgcctagatccctgggctcgactgatagtgggtacttctccagaagcgagtccgccgaccaaaccgtgtcgccgccgactccctttgccaggcgcctgccctcaacggagcaggattcaggccggagcaacggtcccagcgcagccctcgtgaccacttctactcccagtgccctgccaaccggggagaaagctctgctgctgccaggtcagatgcggcctcccctcgctacaaaaaccctagaggaaaggatttctaagctcatatccgacaatgaagccttggttgatgataagcaacttgattccgtgaagcctcgacgcacaagtctatcaagaaggggttccatagacagccccaaatcatacattttcaaggactcgtttcagtttgatctcaagccagtggggcgccgcacctcgagttcttccgacatacctaagtctccgttcacaccgacagaaaaaagtaagcaggtatttttgctttcggtgccttcactggattgcctgccaatcactagatctaactctatgccaactacgggatactccgccgtgccggcgaatataatccctcccccgcaccccctgcgaggatctcagagctttgatgacaaaataggcactttctacgacgatgtgttcgtatccggaccgaacgcccctgtgccgcagagtggccaccccagaactctggtgaggcaggcagctatagaggactcaagcgccaacgagtcccatgtgcttggcacaggtcagagtctggatgaaagtcatcaaggatgccacgcagctggagaagctatgtctgtgcgcagcaaggccctggcccaggggccacacatagaaaaaaagaagtctcaccagggtagggggacgatgttcgagtgtgagacttgcaggaaccgctaccggaagttagagaatttcgagaatcataagaagttctactgttccgagttgcatgggcccaaaacaaaggtggccatgcgggagcccgaacatagccctgtgcctggagggctacaaccacaaatcctgcactatcgcgtcgccggcagttcgggtatatgggagcagaccccccagatccgcaagaggaggaaaatgaaaagcgtaggcgacgacgaggaactgcagcaaaatgaatccggcaccagtcctaagagctctgaagggctccagttccagaacgctcttggatgtaacccaagcctccctaaacacaacgtcacaataagatctgaccagcaacataagaacatccagcttcaaaattctcatatacacctggtggcccgaggcccggaacagactatggatcccaagctctcaactattatggagcagcagattagctctgcagcacaggataagatcgaactccagcgccacggaaccgggatcagtgtgattcagcacactaactcactatcacggccaaatagtttcgataagcccgaaccttttgaacgggcatcacccgttagctttcaggagctaaacagaaccggaaaatccggttccttgaaggtgataggtatctctcaggaagaatcccatccatcgcgcgatggatcccatccccaccaactggcgctgtcggatgccctgagaggagaactgcaggaaagctcacgaaaatcgcccagcgagagacacgtattagggcaaccaagccggcttgttaggcagcataatattcaggtgcctgagatattagtaacagaagaacctgaccgcgatcttgaggcccaatgccatgaccaggagaaatctgaaaaattttcatggccacagcgttcagagactttatctaagcttccaaccgagaagctgcccccaaaaaagaagcgactgagattggccgagatcgaacactccagtacagagagttcctttgattccactctgtcccgcagccttagtagggagagcagtttgtcccatacgtcaagcttttctgccagcctagatatagaggatgtttccaagactgaagcatcccccaaaatagacttccttaataaggccgaattcctaatgatcccggccggactcaacactttaaacgttccagggtgccaccgagagatgcgacgaaccgcttccgagcagataaattgtacccagacaagtatggaggtcagtgatttacgctctaaaagcttcgactgcggatccatcactcctccccaaacaacacctctgaccgagctgcaacctccttctagtccttctagggttggagtgacaggccatgtcccactgttagaaaggaggcgtgggccgctggtgcgtcagataagtcttaacatagcgcctgactcacacctgtcgcctgtgcacccaacttcattccaaaacactgccctgccaagcgttaatgctgtgccatatcagggcccacagctcacctccacttcccttgcagaattttcggcgaacaccttgcattctcagacccaggtgaaagatctgcaggcagagacatcgaacagttccagcacgaatgtctttcccgtgcagcaactgtgcgacattaatttgctgaaccagatccacgcgcccccgtcacaccagtcaactcagctctcactgcaggtgtctacgcagggctcaaagcctgataagaatagcgtgctttcgggatcaagtaagagcgaagactgttttgcaccgaaataccagttgcattgtcaggtcttcacatcggggcccagctgcagtagtaatccagtgcactctttgccaaatcaggtaatctccgatccagttggaaccgatcactgtgtaaccagtgctacattgcccacaaagctcatcgacagtatgtcaaatagtcatccattactgccccctgaactgaggccccttggtagccaggtccaaaaggtgcctagctcttttatgttgcctatcagattacagagttcagtgcccgcctactgcttcgcaacgctgacttccctcccccagatccttgtgactcaggacctccctaaccagccaatctgtcagactaatcacagcgtcgtgccgattagtgaggaacaaaattcagtgccgacattgcagaagggccaccagaatgccctccctaatcctgaaaaggagttcttgtgtgagaacgtgttctcagagatgagtcagaactcctcactctctgagtcactgccaattactcagaaaatcagcgtgggccgcctgtctccacaacaggaatcatcagctagcagtaagcgaatgctgtctcccgccaattccctcgatatcgcaatggagaagcaccagaaaagagcgaaggacgaaaacggtgctgtctgcgccacggatgtgcgtccactggaggccctgagtagcagggttaatgaagcaagtaaacagaaaaaacctatacttgtcagacaggtgtgtaccaccgagcctctcgacggcgtcatgcttgagaaggatgtattctcgcagcccgaaatatccaatgaggcagtgaacctcacaaatgtcttaccagcggacaattcaagcacaggttgttctaaattcgtggtgatcgaacccatttcagagctgcaggaattcgaaaacatcaagagcagtaccagcctcacactcacagtcagaagctccccagctccaagtgagaacacgcacatcagccctcttaagtgtacagataataaccaggagcgcaagagccccggggtgaagaaccaaggtgataaagttaatattcaggagcagagtcaacaacccgttaccagcctcagcctgttcaacatcaaagacacacaacagctcgccttccccagcctgaaaactacaacaaacttcacatggtgctaccttttgcgccaaaaaagcctgcacctgcctcagaaagaccaaaaaacgagtgcctatactgactggaccgtgagcgcatccaaccctaatcccctgggcctacctacgaaggttgctctggcgctgctgaacagcaagcagaacactggaaaatcgctgtactgccaggcaataactacccactctaagtccgatctcctggtgtattctagcaagtggaagagttcattaagcaagcgtgcactgggtaaccagaaaagtacagttgtggagtttagcaataaggacgcctccgagatcaactccgagcaagataaagaaaatagcctgattaagtctgaaccacgccggatcaagattttcgacgggggttataagtccaatgaagagtatgtgtatgtccgcggtagggggcgagggaagtatatctgcgaggagtgcggtattcgatgtaagaaacctagcatgctcaaaaagcatatacggactcatactgatgtccgcccatatcactgtacatattgcaatttttctttcaagactaaggggaatctgaccaaacacatgaaaagtaaggctcactctaaaaagtgcgttgacctgggggtttctgtcggtctcatagatgagcaggataccgaggagtcggacgagaagcagcggttctcctacgagaggagtggctacgacctagaggagtccgacggaccagatgaggacgataacgagaacgaagacgacgacgaggatagtcaagctgagagcgtgctttctgctaccccctccgtgaccgccagtcctcaacatcttccatctagaagctccctgcaggaccccgtgtccaccgacgaggatgtccgcatcactgactgtttttctggcgttcatacagatcctatggatgtcctgccccgggctctgttgaccaggatgacagtgctttcaaccgcccagtctgactacaacagaaaaacactgagtcccggaaaggctagacaaagagcagcccgggatgagaatgacacgatccccagcgttgataccagcagatctccctgtcaccaaatgagtgttgactatccggaatctgaagagatcctaagaagttccatggctggcaaagccgttgccattacacagtcaccgtcgtcagtgcggctgccacccgcagccgctgagcatagccctcaaactgccgctggcatgcccagtgtcgcctcacctcacccagacccccaggaacagaagcagcagatcacgttacaaccaactccaggtctcccgagcccccacacgcatctgttttcacacctgccgctgcacagccaacaacagtcacgaacaccatacaatatggttcccgtcggcggtattcacgtggtgccagctggcctgacgtatagcacctttgtacctcttcaggctggacctgttcagttaacaatccccgccgtctccgtggtgcaccgtactctgggcacgcatcgcaacactgtgactgaagttagcggaacaacaaatcccgccggggtcgcggaactgagctcagtcgtaccctgcatccctatcgggcaaatcagagtgccagggctccagaacctctccacccccgggttacagtcactaccaagcttgtcaatggagaccgtgaatatcgttggactggccaacaccaacatggcgccgcaggttcacccacccggattggcactgaatgccgtcggactacaggtcctcacagccaacccgtcttcacagagttctcctgcccctcaagcacatataccgggtctccagattcttaacatcgccctcccaacattgatcccctccgtgtctcaggtggctgttgacgctcagggcgcccccgagatgcccgcaagtcagtctaaggcatgcgagacccagccgaaacagactagcgtggcttccgctaaccaggtgagtaggacggagagcccccagggcctccccaccgtgcagagggaaaatgccaagaaggtgctgaacccccctgcccctgcaggggatcacgcccgtctggacgggctgtccaaaatggatacagagaaggctgcgtcagcaaaccacgtcaagcctaaacccgagctgactagcatacagggacagcccgctagcacttcccaaccgttactgaaggcacacagtgaggtcttcacgaaacccagcggtcagcagacactaagcccagatcggcaggttccgcgccctaccgctctgcctcgtaggcagcctaccgtccacttttcagatgtatcctccgatgacgacgaggatcgtttagtaatcgcgacgtag

SEQ ID NO: 120221 - DNA, 387 bp, synthetic construct
  misc_feature 1..387: note = Description of Artificial Sequence: Synthetic coding sequence
  source 1..387: mol_type = other DNA
atgccacgcaccaagcaaatccacccaaggaatctgagagacaaaattgaggaagcacagaaggagctgaatggtgccgaagtctccaagaaggaaatactgcaggcgggagttaaaggaacctcagaatccttgaagggggttaaacgcaagaaaatcgttgccgaaaatcatttgaaaaagattcccaagtcccctctccgcaatcctctgcaggcgaagcacaagcagaacacggaagaaagcagcttcgctgtcctccactccgcttccgagtcccataagaaacagaactacattcctgtgaaaaatggcaagcaattcacaaagcagaacggggagacccctgggatcattgccgaagctagcaaatctgaagagtcttag

SEQ ID NO: 120222 - DNA, 429 bp, synthetic construct
  misc_feature 1..429: note = Description of Artificial Sequence: Synthetic coding sequence
  source 1..429: mol_type = other DNA
atgccccgcaccaagcaaattcacccacgcaacctgcgcgataagattgaagaggcccaaaaggaattgaacggcgccgaagtgtccaaaaaagaaatcctccaagccggggtgaaagggacgagcgagtcattaaagggggtcaaacgtaaaaaaattgtagccgaaaaccatctgaagaaaattcccaagagcccgcttcggaaccccctgcaagcaaaacataaacagaacaccgaggagagtagctttgccgtcctgcactcagcaagtgaaagccataagaagcagaactatatccccgttaagaacggcaagcagtttacaaagcagaacggcgagacacccggcattattgctgaggcttccaaatccgaggaaagtgtgagccccaagaagccactgtttttgcagcagccgtccgaatag

SEQ ID NO: 120223 - DNA, 363 bp, synthetic construct
  misc_feature 1..363: note = Description of Artificial Sequence: Synthetic coding sequence
  source 1..363: mol_type = other DNA
atgcccaggaccaagcagattcatccccgcaacttgcgggataagatcgaggaggcacaaaaagaacttaatggcgccgaggtaagcaaaaaagagattctccaggcaggtgtgaagggcacaagtgagtctctcaaaggcgtcaaaagaaaaaagatagtggcagagaaccatctcaagaaaatacccaagtcccccctccgcaatcctcttcaggccaagcacaagcagaacactgaggagtcatcattcgccgtgttgcacagcgcaagcgaatcccacaaaaagcagaactacatccccgttaagaatggtaaacagtttaccaagcagaacggggaaacccccgggatcatcgcatag

SEQ ID NO: 120224 - DNA, 1752 bp, synthetic construct
  misc_feature 1..1752: note = Description of Artificial Sequence: Synthetic coding sequence
  source 1..1752: mol_type = other DNA
atgctgaaaaaacacattcgcacacacaccgacgtgcggccctaccactgcacttattgcaattttagcttcaagacgaaggatgagaaacagcgcttcagttacgaaaggtcggggtacgatctagaagagtccgacggccccgacgaggatgacaatgagaatgaggacgacgatgaggattctcaggctgagagtgtgcttagcgccaccccatccgtaacagcttctccccaacatctaccttcgaggtcctccctgcaggaccccgtttctacagatgaagacgtgagaataaccgactgcttttctggagtgcacactgacccgatggacgttttgcccagggcactcctcaccagaatgacggtgctgagcaccgctcagagtgactacaataggaagacactttcacctggcaaagcccgccagcgagctgctagggatgagaatgataccatcccgtcagtcgatacttcccgatctccctgccaccaaatgagcgttgattaccctgagagcgaagagatccttagatccagcatggctggcaaggctgtcgcaatcacacagtctccttcctctgtccgcctccctccagcagccgctgaacattccccgcagaccgcggctgggatgccttctgtggccagtccgcaccccgacccgcaggagcagaaacagcaaattacccttcaacctacaccaggcttgccttccccgcatacacacttgtttagccatttgccactgcactcccagcaacagtctcgtaccccatacaacatggtgcccgtcggggggatccacgtggtgcccgcagggttgacttactccactttcgtgcccttgcaggctggccctgtacagttgaccattccagctgtcagcgtggtgcaccgcacactcggcacacatcggaacaccgtgaccgaagtatcgggcaccacaaacccagcaggcgtagccgagctatcgtcggtggtgccttgtattccgattggccagataagagtccctggtctgcaaaacttatctacacctgggctccagagcctaccctccctgtccatggagaccgtgaacatagtcggactggctaacacaaacatggcaccacaggtgcacccacccgggctcgcgctcaatgcagtcggacttcaggtcttgacagccaatccctcttcccagtcatcgcctgccccgcaggcccacattccaggacttcaaatcttgaacatcgccctgcccaccctcatcccttccgtctctcaggtcgccgtagacgctcaaggggccccggagatgcccgccagccagtccaaggcgtgcgaaactcagcccaaacaaacttctgtggcctccgccaatcaagtcagccgcaccgaatcgccgcaggggctccctactgtgcagcgggaaaacgcaaagaaagtgctgaatccaccagctcctgccggagatcatgcacggctggacggcctctctaaaatggacacggagaaggctgcctccgcaaatcacgtgaagcctaagccagagctgacctcaatccaaggccagcctgcttctacaagccagcctctgctcaaggctcacagcgaggtgttcaccaaaccatctgggcaacagactttgtcacctgatagacaggtgccccggcccaccgctctgccgcggcgccaacccacagtccactttagcgatgtgagttctgacgacgatgaggatagactcgtaattgctacatag

SEQ ID NO: 120225 - DNA, 2103 bp, synthetic construct
  misc_feature 1..2103: note = Description of Artificial Sequence: Synthetic coding sequence
  source 1..2103: mol_type = other DNA
ggtgacaaatttagcttccagagggccctcggaaaccaaaagagcaccgtggtggagttttcgaataaggacgcttctgagattaactctgaacaggataaagaaaactccttgatcaagagcgagccgcgcagaattaagatctttgatgggggatataaatcgaacgaagagtatgtgtatgtcagaggtagagggcgcggcaagtacatctgtgaagaatgcggaatccgctgcaaaaaaccttcaatgctcaaaaaacacatcaggacacacacagatgttaggccgtatcattgcacgtactgcaacttctctttcaagaccaaaggaaatctcactaaacatatgaaatccaaagcccactccaagaaatgcgtcgacttgggcgtatcggttggcctcattgacgagcaggacacggaggaatccgatgaaaaacaaaggttctcctacgaacgctctgggtatgatctggaggagagtgatggaccggatgaggacgacaatgaaaacgaggacgacgacgaggattctcaggcggagtcagtcctttcagcaaccccctccgtgacagcgtctcctcaacacctaccctctagaagtagcctgcaggatcccgtgtctactgatgaagacgtgcgtatcacggattgcttctcaggcgtccacactgatcctatggacgtcctccctcgagcgctcctcactagaatgaccgtcctgtccacagcccagtccgactacaataggaaaacattgtccccggggaaggcccgtcaaagggctgcgagagacgaaaatgacacgattcccagtgttgacacgtcccgtagcccatgccatcagatgagtgtcgactaccctgaaagcgaagagatcctaagatccagtatggccggcaaagccgtagccataacccagagcccctcaagcgtgcgtttgccacccgccgctgctgagcactcacctcaaactgcggctggcatgcccagcgtggcctcccctcacccggaccctcaggagcagaaacagcagataacacttcagccaacaccgggattaccctcaccacacactcacctgttcagccacctaccactgcacagtcaacaacagagccggaccccatacaatatggttcctgtgggtggcatacacgtcgttccagcagggctcacatatagcacgtttgtccctctccaagccgggcctgtacagctgacaatccccgccgtgagcgtcgtgcaccgaaccttaggcacccaccggaacacagtcacagaagtcagcgggaccactaacccggcaggtgtagccgagctgagcagtgttgttccctgcatccctatcggacagattcgggtaccagggctgcagaacctgtccaccccagggctgcagagtcttccctctctcagtatggagacggtcaacatcgtggggttggcaaacacgaatatggcccctcaggttcatccccctggtctggcgctgaatgcagtgggcttacaggtgttgacagcgaacccatcttcgcagagcagccccgccccacaggctcacattccggggctccaaatcctaaatattgcgcttccaacactgattcccagcgtaagtcaggtggccgtagatgctcagggcgctccggaaatgccggccagccagagtaaagcctgcgagacacagcccaaacaaactagtgtggcctctgccaaccaggtgtctaggaccgagtcaccccaagggctcccaacagttcaacgcgagaatgccaaaaaagtcctgaatcctcccgcacctgctggtgatcacgcccgcttagacggactgtccaaaatggataccgagaaagcggcctccgcgaaccacgtcaaaccaaaaccagaactgacctccattcagggccagcccgcttcaactagccagccattgctaaaggctcattccgaagtctttaccaaacctagcgggcagcagacgctgtcaccagaccgccaggtacctagacctactgctctaccccggcgccaacctacagtccacttcagcgatgtgagcagcgacgatgatgaggatcgattggtgatcgccacctag

SEQ ID NO: 120226 - DNA, 7341 bp, synthetic construct
  misc_feature 1..7341: note = Description of Artificial Sequence: Synthetic coding sequence
  source 1..7341: mol_type = other DNA
atggatacaggcgacaccgccctgggccagaaggcaacaagccgtagcggagagacagacaaagcctctgggcggtggcggcaggagcagtcagccgttataaagatgtccacctttggcagtcatgagggtcaaaggcagcctcagattgagccggagcagattggcaatactgcctcagcacagttgttcgggtcgggaaaactggcctctccctctgaagtcgtccagcaggttgccgagaaacagtacccaccgcaccgaccctcaccttattcctgtcagcacagcctctctttccctcaacactctctgccgcagggcgttatgcacagcaccaaaccacaccaatcgctggaggggccaccctggctgtttcccggtccattgccgtctgtcgcttcagaagacctgttcccttttcctatccatggacattccggcggataccccaggaaaaagatttcctccctgaaccccgcatatagtcagtattcccagaagtcgattgagcaagcggaagaggctcacaagaaggagcacaaacccaagaaaccaggcaagtatatttgcccatactgctctagggcatgtgctaagccaagcgtcctgaagaaacatatccgctcccacactggcgagcgtccttacccctgcatcccctgtggttttagcttcaagacaaagtcaaatctctacaaacatcgaaagtcccacgcacacgctattaaagccgggctggtgcctttcaccgaatccgcggtatctaagctcgatctggaggcgggctttattgatgtagaggccgaaatccatagcgacggggagcagagtaccgataccgacgaggagagttcactgtttgccgaggccagtgacaagatgtcaccaggtccacccatcccactcgatattgccagtcgaggggggtatcatggaagcctggaagaaagcctcggaggtccaatgaaagtgcctattttaatcatccccaagtctggcatccccctccccaatgaatcctcccagtatattggtcctgatatgctgcctaatcctagcctgaacactaaggccgacgactctcacacagtgaaacagaagctggccctgaggctaagtgagaaaaagggtcaagatagcgagccttcattgaacctgctgtctccccatagtaaaggaagcactgacagcggatatttctcccgaagtgagtcggcggaacaacagatttcacctcccaataccaatgcaaagagctacgaggagattatctttggcaagtattgtcgactgagtcctcgcaatgcactgtcagtgacaacaacgtcacaggagagggcagcaatgggacggaagggcatcatggaacctctgccgcacgtgaacacgagacttgacgtgaaaatgtttgaggaccctgtgtctcagcttattcccagcaagggggacgtggatccatctcagacatcgatgctgaagtcaaccaaattcaattctgaatcaaggcagccccaaatcataccgagcagcattcgcaatgaaggaaagttgtatccagccaattttcagggtagtaatcccgtattgttggaagctcctgtcgattcctcacccctcatcaggtctaattccgtgccaaccagcagtgccactaacctgacgattccaccctctcttcgtggttcacatagctttgatgagcgcatgacaggttcagatgatgtgttctacccggggaccgtgggcattcccccccagaggatgttaaggcgacaggcggcctttgagcttccgtcagtccaagaagggcatgttgaagtggagcaccatgggcgcatgctgaaggggatcagttcatcatctctgaaagaaaagaagttgtcccccggggatagagttgggtatgattacgacgtatgccgtaaaccttacaaaaagtgggaagacagtgagacccctaagcagaattaccgggacatcagttgcctgagctccctgaagcatggcggagagtatttcatggatccagtcgtgccacttcagggggtcccatctatgttcggtacaacatgcgagaaccgcaaacggagaaaggaaaaaagcgtcggtgacgaagaggatacaccaatgatctgttccagcattgtgagcacccccgtgggaatcatggcctcagattatgaccctaaattacagatgcaggaaggcgtcagaagcggattcgccatggctggacacgagaacctgtctcatgggcatacagaacgcttcgacccctgcaggccacaactgcaacccgggtctccttctttagtttcagaagagtcccctagcgccatcgacagcgataaaatgagcgacctgggaggccgaaaacctcctggtaatgttatctccgttatacagcacaccaactctctgagtagacccaacagctttgagcggtctgagtctgcggagttagtggcttgcactcaggacaaggcaccttccccatctgagacctgcgactctgagataagcgaggcgcccgtctcacccgagtgggcgcctcctggggacggcgcagaatcgggcgggaagccctcgcctagccagcaggttcaacaacagtcttaccacacccagccccgactggttcgacagcataatattcaggtgccagaaattcgggtgacagaggagcctgataagcccgagaaagaaaaggaggcccaatctaaggagcctgaaaagcccgtcgaagagttccagtggccccagcgctccgagaccttatcgcagcttccggcagagaaactgcccccaaagaagaagcgcctgcgcttggccgacatggagcattcttctggcgaatcaagttttgaaagtaccggtaccgggttgtctagaagtccgtcccaagagagcaacttgagccattcaagtagcttttccatgagctttgaacgggaggaaacttcaaagctctccgcacttcccaaacaggatgagtttggtaaacatagcgagttcctgaccgtgccagccgggtcttattcactcagtgtccctgggcaccaccaccaaaaggagatgagacgatgctcctcagaacagatgccttgtccgcacccagcagaggtccccgaagttcgctccaagtcatttgactacggaaacctctctcacgcgccagttagtggtgcggccgccagtacagtgagcccttcaagggaaagaaagaagtgtttccttgtacggcaggccagctttagcgggtctccagagatcagccagggggaagtcggcatggaccagtcggtgaagcaagaacaactagagcacttgcacgccggcctgcgcagtggatggcaccacggcccaccagcagtattgcccccactgcagcaggaggatccaggcaaacaggtcgctggcccttgcccgcctctgtcaagcggccccctgcatctggctcagcctcagatcatgcacatggactctcaggaaagtctcaggaacccactgatccaacctaccagctatatgacgtcaaagcacctgcctgagcaaccacatctgtttccccaccaggaaacaatccccttttcccctatccaaaatgccctttttcaattccagtatcccacagtctgtatggttcacctgccggcccaacagccaccctggtggcaggcacactttcctcacccttttgcccaacaccctcagaagtcttacggcaagccctcatttcagacagagatccactcatcctaccccttagagcacgtggcagagcataccggcaagaaaccggccgagtacgcccacaccaaagagcagacctacccatgttacagcggagcctccggtttacacccaaaaaatctgctgccgaagttcccttcggatcaatcctctaaatccacagagactccatctgaacaggtgcttcaagaggatttcgcctccgccaacgccgggagtctgcaatccctgccaggaaccgtggtgccagttcggatccaaacacatgtccccagctatggatcggttatgtatacatccatatcccaaatcttaggccagaactcacccgcaatagtcatttgcaaagtagatgaaaacatgacacagagaaccctggtgacaaatgcagcaatgcaagggatcggctttaacatcgcccaggtcctaggccagcacgcaggacttgaaaaatatccaatctggaaagcccctcagactctgccactaggcttggagagctctatccctctgtgtctccctagtacttctgattcagttgcgaccctgggcgggagtaagaggatgctgagccctgcctcttcgctggagcttttcatggaaactaagcagcaaaaacgggtgaaggaagagaagatgtatggccagatcgtggaagagcttagcgcggtagagctgaccaactccgatatcaagaaggatctgtcaagacctcagaaacctcagctcgtccgccagggctgcgcatcagagcccaaggatggactccagtcggggtcttcttccttcagctccttgtcaccctcctctagtcaggactacccttccgtgtcccccagcagcagagagccatttctcccgtctaaggagatgttatcagggtctcgtgctcccctcccaggacagaagagcagtggtccaagtgagtccaaagagtcttccgatgagctagacattgatgaaaccgctagcgacatgagcatgtccccgcaaagcagcagtctgccagcaggcgacggccagctagaagaagaaggcaagggtcacaaaagacctgtaggcatgctggtgaggatggcaagcgcccctagcggtaacgtggccgactctaccctcttgctaactgacatggccgactttcagcagattttgcagtttcccagtctgagaacgacaaccactgtgagctggtgtttcctcaactataccaaacccaactacgttcaacaggctacgttcaagagctctgtgtacgcgtcttggtgcatcagttcatgcaaccctaatcccagcggcctcaacacaaaaacaacactggcactcctgaggagtaaacagaagattaccgccgagatttatactctggccgccatgcaccgaccaggaaccgggaaacttacgtcgtcttctgcctggaagcagttcacacagatgaagcccgatgctagctttctttttgggtcaaagctggagcgaaagctggttggcaacattttaaaggagcgaggtaagggcgacatccacggggataaggacataggctccaagcagaccgagccgattcgtatcaaaatattcgagggcggctataagtctaacgaagactacgtttacgtgagaggaagagggagagggaaatacatttgtgaggagtgtggcattcgctgcaagaagccaagtatgctgaaaaaacatattaggacccacaccgatgttcgaccatacgtctgtaagctgtgcaattttgcatttaagacaaaaggaaatctgaccaaacacatgaagtcaaaggcccacatgaaaaaatgccttgagcttggcgtgtcaatgacttcggtggatgacaccgagaccgaagaggcagagaatctcgaggacctgcataaggctgccgagaagcactccatgagttcgatctctaccgaccaccagttttctgatgctgaggaaagtgacggcgaggatggcgatgataatgatgatgacgacgaagatgaggacgacttcgacgatcagggcgacctcacaccaaaaacgaggtccaggagcacttctcctcaacctcctcgcttctcttctcttccagtcaatgtcggcgccgtgccgcatggcgtcccctccgacagttcgctgggacatagctcacttattagctacctcgtaactcttcccagcattagagtgacgcaactgatgaccccatcagactcttgcgaggatacacagatgactgagtaccagaggctgtttcagtcaaagtctactgacagtgagccggacaaggatcgactcgacatccccagttgcatggatgaagaatgcatgctaccctcagaacccagctctagtcctcgggacttcagtccaagttcacatcatagtagcccagggtacgattcaagtccctgccgtgataatagcccgaagagatatctgattcctaaaggtgacttgagccccagaagacatctcagccctagaagggatttatctcccatgagacatctgagcccccgaaaagaggccgccctacggcgggagatgtctcaaagggacgtgtcccccaggaggcatctttccccacgtcgacccgtgagtccggggaaagacataaccgctcgcagggacctttcacctaggcgcgagaggcgatatatgactaccatccgcgcaccttcaccaaggcgggcactctatcacaacccaccactgtcaatgggacaatacttgcaagcggagcctatcgtgttgggtccacccaacctgcgccgtggtctgcctcaggttccctatttcagcctgtacggcgatcaggaaggggcctacgagcatccggggtcctctctgtttccagaggggccaaacgattacgtttttagccacctccctcttcactcgcagcaacaggtgagagctccaatcccaatggtccccgtgggcggcatccaaatggtgcactctatgcctcccgccttatctagccttcatccttcacccactctgccactgccaatggaaggattcgaggagaaaaagggggcgtcaggggagtcattctcaaaggatccttatgtcttaagcaaacagcacgagaagaggggacctcacgcactgcagagcagtgggccaccatcaacgccttcttctcccagactactgatgaaacaaagcactagcgaagactcacttaacgccactgagcgagagcaggaggaaaatattcagacatgcaccaaggctatcgccagcctgcggatcgcaaccgaagaggcagctctcctgggcccagatcaaccagcaagggtacaggagccccatcaaaatcccttagggtctgcccacgtgtcgatacggcacttttctcgccccgagcctggacagccttgcacatccgcaactcatcccgacctccacgacggcgagaaggacaactttggtacctcacaaacacccctggcacactctaccttttattccaagtcatgcgtggatgataagcagctcgatttccatagttcaaaggaactgagctcaagcaccgaggaatcaaaagatcctagttcagagaagtctcagctccactag

SEQ ID NO: 120227 - DNA, 7341 bp, synthetic construct
  misc_feature 1..7341: note = Description of Artificial Sequence: Synthetic coding sequence
  source 1..7341: mol_type = other DNA
atggatactggcgacaccgctctaggccaaaaggcgacctcacgcagcggcgaaacagacaaggcttctggtagatggcggcaggagcagtctgctgtgataaaaatgtctaccttcggtagtcatgagggccagagacagccacagatcgagccggaacagatcggtaacacagcaagtgcccagctgttcgggagcggcaaattggccagtccatcggaagttgtgcagcaggtggcagagaagcagtatcctccccatcggccctccccttactcgtgccaacattctttgtcatttccacaacacagcctcccccaaggtgtgatgcactccacaaaaccacatcaaagcttggaagggccgccctggttattccccggcccactgccatctgtggccagtgaggatctttttccttttcctattcacggtcacagtggcggctatcctagaaagaaaatctctagcctaaacccagcctactcccaatacagccagaaatcaattgaacaggcggaagaggcccacaaaaaggaacacaagccaaagaaacccggcaagtatatctgtccttactgttccagagcctgcgcaaagcccagtgtcctaaagaagcacattcggagtcacacgggtgagcgaccatacccttgcatcccttgcggattttcgttcaaaaccaagtctaatctatacaagcaccgcaagagtcatgcacacgctattaaggccggcctcgtgccattcacagaatctgctgtgtccaaactggatctagaagcgggctttatagatgttgaagcggaaattcactccgatggggagcagtccacagatacagacgaggaaagttccttgttcgccgaagctagcgataagatgagtccgggacctcctatcccactggatatcgcatcaagggggggataccacggctcgctcgaagagagcctcggcggcccgatgaaggtcccgatcctcatcatcccaaaatcaggtattccactcccaaatgagagcagccagtacattggcccagatatgttgccgaatccctcattaaacactaaggccgatgatagccatacagtgaagcagaagcttgcccttagactcagcgaaaaaaaaggtcaagacagcgagcccagtctgaatcttctgtctcctcacagtaaaggctccaccgattcagggtatttttcccgatccgagagcgcagaacagcagatctctcccccaaacaccaacgctaagtcatatgaggaaatcattttcggaaagtattgtcggctttctccaaggaacgccctttcggtgacaactacctcccaagagcgtgccgctatgggacgcaaaggaattatggaacccctcccacacgtaaatacacgcctggatgttaaaatgtttgaggaccccgtaagccagttgataccgtctaaaggggatgtggaccctagccaaacttctatgcttaagtccactaagtttaattcagaatcccggcagccccagataatcccatctagtattagaaacgaaggaaaactgtacccagctaattttcaaggaagtaatcctgtgctgctagaagcccccgttgattcatcccccctaatacggagcaattcggttcccacttcctccgctacaaatctgacaattccccccagcctcagagggtcccattccttcgacgagcgtatgacaggatcggacgatgtcttctaccctggaactgtgggaattccgcctcagagaatgctccggcgtcaggcggcgttcgaactgccttccgtacaggaaggccacgtggaggtggaacaccacggtcggatgctcaagggaatttcatcttcgagccttaaggagaaaaaacttagtcctggagatcgcgtgggatatgactatgatgtgtgccgcaaaccttataagaagtgggaggattccgaaacaccgaagcagaactatagggatatctcttgcctgtcgagcctaaaacatgggggcgaatactttatggatccagtggtgcccctccaaggagtgccatcaatgtttgggactacttgtgaaaatcgcaaaaggcgcaaggaaaagtcagttggagatgaggaggatacaccaatgatttgcagctctattgtgtctacacccgtcggaataatggcttcagactatgatccgaagctgcagatgcaggagggtgtgcgcagcgggttcgccatggctggtcacgagaacctttctcacgggcacacggaacgattcgacccatgcaggccccaacttcaaccggggtccccttccctcgtaagtgaagaaagcccgtccgcgattgattccgacaaaatgagcgaccttggtgggcgcaagccaccaggaaacgtcatcagtgtgattcagcacacaaattccttgtctaggccaaactccttcgagcgctctgagtctgcggaactggttgcctgcacccaagataaggctccaagtccgtctgaaacctgcgactccgagatctccgaggccccggtgtctcctgaatgggctccacctggggacggggctgagtctggaggcaagcccagtcccagtcagcaagtccagcagcaaagctatcacacgcagccccgactcgttagacagcataacattcaggtccccgagattagggtgaccgaagagccagacaagccagaaaaggaaaaagaagcccagagcaaggagcccgaaaaacctgtagaggaattccagtggcctcagaggtctgaaactctgtctcaactccctgcagaaaaactgcctccgaagaagaaaaggttgcgcctggcagacatggaacacagctccggagagtcatcctttgaatctacaggcacaggcctgagtaggtccccctctcaagaaagcaacttgtctcattcatcgtccttctcaatgtcattcgagagagaggagacctctaagctgtctgctctgccaaaacaggacgagtttgggaaacattccgagtttttaacggttccggcgggctcctacagcctgagtgtgcctgggcaccaccaccaaaaagagatgcggaggtgttcaagcgagcagatgccatgcccacacccagctgaggttcccgaggtccggtctaagtcatttgactatggcaatctgtcacatgcccctgtgagcggcgcagccgcctccacagtcagcccatccagagagcgcaagaagtgtttcctggtgcggcaggccagcttttctggcagccctgagattagtcagggagaggtcggcatggaccagtccgttaagcaagagcagctggagcatctccatgccggcctaagaagcggctggcaccacggacctccagccgtcctgccgcctcttcagcaggaggaccccgggaaacaggtggcaggaccttgccctcctctcagctccgggcccttgcacctggcccagccacaaattatgcatatggacagtcaggagtcgttgcggaatcccctgattcagccaactagctatatgaccagtaagcatcttcccgaacagccccacctgtttccgcatcaggagaccatacctttctctcccattcagaatgcactgtttcagttccagtatcccactgtgtgcatggtccacctgcctgcccaacaacctccatggtggcaggctcactttccccatccttttgcacagcacccccagaagtcttacgggaagccaagctttcaaactgagatccacagcagttacccattggagcacgtggcagagcatactgggaaaaagcctgcagaatatgctcatactaaggaacagacgtacccatgttattccggggccagcgggctacacccaaagaatctgcttcctaagtttccctctgatcagtctagcaaaagtaccgagacaccctccgagcaggtactgcaggaagatttcgcctcggctaacgcgggctcattgcagtccttgcctgggactgtggtgcctgtgaggattcaaactcacgtgccctcttatgggtccgtgatgtacaccagcatcagccaaatactgggccagaatagtcccgctatcgtgatctgtaaagtagacgaaaatatgacccagcgaaccctggtgactaatgccgccatgcagggcataggcttcaatattgctcaggtgctggggcaacacgccggtttggagaagtaccctatttggaaggccccacagaccttgcccctgggcctggagtccagcattcccctgtgcttgccttctaccagcgactccgtggccacactggggggttctaaacgcatgctgtctcctgcctcgagtttggaactgttcatggagaccaaacagcagaaacgcgttaaagaagagaagatgtatgggcagatcgtggaagagctgtcagccgtggagttgaccaactcagatatcaagaaggatctctcgcggccacaaaagcctcagctggtcaggcaaggctgcgcctcggagcctaaagacggtctccaatcaggctcatccagctttagctcccttagtccctcctcctcacaagactatccctcagtgtcaccttcttcacgtgagccatttctcccgagcaaggagatgctgagtgggagccgagcccccctacccggacagaagagttccggcccaagcgagtcaaaggagtcaagcgatgagttggacatcgatgaaaccgcttctgatatgtcaatgtcaccgcagagtagctctctgccagccggagacggacagctggaggaggagggtaagggacacaaacggcccgttggaatgcttgtgagaatggccagtgctccgtcagggaatgtggccgattcaacattgcttttaaccgatatggcggatttccagcagatcttgcaattcccaagccttcggaccacgacaactgtcagctggtgctttctcaactacactaagccaaattacgttcagcaggctacattcaaatcctctgtgtacgcttcctggtgcatctcatcatgcaaccctaatccttctggattgaataccaaaacaactttggctcttcttcggtccaagcaaaagatcactgcagagatttacactctggccgcaatgcatcggcctggcacgggtaaactgactagttccagcgcctggaaacaattcacacaaatgaagcccgacgcaagttttctgttcggaagtaagctcgagagaaagctagtcggcaacattctcaaggagaggggcaagggtgacatacacggggataaagatatcggcagcaagcagacagagccaatccggatcaaaatttttgagggcgggtacaaatccaacgaagattatgtttacgtgagaggaagaggcaggggtaaatatatatgcgaagaatgcgggatccgctgcaaaaagccatccatgctgaagaaacacattcggactcacacagatgtccgcccttacgtttgtaagctgtgtaactttgcattcaaaactaaaggtaacttaacaaagcacatgaaatcgaaggcccatatgaagaaatgcttagagcttggcgtttcaatgacaagcgttgatgacacagagacagaggaagccgagaatcttgaggaccttcacaaggctgcagagaaacacagcatgagcagcatctctacggaccatcagttttctgatgctgaggaatccgatggagaggacggcgatgacaatgacgacgacgacgaagatgaggacgactttgatgatcagggggatctgactcctaagacacgttctcgcagcactagcccccagccacccaggttctctagcttgcctgtcaatgttggcgcggtcccccatggcgtgccctccgattcgagtcttgggcatagttcgctcatctcctacctcgtgactttgccaagcatcagggtcacacagcttatgaccccctccgattcttgtgaggatactcagatgaccgagtaccagcgactgttccagtccaagagtaccgactccgagcctgacaaagatagactagacatcccttcatgtatggacgaagagtgtatgctgccttcagagccctcttcctcaccccgggatttctcacccagcagtcaccattcaagccccgggtatgacagttccccatgccgtgataatagcccgaagaggtaccttatcccgaagggagatctgtcacctagaagacacctaagcccccgccgggacttgtccccaatgcggcatttgtcccccagaaaagaggccgccctcagaagggagatgagccagcgggatgtgagtccccgccggcacctctcaccgaggcgccctgtttctcccggaaaggatattactgccagaagagatcttagtccaaggcgggaacggaggtatatgaccaccattagggcaccatcacccaggagagccttatatcataaccctcctctatccatgggccagtacctgcaagcagagcctatcgtcctcgggcctcctaatctgcgaagagggctcccacaggtgccatacttctcactgtatggcgaccaggagggcgcctatgaacaccctgggagctccctttttcccgaggggcccaacgactacgtgttttcccatctgccattgcactcacagcagcaggtacgcgccccaatacctatggttccagtgggcggaattcagatggtgcacagcatgcctcccgcccttagctctctgcatcctagccctaccttgcccctccccatggaagggtttgaagaaaagaagggggccagcggagaatcctttagtaaagacccctatgttctaagcaaacagcacgagaagcgaggtcctcacgccttgcaatccagcgggcctcccagtactcccagctctccacgactgctgatgaaacagagtaccagtgaggactccctgaatgctacagaaagggagcaagaagagaatatccagacctgtactaaagcaatagccagcctgaggattgcgaccgaggaggccgccctcctgggccccgatcagccagcccgcgtccaggaaccccaccaaaaccctctaggtagtgctcacgtatctataagacacttttctagacccgagccagggcagccctgtacttccgccacacacccagacctgcatgatggcgagaaggacaacttcggcacatctcagacacccctggctcatagcaccttctattctaaatcctgcgtcgatgacaagcagctggattttcacagctctaaagaactgagcagctcaacagaggagtctaaggatccctcatcggaaaaaagccagttgcattag

SEQ ID NO: 120228 - DNA, 7341 bp, synthetic construct
  misc_feature 1..7341: note = Description of Artificial Sequence: Synthetic coding sequence
  source 1..7341: mol_type = other DNA
atggacacgggggacacagccctgggacagaaggctacttctcgctcaggagagacagataaagcctccggacgctggcgccaggaacaatccgccgtgattaaaatgtcaacttttggatcccatgagggtcagcgccaaccccagattgagcccgaacagatagggaacacggcatcagctcagctctttggatcgggtaagctagcatcccctagtgaggtggtacagcaggtggccgaaaagcagtaccctccccaccgcccgtccccttacagttgccagcactcattgtcatttccccaacacagcctgccacaaggcgtgatgcatagtacaaagccccatcagtccctggaggggcccccctggctgtttcccgggcctctgccaagtgtagcttccgaggatctcttccccttccctatccatggtcactctggaggatatccccgaaagaaaatttcctccctaaaccctgcatactcccaatatagccagaaatcaatcgagcaagccgaagaggcccacaagaaagagcacaaaccaaaaaaaccggggaagtacatttgtccttactgcagcagggcctgtgccaagccttcagttcttaaaaagcatatcaggtctcacacgggcgagcgcccctatccctgtattccatgcggattctcctttaagaccaaatctaatctgtacaagcaccgcaaatctcatgcccatgcgatcaaagcaggactcgtccccttcactgaatctgccgtgtccaagttagatttagaggccggattcatcgacgtagaggccgagattcactctgacggcgagcaaagcaccgataccgacgaggaatcctcgttgtttgcggaagcaagcgataagatgtcacccgggcctcccatacccttggatattgcgagccggggagggtaccacggctctctcgaggagtcactggggggccccatgaaggtgccaattttgattattcccaaatctgggatccctctccccaatgagagtagtcagtacatcggacccgacatgctgcctaatccttctctcaatacaaaggcagacgatagtcatacagtgaagcaaaaactggccttgaggttgtctgaaaagaaaggacaggatagcgagcctagccttaatctgctgtcaccccattccaaaggcagcacagactcaggatatttctccagatctgaatcagctgaacaacagatcagtccaccgaacacaaacgccaagtcttacgaagagattatcttcggaaaatattgtcgcctttctcctagaaatgctctctccgttactactacttctcaggaaagagctgcgatgggccgcaaaggcatcatggagcctcttcctcacgtgaacacaaggctggacgtgaaaatgttcgaggaccccgtctctcaactgatcccctcaaaaggcgatgtcgaccccagccagacttccatgctcaaaagcaccaagtttaattctgaaagccggcagccacagattatcccttcttcgatacgtaatgaagggaagctgtacccagcaaattttcagggatctaatcccgtgctgctggaggccccagtggattcatcacccctgatccgcagtaattctgtcccaactagcagcgcaactaaccttaccatccctccaagcctgcggggcagccattcattcgatgagaggatgaccggaagtgatgacgtgttctatcccggaacagtcgggatcccccctcaacgcatgttgaggaggcaggctgccttcgagctgccttccgttcaggaagggcacgtcgaggtcgagcaccatgggaggatgttgaaaggtatcagcagtagttccctcaaggaaaagaagctctcacctggagatcgagtgggatacgactatgacgtgtgccgaaagccgtacaagaaatgggaggactcagagacccctaaacagaattatcgtgacatctcttgcctgtcttcactgaaacatggcggtgagtacttcatggaccctgtggtgccattgcagggggtgccatctatgttcggtaccacctgcgagaatagaaaaaggcggaaggagaagtctgtgggcgacgaagaggacacacctatgatctgctctagtattgtgtctactccagtgggtatcatggcctctgactatgatcctaagctccaaatgcaagaaggggttagatctgggtttgccatggcaggccacgaaaatctgagccatggtcacaccgagcgctttgacccttgtaggccgcagctgcagcccggctccccatcgctagtatcagaagaaagtccttcagccatcgacagcgacaaaatgtctgatctgggtgggcggaagccgccagggaacgtgatatctgtgattcaacacaccaatagcctctctagaccaaattcttttgaacgctctgagtcagccgagctggtggcctgcacacaggacaaagctccgtcgccctcagagacctgcgactccgaaatcagtgaagccccagtctctcctgagtgggctccacccggggacggggcagaatcaggtggaaagccaagcccgtctcagcaggttcagcaacagtcctatcacacacaaccgcggttggtgcgccagcacaacatccaggtacccgaaatcagggtgactgaggaacctgataagccagagaaagagaaggaagcccagtcaaaggagcccgaaaaacccgttgaagaattccagtggccgcaaagatcagaaaccttgtcccaactccctgcagagaaattaccacccaagaagaaaagactccgccttgcagacatggagcactcttccggggaatcatctttcgaatctacaggaacgggactaagtaggagccccagtcaggaatccaatctgtcccattcttcaagcttctctatgagcttcgagcgagaggagacctccaagctcagcgccttgcccaaacaggatgagttcggcaagcactccgagttcctgacagttccagctggatcttattctctgtctgttcctgggcaccatcaccagaaggaaatgagacgctgtagctccgagcagatgccatgtccccatccagccgaggtcccagaggttcgctccaaaagtttcgactacggtaatttgagccatgctcctgtcagtggcgccgccgcatctaccgtctctccttctcgtgaaagaaagaaatgctttctggttcggcaggctagctttagcggttctcccgagatctctcagggcgaggtcggtatggatcagagcgttaagcaagagcagctcgagcacctgcacgcaggtctacgctcggggtggcaccatggcccacccgctgtactcccccccctgcagcaggaagatcctggaaagcaagtcgccggcccttgccctcctctgagcagcggtccactccacctggcgcaaccacaaatcatgcacatggattctcaggaaagtctgcgcaatccactgatccagccaacttcctatatgacctcaaagcacctccctgaacaaccccatctcttcccacatcaggaaacaattccattctcccccattcagaatgcactgttccagttccaatacccaacagtgtgtatggtgcacctcccagcacaacaaccaccttggtggcaggcccactttcctcacccttttgcccagcacccccagaagtcctacggaaagccctccttccagacggaaatccacagttcgtaccctttggagcatgtcgctgagcatactggaaagaaacccgctgaatacgcccacaccaaagagcagacatacccgtgttatagtggagcttccggcctgcatcctaagaatcttctaccgaaatttccctcagatcaatcttccaagagtacagagactccgtccgagcaggtactgcaggaagactttgcttctgctaacgcgggctcccttcagtccctgcctggaaccgtggtacctgttcgaatccagacgcatgttccgtcctatggaagcgtgatgtatacatctattagccagatcttggggcagaattccccagccatcgttatttgtaaagtggatgagaatatgacccaacggaccctcgttaccaatgctgcgatgcagggtatcgggtttaacatcgcacaagtgctgggtcagcacgctggcctggagaaataccctatctggaaggccccacagaccctgcctcttggactcgaatcctccattccactgtgcctgccctccacttccgatagtgtcgccacgttgggagggtcgaagcggatgctttcccccgcatctagccttgaactgttcatggagacgaagcaacagaagcgggttaaggaggagaagatgtacggtcagattgttgaggaactgagcgccgtcgagctgacaaactccgacataaagaaagatctcagtaggccacagaagccccaactcgttcgacagggttgcgccagtgagcctaaagatggccttcagtctgggtcaagtagcttcagctcattgtcaccctccagtagccaggattacccttcagtgtctcctagttctagagagccctttttgcctagcaaagaaatgcttagcgggtcaagagccccattgcctggccagaaatccagcggccctagtgaaagtaaggagtcctccgacgagctggacatcgatgagaccgcttctgatatgtctatgagtccccagtcgtcatccctccccgccggcgacggacagctggaagaggagggaaaaggacataagcgcccagtcggaatgctggttcggatggctagtgcaccaagtggtaatgtcgctgactccacactcctgcttaccgatatggccgatttccaacaaattcttcagtttccatctctgcgcactacaacaactgtgagctggtgcttcctgaactatacgaaacccaattatgtccagcaggcgacatttaaatcttcagtgtatgcgagttggtgtatcagctcctgtaatcccaatcctagcggtttgaacacaaagacaacgctcgcgctgctccgcagcaagcagaaaatcaccgcagagatctacactctcgcggccatgcaccggcctggtactggtaagctaacatcgtcgtccgcatggaagcagttcacccagatgaagcccgatgccagtttcctgttcggttctaagctcgaaagaaaattagtgggcaatatcctgaaggaacgcggcaaaggagacatacatggtgataaggatatcggaagtaagcagacagagcctattagaattaagatttttgaaggaggctataaatccaacgaagactacgtttacgtccggggccgcgggagggggaaatacatttgcgaagagtgtggaatcagatgtaagaagccaagcatgctgaagaaacatattagaacacacacagatgtgcgcccatatgtttgcaaactttgcaatttcgcattcaagacgaagggaaatctaaccaaacacatgaaatcaaaggcgcatatgaaaaagtgccttgagctaggggtatccatgactagtgtcgatgacactgagaccgaggaagcagagaatctcgaggatctgcataaggccgcggagaaacacagcatgtcgtcaatcagcacagatcatcagttctctgatgccgaggaatctgatggtgaggatggagacgataatgacgatgatgacgaagatgaagacgacttcgatgaccaaggagacctcactcccaagacccgtagtaggagtaccagtccacaaccccccagattctccagcctgccagtcaacgtgggcgctgtccctcacggtgtaccctcggactcttcgctgggtcacagctccctcatatcttatctggtcacacttccctctatcagggttactcaactgatgacaccttccgactcctgcgaggatacacagatgaccgaatatcagcgcctattccaatccaagagcacagactcagaacccgataaggacagactggatataccctcctgtatggatgaagaatgtatgttgccctcagaaccgtcctccagcccacgagacttttccccttcaagccaccactcctcaccgggctatgatagtagtccctgccgagataactcccctaagaggtatttgatcccaaaaggtgacctctctcctcgtaggcacttaagcccaaggagagacttgtccccaatgcgccatctttcgccgcgaaaagaggccgctctgaggagggagatgagtcagcgcgacgtgtcccctcgccgacatttgagccccaggcgacctgtcagcccaggaaaagacatcacagccagaagggatctgtccccgagacgggaacgtcgatacatgaccaccattagagccccaagcccaagaagagcactctatcataatccacccctctctatggggcaataccttcaggcagagcctatcgtcttaggccctccaaatttgaggcgcggactgccccaagtgccctacttctccctgtacggggaccaggagggcgcttacgagcaccccggctccagcctgtttcctgaaggcccaaacgactacgtgtttagtcacctccctttacacagtcagcagcaggttcgggctcccatcccaatggtccctgttggtggcatccaaatggtccactcaatgccaccagcgttgagctcattgcacccctctccgacactgcctctgcccatggagggcttcgaggagaagaaaggtgcttcaggagagagctttagcaaggacccctacgtgctcagcaaacaacatgagaagagaggaccccacgcacttcagtccagtgggccgcccagcacaccctcgtctccacgtttgcttatgaaacaaagtacaagcgaggactctctaaatgccactgagcgtgagcaggaggagaatattcaaacttgcactaaggccatcgccagcctacgaatcgctacagaggaggccgccttgctcggacccgaccagcccgcccgagtccaggagccgcatcagaaccctctgggctccgcacatgtcagtattcgccacttcagtaggccggagcccggccagccatgtacctccgccactcatcccgacctgcacgatggtgagaaagataactttggtaccagccagacacccctggctcacagcaccttttattccaagtcctgcgtggacgacaagcaactggacttccattcctcgaaagagctgtcttcaagtaccgaggagagcaaagacccatccagcgaaaagagtcagctgcactag

SEQ ID NO: 120229 - DNA, 7221 bp, synthetic construct
  misc_feature 1..7221: note = Description of Artificial Sequence: Synthetic coding sequence
  source 1..7221: mol_type = other DNA
atggatcccgaacagtccgtaaaaggcaccaagaaggcggagggaagtccgcggaagagactgaccaagggggaagcaatccaaacctccgtgtcttcatctgtcccgtatccaggctcaggcaccgctgcaacacaagagagcccagcgcaagaattattggctccccagccttttcccggcccttctagcgtgcttagagaaggttcccaggagaagacaggccagcaacaaaagccccccaagcgtcctccaatcgaggcgtcagtacatatctcacagctcccacagcatcctcttacgcctgcttttatgtcaccagggaagccagagcacctactggaaggcagtacatggcagttggttgatcccatgcgtccaggcccatcagggtcatttgtggctcccggcctccacccccagtctcagctcttaccctctcatgcgtcgatcatccccccagaagacttgccaggcgtccctaaagtgtttgtgcctagacctagccaggtctccctcaaacctaccgaggaagctcataagaaggagagaaaacctcagaagcctgggaaatatatttgtcagtattgtagtcgcccgtgcgccaaaccctcagttctgcagaagcacattagatcacatacaggcgagaggccctatccctgtggaccatgcggcttctcattcaaaaccaaaagcaatttgtataaacatcgtaagtcccatgcgcacaggatcaaagcgggtttagcttccgggatgggcggtgagatgtatcctcacggcttggaaatggaacgaattccaggtgaagagtttgaagaaccaacggaaggggagagcactgattcagaagaggaaacatccgccacatccgggcatcccgccgagctttcacctcggcccaagcagccgctgttatcaagtggcctctatagcagcgggagccactcgagcagccatgagagatgttccttgagtcagtcatcgacggcacagtcattagaagatcctccaccttttgtggaaccttctagcgaacatcccctaagccataaacctgaagacacccataccattaagcaaaagttggctctccggcttagcgagcgtaaaaaggtcatagacgaacaggctttcctgtcccctgggtcgaagggttccacagaatccggctatttttcccgtagcgagtccgctgaacaacaggtgagtccgcctaatacaaatgcaaaatcatacgccgagatcatcttcggcaaatgtggtcggattggccagagaacggccatgctgacagctaccagtacccaacccctgctccctcttagtacagaggacaaaccgtctctggtaccactttctgtgcccagaactcaagtcatcgaacatattaccaagctcatcacaatcaatgaggctgtcgttgatacgtccgagatagattctgtgaagccgagacgatcgagtctcagccgtcgctcctccatggagagccccaagagctccctgtatcgggagcccctgtccagccattccgagaaaactaagcctgagcagtcactgctgtcgcttcaacaccccccttcaacagctcctcccgtgccactcctgcgcagtcactccatgccatctgcagcctgtaccattagtactccacatcacccttttaggggatcctacagttttgatgaccacatcaccgactctgaggctttgtcccattctagtcacgtcttcacttcacatccaaggatgttgaaacggcagccagctattgaactcccactgggaggtgagtactcctctgaagaaccaggcccaagttcaaaggataccgctagcaagccatccgatgaggtggaacctaaggaatcggaactaacaaagaagaccaagaaagggctgaagaccaagggtgtcatctatgaatgtaatatctgtggtgctaggtacaagaagcgtgacaattatgaagcccacaaaaagtattattgttcagagctgcaaatcgcgaaacccatctcggccgggacccacaccagtccagaggccgagaaatcacagattgagcacgagccctggagccagatgatgcattacaagctgggaactaccctagagttgacccccttgagaaagcgtaggaaggagaagtcacttggtgacgaagaagagccgccagccttcgagtctactaagtcacagtttggtagtcccggccctagcgacgccgccaggaacttgccactggagagcaccaaatcacccgctgaacccagcaagtccgttccaagcctcgaaggcccgaccggcttccagccaaggaccccaaagcccggcagtggctccgaaagcggtaaggagcggagaaccacaagtaaagaaatcagcgttatccagcatacttctagcttcgagaagagcgattcacttgagcagccatcgggcctcgaaggagaggacaaacctctcgcccagtttccatctccccctcctgctccgcatgggaggtcagcgcatagccttcagcccaaactcgtacgccagcccaacattcaggtgcctgaaatcctggtgacagaagagcccgatagacccgacacagagcctgagccaccacccaaagaaccagaaaagacagaagaatttcagtggccacagcgctctcagacattagctcaactccccgctgaaaagcttccccccaagaagaaacggctacgtttggcagagatggctcagagcagcggggaatccagttttgagtccagcgttcccctctccaggtcgccgagccaagaatcgaatgtgtccctgagcggttcatccagatcagcttccttcgagcgcgatgaccacggcaaagcagaggccccgtctccctcgtcagacatgaggccgaaacccctcggcacccatatgctcaccgtaccaagccatcatccacatgctcgagagatgaggcggtctgctagcgagcaatcccccaatgtcagccattcagcccatatgaccgagacacgtagtaagtcttttgattacggtagcctttccttgacaggcccctctgcccctgcacccgtggctccacctgctagggtggcgccacctgaacgccggaagtgttttctcgtgcgacaggcttctctatctcgtccgcccgagagtgaactcgaggtggctccaaagggacgtcaggagagcgaagaacctcagccttcttctagtaagccgtcagccaagagttccttgtctcagatcagctctgcagcaacctctcacggcggtccacctgggggcaaaggtcccggccaagacaggcctccgctcgggcctaccgttccttataccgaggctttacaggtcttccatcacccggtggcacagactcccctccacgagaagccctatctcccccccccagtcagcctgttttcctttcagcacttagtgcagcatgagccggggcaatcacctgagttcttctcaacccaggctatgagcagtctgctcagttcgccttattctatgccaccgttacccccatccctttttcaggcacccccactgcccttgcagcctaccgtactacaccccggccaattacaccttcctcaactcatgccccatcccgcgaatatcccctttcgccagccaccatccttcctgcccatgccataccctacttcttccgccttgagctccggtttttttctgcccctgcagagtcagtttgccctccagctcccaggagatgtggaaagccaccttccccagataaaaacgagcctggcaccactggctacaggctccgctggcctcagccccagcaccgagtattcgtcagacatccgtctcccgccggttgcccctccggcctctagctcagcgcctactagcgccccccctcttgctctgccagcatgtcccgataccatggtgtcccttgtggtccccgtcagagtgcagacgaacatgccctcctacggctctgcaatgtatacaacccttagtcaaatcctggtgactcagagccagggaagcagcgctaccgtggccctccccaaatttgaagagcccccgagcaagggaacaaccgtgtgtggcgctgacgtccacgaagtggggccaggtcctagcggcctgagcgaggagcagtcccgagctttccccactccctacctccgcgttcctgtcacgctgccagaacggaaaggcacctctctcagttcggagtccatcctatctttggaggggtcctctagcactgctggtggatctaagagagtcctctcaccggctggatccttagagctgacaatggaaactcaacagcagaagagggtgaaggaagaggaggccagcaaggcagacgaaaagttggagcttgtcaagccctgttccgtcgtgttgacctcaactgaagacggaaaacggcctgagaagagccatctgggcaaccagggccagggacggcgcgagctggagatgttgagtagcctgagtagcgacccatccgatacaaaggagattccccctctcccccatcctgctctctctcacggcaccgcccctggctccgaggcattaaaggagtacccccagccaagtggcaagccacaccggcgggggttgactccactgagcgttaagaaggaggactccaaggagcagccagatctccctagcctggcccctccgtccagtctgcctcttagtgagactagttccaggcccgccaaatctcaggaaggcacagactctaagaaggtacttcagtttccaagtctccacaccaccaccaatgtttcctggtgttacctgaactatattaagcccaaccatatccagcatgccgaccgcaggtcctccgtctatgctggctggtgtatttctctctacaatccaaatcttcctggcgtgtccacaaaggccgctctaagtctgcttcgctccaagcagaaagtgtctaaagagacctatacaatggccacagctccacaccccgaagcaggacgactggtgccatcatctagtcggaagccacggatgaccgaggtgcatcttccgtccttggtttcacctgagggccagaaagacttggcccgggtggaaaaggaggaagagaggcgaggagaaccagaagaagatgctcctgccagccagagaggcgaacctgccaggatcaagatttttgaaggaggttacaaatctaacgaggagtatgtgtatgttagggggcgggggaggggcaaatacgtctgcgaagaatgtgggatccgctgcaagaagcccagcatgctgaagaagcatatcagaacgcacactgatgtcagaccttatgtatgtaagcactgccacttcgccttcaaaacaaagggtaatctcaccaaacacatgaaaagcaaagctcattctaagaaatgccaagagaccggtgtgctcgaggagctggaagcggaggaggggacctcagacgacctttttcaggattccgaaggcagagaaggcagcgaggcagtggaggagcaccagttctctgatcttgaggacagcgacagcgactccgatttggatgaggatgaggacgaagacgaggaggagtcccaggatgagctgagtagaccctccagcgaggccccacctcccggcccgccacatgccttgagggcagactccagtccgatcctgggacctcaacctcctgacgccccggcctccgggacagaagcaactcggggcagctctgtcagtgaggccgaacgtctgaccgccagctcatgtagcatgagctcgcaatccatgcctggcctaccctggctgggccctgcaccattaggctcagttgaaaaggatacaggctcagcgctgtcctacaagcccgtcagcccacgtcggccatggtccccaagcaaggaggccggtagcagaccacctctggcacggaagcacagcctcactaagaacgactccagtccacagaggtgctcaccagcacgagaacctcaggcttcagcgccaagcccacccgggttgcacgtggaccctggtaggggaatgggagctctgccatgcggcagtcccaggctgcagttaagtcccttaacgctttgcccgttaggcagagagctggcgcctagggctcatgtgttatccaagttggaggggactacagaccctggactgcccaggtattcccctaccaggagatggtctccgggtcaagcggagagcccccctcgttccgctccgcccggtaaatgggcgcttgcgggtccaggttcaccaagcgccggagagcatggaccaggcctggggctggacccccgggtgttgttcccccccgctccgctcccccataaactactcagccggagccccgagacttgcgccagcccttggcaaaaagccgagtctaggagtccttcttgttcccccgggcccgcccaccccttgtctagcaggccattttctgccctgcatgactttcacggacacatcctcgccaggaccgaggaaaacatcttttctcacttgccactgcattcgcaacacctgacccgcgccccttgtccattgattcccataggcggaatccagatggttcaggctagaccgggcgcccacccgacactgctgccaggacccacagcagcttgggtaagtggtttcagcgggggaggaagcgatctgaccggggcccgcgaagcgcaagagcggggcaggtggtcccctaccgaatcttcttcagcttctgtgtctccagttgctaaagtatccaagttcacgctgtctagcgagcttgagggaggggattatcctaaagagcgggagaggacagggggagggcctgggcgccccccggattggaccccccacggtaccggagctcccgccgagcccaccccaacacatagtccctgcacaccaccagataccttacctcggccaccccagggtcgcagagcagcacagtcttggagccccagactcgagagtcctcgtgcccccacaaatccggagcccagtgccacaccaccgctggatcgttcgtccagtgttggctgcctggccgaagcctccgctcgctttcctgctaggacacgcaatctgagcggggagccccggacccgccaagatagcccaaagccaagcggctccggagaacctcgggcacaccctcaccagcctgaggaccgggtgccaccaaatgcctag

SEQ ID NO: 120230 - DNA, 7221 bp, synthetic construct
  misc_feature 1..7221: note = Description of Artificial Sequence: Synthetic coding sequence
  source 1..7221: mol_type = other DNA
atggatcctgaacagtcagtcaagggtactaagaaggctgaagggtcaccccggaagagattgaccaaaggtgaggccatccaaactagcgttagcagcagcgtgccttaccctgggtctgggacagcagcgactcaggaaagccctgcgcaagagcttctagcccctcagcctttccctgggccgtcctccgtgctccgggaggggtcccaagagaagacagggcaacagcagaaacctcccaaacggcccccaatcgaagctagcgtgcatatcagtcaacttcctcagcacccattgaccccagccttcatgtcacccggaaagcctgagcatctgctggaaggcagcacttggcagttagtggatcctatgcgcccagggccttccggctcgttcgtggctcctggcctgcacccccagtcccaactgctgccttcacacgctagcatcatccctccagaagacttgcccggggttcccaaggtgtttgtgccccgcccttcccaggtgtcactaaagcccacggaagaggcccacaaaaaagagcggaagccacagaagccgggcaaatatatatgccagtattgttcccggccctgcgccaagccaagtgttttgcaaaagcacatcaggagccacacaggggaacgcccctatccgtgtggcccctgtggcttttcctttaaaaccaagtctaacctctataagcatagaaaaagtcacgcgcaccgcatcaaagcaggccttgcttctgggatggggggtgaaatgtaccctcatggattggaaatggaaaggatccccggggaagagtttgaggagcctacagagggggaatcaacagattccgaagaggagacttctgctacctccggtcacccggcagaactgagcccccggcccaagcagccacttttgagctcaggtttatattctagtggcagccactcaagtagccatgagcgctgctccttaagccagtcaagtactgcccagagtctggaagaccccccccccttcgtcgaaccatctagcgagcaccccctgtcccataaacctgaggatactcacaccattaaacagaaattggccctgcgactctctgagagaaaaaaagtgatcgacgagcaggcatttctctcgccaggctcgaaaggaagcacagagtccgggtatttctctcgctcggaatctgctgagcagcaagtgagccccccaaacacgaacgcgaaatcttatgccgagatcattttcggcaagtgcggtcgcatcggccagagaaccgcgatgctgacagcgacctctacgcagcccctcctgccactgtcaacagaggacaaaccctctttagttcccctatcagtacctcgaactcaagttatcgagcacatcaccaagttaataacaatcaacgaagccgtagtggatacatccgagatcgatagtgtgaagcctagacgatccagcctgtctcggcggtccagtatggagtcccccaagtctagtctctatagagagcccctgtcgagccactccgagaaaactaagccagagcagagtctgctgagcttgcagcaccccccttctacagccccgcctgtgcctctcctgcgatctcactccatgccctccgcagcttgcacaatctcgactccacaccatccctttaggggctcttacagttttgacgaccacattactgatagcgaggctttgtcgcatagtagccatgtcttcacaagtcatcccagaatgttgaaaaggcagcctgctattgagcttccactggggggcgaatattcctctgaggaaccaggaccctcatctaaggataccgccagcaagccctccgatgaggtggagcccaaagagagcgagctgacaaaaaagacgaaaaaagggctcaagaccaaaggcgtgatttatgaatgcaacatctgtggagcaaggtacaaaaagcgcgacaactacgaggctcataagaagtattactgctccgagcttcagatcgccaaacctatctcagcagggacacacacatctcccgaagcagagaaatctcagatcgagcacgagccatggtctcaaatgatgcattacaaattaggaaccacactagagcttacccccctccggaagagacgcaaggaaaaatcgctcggggatgaggaagagcccccagcctttgagtccactaagtcccaattcgggagccccggtccttctgatgccgctcgcaacctgccacttgaaagcacaaagtccccagctgagccaagcaagtccgtcccaagcttggagggaccaacaggctttcagcctagaacgcctaaacctgggtcaggcagtgagtccggcaaagaaaggcggaccacttccaaagagatcagtgtgattcagcataccagctcattcgaaaaaagcgactcactggaacagccatccggcctggaaggggaagacaagcccctcgcccagttcccttcaccaccccctgcccctcatggccgttctgctcatagcctccagccgaaactcgttagacagcccaacatccaggtccccgaaattttagtgactgaggagcccgataggcccgacactgagccagagcccccacccaaggagccagaaaagaccgaagaattccagtggccccaacgatcccagacgctagcccaattgcctgccgaaaagcttcctccaaaaaagaagcgtctgaggctggctgagatggcgcagtcttctggagagtcttcgttcgaatccagcgtgccactgagtcggtcaccaagtcaggaatccaacgtgtcccttagcggcagtagccgaagcgcaagttttgagagagatgatcacggaaaggccgaggccccatctccttcttcagacatgcgccccaaaccactgggcactcacatgctaactgtaccaagtcaccatcctcatgccagggagatgcgccggtccgcctcagaacagtccccaaacgtgagccactccgcgcacatgacagaaacccggtctaaatccttcgattacggctctctgtccctgacagggccatctgccccagctcccgttgcgccaccagctagggtggcgcctcccgagagacgcaagtgctttttagtgcgtcaggccagtctgagcaggcccccagagtctgagctcgaggtggcccccaagggacgccaagagtcggaagagccacaaccttcctcatcaaagcctagcgccaaaagctcacttagtcagatcagctccgccgctactagccacggaggaccgccaggagggaaggggccaggtcaggaccgtccaccactgggccccacagtgccctatacagaagcactgcaggtttttcaccacccagttgcacagacacctctgcacgagaagccctacttgcccccacccgtgtccctcttcagttttcagcatctcgtccaacacgagcctggccaatctccggaattctttagcacacaggccatgagctcgctgctttccagcccgtatagcatgccaccattgcctccgagtctttttcaagccccgcctctgcccttgcagcccacggtgctacacccagggcagcttcatctgccacagttgatgccacacccagccaatattccatttagacagcctccctcttttttgcccatgccctatcccacaagctccgcattgagcagcgggttcttcctgccactgcaatcgcaattcgctcttcagctccctggcgacgtcgaaagccatctccctcagattaagacatccctcgccccattggcaactggcagcgccggcctgtccccctcaactgaatatagcagtgacattcgactcccccctgttgctccgccggcatcatcgtccgcccctacctccgcacctcccctggccctacctgcttgcccagacactatggtcagtctggtggttcctgtccgagtacagaccaatatgcccagttacggttccgctatgtataccaccctttcccagattttggtgacgcagtctcagggcagctctgccactgtggcattgcccaaatttgaagagcctcccagcaaaggaactaccgtgtgcggcgccgatgtgcacgaggtgggacctgggcccagcggtctctcagaggaacagtcacgagcatttccgacaccttacctacgtgttcctgtgacattgccagaacgtaaggggacaagcctctcctcagagagtattctgagtctggaaggctcctcaagtaccgccggaggaagcaagagggtgctcagtcccgccggctcactggagctcacaatggaaacccagcagcagaaacgtgtgaaggaggaagaggcatctaaggcagatgaaaaactggaactggtgaaaccttgtagtgtcgtgctcacctctactgaggacgggaaacgacccgagaaatcacacctgggcaatcaaggccagggacgcagggagctagaaatgttatcctcactgtcgagcgacccatcggataccaaggaaattcccccgcttccacacccagccctttcccatggcactgctccagggagcgaggctcttaaagagtatcctcagccgagcgggaaaccccacaggcgcggtcttactccactctctgtgaagaaagaagactctaaggagcaacctgatttaccttcgctggccccaccctcctcactgccgttgtctgaaacatcttcgcgacccgccaagtcccaggagggtacagacagcaagaaagtgctgcagttcccttcattacacaccaccacaaatgtgagttggtgttatttaaattacattaaacccaaccatatccaacatgcagaccgaaggagcagcgtgtatgcaggttggtgtatttcactgtataatcccaatctgccgggagtgagcaccaaggctgccctcagcctgctgagatcaaaacagaaggtgtctaaggagacctataccatggccactgctccccacccagaggccggtcgattggttcccagctcatcaaggaagccgcgaatgacagaagtccacctgcccagccttgtgagcccagaaggacagaaagacctcgccagggtcgagaaagaggaggagagaagaggggagccagaagaagacgctccagccagccagagaggagagccagcccgaattaaaatcttcgaggggggctacaagtcaaacgaagaatacgtgtacgttaggggccgcgggagagggaagtacgtgtgcgaagagtgcggtatcagatgtaaaaagcccagcatgttgaaaaaacacattaggactcacaccgacgtccgcccatatgtgtgcaagcactgccatttcgccttcaaaaccaaaggcaatctgaccaagcatatgaaatccaaagcacattcaaaaaagtgccaggaaaccggggtcctggaagagctggaggccgaagagggtacatcagacgatttgtttcaggattcagaaggccgcgaaggctccgaagcagtcgaggagcatcagttctcggacctcgaggactcggattcggacagtgaccttgacgaggatgaagatgaggatgaggaagagtctcaggatgaactatcccgcccatctagcgaggcccccccccctggaccaccgcacgcccttcgtgccgattccagtcccatattggggccacaacctccggatgcccccgccagcggaactgaggccacaaggggatccagcgtgtccgaggcagagcgcttaactgcgtcttcttgcagcatgagcagccagtccatgccagggctcccctggttaggaccggcgcctctgggtagtgtagagaaagataccggctctgctctgagttacaagccagtttccccacgccggccttggagtcctagtaaggaggccgggtccagaccaccactagcccgaaagcactccttgaccaaaaacgacagttccccacagcggtgttcccctgctagggaacctcaggcttctgccccttctccccctggtctgcatgtcgacccaggaagaggtatgggtgcgctcccttgcggatctcctaggttacagctctcgccattaactttatgtcctctcggccgagaactggcgcctcgagctcacgtgcttagcaagctggagggcaccactgatccaggcctcccccgctattccccgacgcggcggtggtcacccggacaggctgagagtccaccacgatccgcaccgcctgggaaatgggccctcgccggacccgggtccccatctgctggtgaacacggaccaggcctcggactggatccaagagtgctgttccctcctgctcccctccctcacaaactgctgtcacggagccctgaaacttgcgcatccccttggcaaaaagccgagtcccggtctccatcctgcagccccggacccgcacaccctctgagcagtcgcccattctctgccctgcatgatttccacggccatatcctggcgcggacagaggaaaatatttttagccaccttcctctgcattcacagcatctgacacgtgccccatgcccgcttattcccattggaggcatacagatggtacaagcccggccaggcgcccacccaactctgctgcctgggccaactgcagcatgggtgagcggatttagcggaggaggctcagatcttacaggcgcccgcgaagcccaggagaggggacgatggtcacccaccgagagtagttccgcctcagtatccccagtagcaaaggtgtcaaaatttactctgtctagcgagctggagggcggagactacccaaaagagcgggaacggacaggaggtggaccaggacgccctcccgactggactccccatgggactggagcgcccgcagaacctacccccactcatagcccatgcacacccccagacactctgccaaggccaccccaaggccgccgggcagctcaaagctggagtccccggttggagtcccctagagctccaaccaacccagaaccatcagctactcctcctttagataggagctctagcgtgggctgtctggcagaggcctctgctcggtttcccgccaggaccagaaatctgtcgggggaacctcgtactaggcaagacagccccaagcccagcggaagcggcgaacccagggcccatccccaccagcccgaagaccgagtcccacctaatgcttag

SEQ ID NO: 120231 - DNA, 7218 bp, synthetic construct
  misc_feature 1..7218: note = Description of Artificial Sequence: Synthetic coding sequence
  source 1..7218: mol_type = other DNA
atggatcctgagcagtctgtcaagggaactaagaaagccgagggatcgccacgaaaaaggcttacgaagggggaagccatacagacatcagtgtccagctcagtcccgtacccaggcagcggcacagcagccactcaggaaagccccgctcaggagctgttagctcctcagccatttcctggaccttcctccgtgcttcgtgaaggctcacaagagaagaccggacagcagcagaaaccacctaaacgaccccccattgaagccagtgtgcacatcagccagttaccccagcatccactgaccccggcctttatgtctccaggcaagccagagcacttgctcgaggggtcgacttggcagctcgtcgatccgatgagaccaggaccatcgggcagcttcgttgcccctggattacaccctcagtcacagttattaccgtcccatgcatctattatcccgccagaggatctccctggcgtgcctaaagtttttgttccccgaccctcgcaggtctccctgaagcccactgaagaggcccacaaaaaggagcgcaaaccacagaaacctggtaagtacatatgtcaatactgcagtcgaccctgtgcgaagcctagcgttctacagaaacacatcaggtcccatacaggggagaggccttatccgtgcggcccttgtgggttctcatttaagacaaagagcaatctgtataaacacagaaaaagtcacgcacaccgtataaaggccggcctggcaagcggtatggggggcgagatgtatccgcacggattggagatggagagaatccccggtgaagagtttgaagagcctaccgaaggagagagcacagattcagaggaagaaacaagcgcgacctctggccaccccgcagagctctccccgcggccaaagcagcccctattatcttccgggctgtactcatccggtagtcactccagtagtcacgaaagatgttcactgtctcagagtagtacagcccagtcactggaggacccacctccattcgtcgagccctcatcggagcacccactgtcacacaagcccgaggatacacataccatcaagcagaagctggccttgcgtctgtcagagagaaagaaggtaatcgacgaacaagcgtttctgtcgcctgggagcaaagggtcaaccgaatcagggtatttctctcggtcagagtccgcagaacagcaggtctcaccccctaatacaaacgcaaagagttatgccgaaattattttcggaaaatgtggtaggatcgggcagcggactgctatgcttacagcaaccagtacgcaaccactcctgccattgagcacagaggataagccctcacttgttcccctttctgtgcctagaacccaagtcatagagcatattacaaagctcatcacgatcaatgaggctgtcgtggatacttctgagatcgatagtgtgaaacccaggagatcctccttgagcagaaggtcctccatggaatcccctaagtcctccctttatcgagaaccactcagtagtcattccgagaagacaaagcccgaacaaagcctgttaagcctgcagcacccaccttcgaccgcaccccccgtaccgctcttgcgatctcattccatgccctccgctgcctgtacaataagtacaccccaccacccctttcgcggttcttattcctttgatgaccacatcacggattccgaggccctgagtcattctagccacgttttcacttcccacccacgaatgctgaagaggcaacctgccatagaactccccctcggaggagagtactcatcagaagagccgggaccgagtagtaaggacaccgcctctaagccctcagatgaagtagagccaaaagagtccgagttgacaaagaaaactaaaaaaggcctaaaaaccaaaggtgtgatatatgagtgcaacatctgcggtgccaggtacaagaagcgcgataactatgaggctcataagaagtactattgctccgaattacaaattgcgaaacccatctcggcaggcacacacaccagtcctgaagccgaaaaatctcaaattgaacatgagccctggtcccagatgatgcactataagttaggtaccactctggagttgaccccgctcaggaagaggcgaaaagagaaatccctaggggacgaagaggagcctcctgcatttgagagcacgaagtcccagttcgggagtccaggcccctctgatgcagccagaaatctgcctttagaatcaaccaaaagccctgcagagcctagcaagagtgtgccgtctctagaggggccaactggtttccaaccacggacccccaaacccggtagcggttccgaatctggcaaagaacgcaggactactagcaaggagatcagcgttattcaacatactagcagctttgaaaagagtgattccctggagcagccctccggactggagggggaagataaaccattggcccaattcccatctcctcctccagccccccacggtcggagcgcacatagccttcaacctaaactggttcgccagcctaacattcaagtacccgagattcttgtgacagaagagcctgaccgcccggacacagaacctgagccccccccaaaagagccagaaaagacagaagagttccagtggccacagcgctcacagacacttgctcagctcccggcagaaaagttaccccccaagaaaaagagactgaggctggccgaaatggcacagtccagtggcgaatcaagttttgagagttctgtgccactgtcaagaagcccctcacaggagtccaacgtgtctctgagtgggagctccagaagtgccagttttgaacgagatgatcacggaaaggcggaagcgccctcccccagctcggacatgcgacctaaacccctggggacacatatgttaacagtcccttctcaccaccctcacgctagggagatgcggaggtccgcttcagaacaatccccaaatgtgtcccacagcgcccatatgaccgaaactagatccaaaagttttgattatggcagcctttctctcactggtccatccgcccctgctccggtggccccgcccgctagagtcgctccccctgaacgccgcaagtgctttcttgtgcggcaggcatccttgagtcgtccccctgagtcagagctggaggtagcccccaagggacgtcaagaaagtgaagaacctcaaccaagctcatccaagccttctgccaagtcgtccctgtcgcagatctcaagtgccgccactagccatgggggaccacctggaggtaaaggacccgggcaggatcgccccccactcggacctacagtgccatacacagaggccctgcaagtgttccatcatcccgtggcccagacacctcttcacgagaaaccttatctgcctccaccggtctcactgttctcttttcagcatctggtgcagcatgaaccaggccagtcaccagagtttttctctacacaggccatgtccagcttgttatcttccccatatagcatgcctcctctgcccccctcgctcttccaggccccccctctccccctccagcccaccgttttgcaccctggccaactgcacctgcctcagttaatgccccaccctgctaatattccatttcggcaaccacccagcttcctacctatgccttatcccactagctccgccctgagttctggcttctttctcccccttcagagccagtttgcactgcagttacccggtgacgtagagtctcatttgccacaaatcaaaacatccttggccccactagcaaccgggagtgctggattgtcaccaagcactgagtattcaagtgacattagattgcctccggtggcacctccagcttccagttctgcccctactagtgccccaccccttgccctccccgcctgccccgacaccatggtctctctggtggtccccgttagagtacagaccaacatgccttcttacggatcagctatgtatactacactttcccagattctggtgacccaaagccaggggtccagtgccactgtggctcttcccaaattcgaagagcccccgagcaaagggacgacagtgtgcggggctgatgttcacgaggttgggcccggcccgagtggcctcagtgaagagcagagcagagcctttccaaccccctacctccgggttcctgtgacactcccagaacgcaaaggcacgtcgcttagctcggagagtattctgtctttggaaggctccagctccactgctggcggaagtaaaagagtactaagtccggcagggagtctggaactgacaatggaaactcagcaacaaaagcgcgtcaaggaagaggaagccagtaaggcagatgagaaactggagctggtcaaaccatgttctgtcgtgctcacatcaacagaggacgggaagcgcccagagaagtcccacctggggaaccagggccaaggtcggagggagttggagatgttatctagcctgtctagtgatccatccgacactaaggagatacctcccttgccccaccccgccctgtcccacgggactgcaccggggtcggaggccctgaaggaatatcctcagcctagtggtaagccccacagaaggggactaactcctcttagcgttaaaaaagaggatagcaaggagcagccagacctaccttcactcgccccaccttcctctctgccgctgagcgaaactagtagtcgaccagctaagagtcaggagggtaccgatagcaaaaaagtcctccagtttcccagtttacacacaacaactaacgtgagctggtgttatctgaattatataaagccgaaccatatccagcatgctgaccgcagaagtagtgtgtatgccggatggtgcatctcactttacaaccctaatctgccaggagtgagcactaaggcggcgctctcactcctgcgaagcaagcagaaggtgtccaaagagacatataccatggccaccgcccctcacccagaagcagggaggctggtaccctcctccagtcgcaaaccacgcatgaccgaggtccacctgcccagccttgtgtctccggaggggcagaaagacctggcccgcgttgagaaagaggaggagcgcaggggggaacccgaagaggacgcccccgcttcccagagaggtgagcctgcccgcatcaagatattcgagggtgggtacaagtctaacgaggagtacgtttacgtgcgcggacgagggagggggaagtacgtatgcgaagaatgtggaatccgctgcaaaaagcccagcatgctaaaaaagcatatccggacgcatactgacgtgagaccatatgtatgcaaacattgccacttcgcattcaagactaagggaaatctgacgaagcacatgaaaagtaaggcacatagtaaaaaatgtcaggagaccggagtgctcgaagaactggaggctgaggagggcaccagcgatgacctgtttcaggactccgaaggccgcgaaggcagcgaggccgtagaagagcatcaatttagtgatttagaagacagcgactcagactctgacctagatgaggacgaggacgaggacgaagaggagagtcaggatgaactcagcagacccagttccgaggctccaccgcccggaccgccacatgctctcagggcggactcttctcccattctcgggcctcagccaccggatgcccccgctagtggaacagaagcaactaggggaagctcagttagtgaggcagaaagactcaccgcatcctcctgcagtatgagcagccagagcatgccaggtctgccctggctaggtccggcccccctcggcagtgttgagaaggacacgggttctgcacttagctataagccagtcagccctagaagaccttggtcaccaagcaaagaagccggatctcgacccccgctcgcccgtaaacactccctcacaaaaaatgactcttctccacaaaggtgtagcccagctagagaacctcaggccagcgcgccgagtccccctggtcttcatgtggatcccggtaggggaatgggggcccttccttgcgggtctccaagactccaattaagtcctctgaccctgtgtcccctcgggcgggaactcgcgcctcgggctcatgttctttctaaactggaaggtactactgatcccggcctgccaagatattcaccaacacggcggtggtcccccggacaggcagagtccccccctaggtccgcccccccaggaaaatgggcgctcgctgggcccgggtcaccttctgcgggtgagcacggtccgggtctgggtctagacccaagggtgctctttccacccgctcccctccctcataaactgctgtctcgttctccggaaacttgcgcatctccttggaaggcagagtctcgatcccctagctgctctcccggacccgcccacccactgtccagtcggcccttctctgccctgcacgacttccacgggcatatcctggctcgaaccgaagagaatatttttagccacctccccctgcacagccagcacctgacccgcgctccatgccctttgatacccatcggggggatccagatggtacaggcccggccaggagcccatcccactcttctgcccggtcccacggccgcatgggtgtccggtttcagtggcgggggatccgatttaacgggcgcgcgggaggcacaggaacgcggaaggtggagtccaactgagtcttcttcagccagcgtctcgcctgtggcgaaggtttccaagttcacactgtcttccgagttggagggcggtgactacccaaaggaacgggagaggacgggcggaggaccagggcggcctccagattggacaccgcatggtaccggcgcgcccgccgagcctacccctactcactctccatgcactcccccagatactttacctcgccctcctcagggccgccgtgccgcccagtcctggtcacctaggctggaaagcccacgtgcaccaacaaatccagagccttccgctactccccccctagaccgttccagctcagttgggtgcttagccgaggcctcggctcgattccccgctaggacccgcaacctgtccggagaaccacggacgcggcaggattcccccaagccctcaggctccggcgagcccagggcccacccgcaccagcccgaagatagagtgccccccaatgcctag

SEQ ID NO: 120232 - DNA, 7218 bp, synthetic construct
  misc_feature 1..7218: note = Description of Artificial Sequence: Synthetic coding sequence
  source 1..7218: mol_type = other DNA
atggacccagagcagtcagtgaaaggtacaaagaaggccgaaggcagtcccaggaaaaggcttactaaaggggaggctatacagacctcggtctcaagtagcgtgccttaccccgggagcggcacagccgctactcaggagagccccgcccaggagctgcttgctccccagccctttccaggcccctcttctgtgctaagagaaggtagccaggagaagacgggacaacagcaaaagccccccaaaaggccacccatcgaggcgtccgtgcatatctcacagctccctcagcaccccctgactcccgcattcatgagtcccggtaaacccgagcacttattggagggaagcacgtggcagctggttgaccctatgaggccgggcccttccgggtcctttgttgcccctggtttacatccccagagtcaactgctcccttcacacgcatccatcattccaccggaggacttgccaggcgttcctaaggtgttcgttccccgccccagtcaggttagtctgaaacctacagaagaggcgcataagaaagaacgaaagcctcagaaaccagggaaatacatctgtcagtattgttccaggccatgtgccaagcctagcgtgttgcagaaacatattcgctcccatacaggcgagcgtccatacccatgtggaccttgcggcttcagcttcaagaccaagtccaacctatataaacaccgcaagagtcacgcccacaggattaaggctggtcttgcctccggcatgggcggagagatgtatccccatggattagagatggaacgaattccaggcgaggagttcgaagagccaacagagggagagagcacggactccgaggaggaaacttctgcaaccagcggtcacccagcggagctatctccccgaccaaaacaacctctcctcagctccggcctctattccagcggcagccactcttcatcgcatgagcggtgttcactcagtcaatcgtccactgcccagagcctggaagacccccccccctttgttgaaccgtccagcgaacacccactgtctcataagccggaggatacccatactattaaacagaagctggccctgcggctgagtgagcgcaagaaggtcattgatgaacaggcttttctctctcccgggtctaagggctccaccgagtccggttatttttcgaggtcagagagcgctgagcagcaggtgtcaccacccaacacaaacgccaagtcatacgccgagatcatcttcggaaagtgcgggaggatcggacagcggaccgcgatgcttacagccacttccacacagcccctgctacctctctcgaccgaggataaacctagcctggtgccgctgtccgtgccacggacgcaagtgattgagcatattaccaagcttatcactatcaatgaggcggtagttgacacgtctgaaattgatagcgtgaaaccacggcgatctagcctgagtaggcgatctagcatggagtcaccaaaatccagcctgtatcgcgagcccctgtctagtcatagtgaaaagaccaagccggagcagagcttgctgagcctccagcatcctccgtccacggcgcccccagtccccttgctcaggagccatagcatgccctccgccgcttgcacgataagtactcctcaccacccgttcagagggagctattccttcgatgaccatatcactgattccgaagcgttgtctcacagtagccacgtgttcacttcccatcctaggatgctcaaaagacagcctgcaattgaacttcctcttggaggtgaatacagttccgaggagcccgggccttcaagcaaggatacagcttccaaaccctcagacgaggtcgaaccaaaggaaagcgagttaacaaagaagactaaaaaaggtctgaagaccaaaggcgtgatttacgagtgtaacatttgtggggcgaggtacaaaaagagagataattacgaggctcacaaaaaatactactgctctgaattacagattgcaaagcccattagtgcaggtacccatacatcacccgaggccgagaagagtcagatagagcatgaaccttggtctcagatgatgcactacaagctcggaactactttagagctgaccccgctccggaagaggagaaaagagaaatctctaggcgacgaagaagagcctccagctttcgagtcaacaaagtcccaatttggatcccccggcccaagcgatgccgcccggaacctgccacttgaatctaccaagagccccgctgagccatctaagagtgtcccatcactggaggggccgacaggatttcagccgcgaaccccaaagcctggatccggctccgagtcaggaaaggagcggaggacaacttccaaagagatcagcgtgatacaacataccagttcgttcgaaaaatcagactccttagagcagccgtcagggctggaaggggaagataagccccttgcacagttcccaagtccgccccccgcgccacatggccgcagcgctcactccctgcagcccaagctggtgaggcagccaaacattcaggtgcccgagatcctggtaaccgaggagccagacaggccagacacggagcctgaaccaccccctaaggaacctgagaaaacggaggagttccagtggccccaacgaagccaaacgctggcccagcttcctgcagagaagctgccgcctaaaaagaaaagactgcgtctcgcggagatggctcagtcaagcggtgaatcttcctttgagtcaagcgtgcctctctcccgaagcccgtcccaggaatcaaatgtgtcgctttcaggctcatcccggtcagccagtttcgagcgggatgaccatgggaaggctgaagccccttccccttcatccgacatgcggcccaagccactcggcactcacatgttaacggtgccctcccatcaccctcacgcacgtgaaatgaggcggtctgcttctgagcagagccccaacgtatcacactcagcccacatgaccgaaacccggagcaagtccttcgactatggatctctgtctctgaccgggccctctgcgccagcacccgtggcccctcccgcccgcgtcgcaccccccgaacggagaaagtgtttcttagtccgacaggccagcctgtccaggccccccgagagtgagcttgaggttgctccaaagggtcggcaggaatccgaagagccgcagcctagcagctccaagccgtccgcaaagagcagcttaagccagatcagtagcgccgccaccagtcacggagggcccccaggcggcaagggccctggccaggatagaccaccactgggcccgaccgttccctataccgaggccctgcaggttttccaccaccctgtcgcacaaactccgcttcacgagaaaccctacctgcctcctcccgtgtctctgttctcctttcagcacttggtgcagcatgaacctggacaatcaccagaattcttcagcacccaagcaatgagctcactgctaagctctccttactctatgccccctctgcctccctccctgttccaggccccacctttaccattgcagccaaccgttctacaccccgggcagctgcatctgcctcagctgatgcctcaccctgccaatatccccttcaggcagccaccttctttccttccaatgccttaccccacgtccagcgccctgagctcaggcttcttcctgcctttgcaatcgcaattcgcattgcagctgccaggggacgtcgagtctcaccttccacagatcaagacatcattagctccattagcaactggttcggcagggctttcacctagcacagagtattcttccgacattcgactgccccctgtggcaccccctgccagctcatccgctcctacttcagcaccaccacttgctttacccgcttgccccgacacgatggtgtcactggttgttcccgtgagagtgcagacaaacatgccatcctacggtagcgccatgtatactaccctctcccagattctagtcacacaatctcagggatcctcggccacagtggctcttcctaaatttgaggagcccccttcaaagggaacgacggtctgtggagctgacgtgcacgaggtgggacctgggcccagcgggctatctgaagaacaaagcagggctttccccaccccttacctaagagtgcccgtcaccctgcctgaaagaaagggcacttcactctcatctgagtcaatcctgtccttggaaggctccagctctacagccggtggttctaagagggtattatcacctgcgggctcactggagctgacgatggagacgcagcagcagaaacgggttaaggaggaggaggccagcaaggccgacgagaaactagaactcgtcaagccttgctcagtggtgctgaccagcaccgaagacggcaagagacctgagaagtctcacctgggaaaccaaggccagggcagaagagagttggagatgctaagttccctttcctccgatcccagtgacactaaagagattcctcccctccctcatcctgccctttctcatggaaccgctccaggcagcgaagcgctgaaggagtacccacagccttcaggaaagcctcatagacggggtctaacacccctttcagttaaaaaagaggacagcaaagaacagccagacctgcctagcctggccccgccttcgtccctgccactgagtgaaacatcaagccgccctgccaagtctcaggaagggacagatagcaagaaggttctccagtttcctagcctgcacactacaaccaatgtgtcatggtgttacctgaactacatcaagccaaatcacatccagcatgctgatcggagatcaagcgtttacgccggctggtgtattagcctctataaccctaatctacctggtgtgagtacaaaagcggccctgagcctgttgcggtcaaaacaaaaggtgtctaaagagacgtacaccatggcaaccgcacctcaccctgaggctggacggcttgtgcctagttccagtcgcaaacccaggatgaccgaggtacacttgccctcgttggttagccccgaaggacagaaggacctggcccgcgtcgaaaaggaagaggaacgcaggggcgagccagaggaggacgcccccgccagccaaagaggagagcctgctaggatcaaaatttttgaggggggttacaagtctaatgaggaatatgtgtacgtgcgcgggaggggccgtgggaaatacgtctgtgaggaatgcggtattaggtgtaagaagccttctatgctcaagaagcatatcaggacccacactgacgtccggccttacgtttgtaagcattgccactttgcattcaaaaccaaggggaacctgaccaagcacatgaagagcaaagcgcacagcaagaaatgtcaggagacgggagtgctggaggagctggaagccgaagaaggtaccagcgacgatctttttcaggactccgaggggagagaagggtccgaagctgtggaggagcaccaattcagcgatttggaagattccgattcagactctgatctggatgaggacgaagacgaggatgaggaggaaagtcaggatgagctgagtaggccgtccagcgaagctcccccaccggggccacctcacgcattacgcgctgactcctcacctattctgggtccccagccaccagatgctcccgcgtctggcaccgaggccacacgcggaagctcagtgtctgaagcagaaaggctgactgcctcctcatgtagtatgagcagtcaatccatgcccgggcttccatggctggggccagctcccctcgggagcgtagagaaagacaccgggtcggccctgtcatacaagccagtttcccctcggcgaccgtggagcccatcaaaggaggccggtagtcgcccgccactggccagaaaacattccctgactaagaatgatagctcaccccagagatgctcacccgccagggaaccacaggcctccgctcccagccctcccggtttgcacgtcgacccaggccgcggaatgggcgcgctgccatgtggtagtccacgccttcagctgagtccactgacgttatgccctctggggcgggagctggccccccgagcacacgtcctctctaaactggagggcacaacagaccccggcttgccccgctactcgccaactcgacggtggtctccaggccaagccgaatcgcccccgagaagcgcccccccagggaaatgggcacttgctggaccaggcagtccttctgctggggagcacggcccaggactggggttggacccgagggtgctgttcccccccgcccccttaccacacaagctcctgtcaagaagtcctgagacctgcgcatccccctggaaggccgagtctcggtcgccatcttgctcccctgggccagcacatcctctctccagtcgtcccttttccgctctgcacgattttcacggacacatcctggccaggactgaggagaatatcttcagtcacctccccctgcactctcagcacctcacaagggccccctgtcctctgatccccatcggtggtattcagatggtgcaggctagacctggagctcatcccacactgcttcccggtcccacagctgcctgggtttctggcttttccggggggggctctgatcttactggagccagggaggctcaagaacgaggacggtggagcccaacagagtcgagtagcgcatcagttagcccagtggctaaggtgtctaaatttacactgtcctctgaactcgaaggcggcgattaccctaaagaacgggagcgcactggcggtggcccaggtcggcctccagactggacaccccatggcacaggcgcccccgcagaacctacgcctacccactccccttgcacccctcctgacacattgccgcgacctcctcaaggacgtcgcgcagctcagtcatggagccctaggctcgagtcaccccgcgcaccgacaaaccctgagccatcggctactcccccgctcgataggtcttcaagcgtgggctgccttgcagaagcctccgcgcggtttcctgccaggaccaggaatctgtccggcgagcctcgaactcgacaggactctccaaaacccagtggatccggcgagccaagggctcatcctcaccagcccgaagatcgcgtgccacctaacgcctag

SEQ ID NO: 120233 - DNA, 9429 bp, synthetic construct
  misc_feature 1..9429: note = Description of Artificial Sequence: Synthetic coding sequence
  source 1..9429: mol_type = other DNA
atggctaccttggagaagctgatgaaggcttttgaatccttaaagagtttccagcagcaacagcagcagcaacagcagcagcagcagcagcagcagcaacagcagcagcagcaaccaccgcctccacctcccccccccccgcccccccagctgcctcagccacctccacaagcccaaccgttactgcctcagccacaacctcccccacccccgcctccacccccaccaggccccgcggtggccgaggagccgttgcataggccaaaaaaggagttgtccgccacaaagaaggatcgggtgaaccactgcctgactatttgtgaaaacattgtggcccagtccgtccgcaacagccccgaattccaaaagctgcttggcatcgccatggaactgttcttgctgtgttcagacgacgccgagtccgatgtgcggatggtcgctgacgaatgtctgaataaggttatcaaggcgcttatggactcaaatctgcctagacttcagctggagctttacaaagaaattaaaaagaatggtgcccctagaagtctgcgggcggctctatggaggttcgctgagctggcacacctcgttaggcctcagaaatgtagaccctatctggtcaatctgttgccatgcctcaccaggacaagcaagagacccgaagaaagtgttcaggagacactagcggcggcagttcccaaaattatggccagcttcggaaattttgcgaatgacaacgagatcaaggtgctgttgaaggctttcattgcaaatctcaaaagcagttctccaacaattcggagaacggcagctgggtctgcggtgtcaatttgccagcacagccggagaacccagtacttttattcctggctcctgaatgttctcttgggactgctcgtacccgtggaggatgaacactccactttgctgatcctcggggtactgctcactctccgctacttggtgccattgttgcagcagcaggtgaaggatacctcactaaaaggaagctttggggtgactcggaaggaaatggaagtgagcccctcagctgaacagctggtgcaagtatatgaactgactttacatcatacgcagcatcaagaccataatgttgtgacaggggctctagagctcttacagcaactgtttcgcaccccgcctccagagctactgcagacactcacagccgtagggggaatcggacaactgactgcagcaaaggaggaaagcggtggcaggtctaggtctggatctatcgtggagctgattgctggaggaggttcttcctgcagccctgtcctgtctcgaaagcagaaaggtaaggtgctgctaggagaggaggaggccttggaagacgactctgagtctaggagcgatgtgtcgagctccgcactcaccgcatctgtgaaggatgagataagtggagagcttgccgcctcgtcaggggtatcaacccctgggtccgcaggccacgacattatcacagaacagcccagaagtcagcacacattgcaggccgactctgttgaccttgcttcatgcgacttgacatccagtgctactgacggagatgaagaagatatcctgtcacacagctcctctcaggtgtctgctgtcccatccgaccctgccatggatctgaatgacggcacacaggcctcctcgcccattagcgattcatctcagacgaccactgaagggcctgactccgccgtcacccctagcgattcctccgagatcgtcctcgatgggacggataaccagtatctgggactgcagatcggtcagccacaggacgaggatgaggaggcaactggcattctacccgatgaagccagcgaggctttccggaattcctcaatggcactccaacaggcccatctcctgaagaacatgtctcattgccgtcagcccagcgatagtagcgtagacaaatttgtcctgagagacgaagcaactgaacccggcgatcaggaaaataagccctgtcggattaaaggagacattggccagagtacagatgacgactccgctcctcttgtccactgtgtgaggcttctgtccgccagtttcctgttaacagggggaaagaatgtcctggttcctgacagagatgtaagggtcagcgtaaaagcactggcattatcttgcgtgggcgcagccgtcgcactacaccctgaatcatttttctcgaaactttacaaggtgcctctggacaccactgaatatcccgaggagcagtatgtttctgacattctcaattatatcgatcacggagacccacaggtcagaggtgcaacggcaatcctgtgcggcaccctcatctgctcaattctttcacggtctcgatttcacgtaggtgattggatgggaaccattagaacgctgactggcaacacattttctcttgcggactgtatccccttactcaggaaaacgctgaaggatgagtcatcagtcacctgtaagttggcctgcacggcagtcagaaactgtgtgatgtccctgtgctcgagtagctactccgaattgggtctgcagttaataatagacgtgctcaccttgagaaatagcagctactggcttgtgaggaccgaacttctggaaaccctggctgagattgatttcagactagtttcctttctggaagctaaggccgaaaacctccatagaggcgcccatcattatacgggactgctgaagctccaggagcgggttctgaataatgtggttattcacctgttaggagacgaagaccctcgcgtgcgccatgtcgccgccgcaagtttaattagactagtgcccaagcttttctataagtgtgaccagggccaggctgatcccgtggttgccgtggccagagatcagtcaagcgtgtacctgaagctactcatgcacgaaacgcaacccccctcgcatttctctgtttcaaccataactaggatttaccgcggctacaacttgctgcccagcatcaccgacgtcaccatggagaacaatctaagtagagtgattgcggctgtgagccacgagctcatcacctcaacaacaagagcactgacctttggttgttgtgaagcgctctgtcttctgtccaccgccttcccagtttgtatttggtctttggggtggcactgtggagttccccccttatccgcatcagacgaatctcgtaagtcctgtactgttgggatggctacaatgatactgacactgctatcatctgcgtggttcccccttgatctgtctgcccaccaggacgccttaattttggcagggaatctcctcgcagcatccgccccaaaaagtctgcggagtagctgggccagtgaggaagaagccaatcctgccgctactaagcaggaagaagtctggcccgccctaggggatagggctcttgtccctatggtggagcaactgttttctcatctactcaaggttataaatatctgcgcacatgtgctggacgacgttgccccaggcccagccattaaggctgccttaccttcattgacaaatcctccatcactttcacccatacgtcgtaaggggaaagaaaaggaacctggcgaacaggctagcgtacctctgtcccctaagaaaggctccgaggcgtccgcagcttcacggcagtctgatacgagtgggccggtcactacttccaaatcttcctccctcgggagcttttaccaccttccctcctatttgaagctgcatgacgtgctgaaagccacacatgcaaactataaagtgactctcgatcttcagaatagtacagagaagtttggtggtttcctgcggtcagctctcgatgtgctatcccagattctggagctcgccacattacaggacattggaaagtgcgttgaggaaattctgggctatctcaagtcgtgctttagcagggagccaatgatggccacagtgtgcgtacagcaactgctcaaaacattattcggtactaatctggcctcacagtttgacggtttgagctccaaccctagcaaatcacagggacgggcccagagactaggcagtagttctgtcagaccgggcctgtaccattattgcttcatggcaccttacacccactttacgcaggctctggccgatgcttcactgaggaatatggtgcaagccgaacaggagaatgacacgagtggctggttcgacgtgctacaaaaggtgagtacccagctaaagaccaacctgacctctgtgaccaagaaccgcgcagacaaaaacgctatacacaaccacatccgactgttcgaacccctggtgatcaaggctctgaaacagtataccaccactacttgtgtccagctccagaagcaggtgctggatctgttagctcaactggtacagctgcgtgtgaattattgtctcctggacagcgatcaggtctttatcggctttgtacttaaacagttcgaatatatagaggtggggcaattccgcgagagcgaagccattatccccaacatttttttctttctggtcctgctctcctacgaacgctatcactccaagcagataatcgggatccctaaaatcatccagctgtgcgatggaattatggcatcagggcggaaggcagtgactcacgctattccagctctgcagccgatcgtccacgacttgttcgtccttaggggcaccaacaaggctgatgccgggaaggaacttgaaacgcagaaagaggtggtggtgagtatgcttctaaggctcattcaataccaccaggttctggaaatgttcattctggttttacaacaatgccacaaggaaaacgaggataagtggaaacgcctcagtaggcagattgccgacataatacttccaatgctcgctaaacagcaaatgcacatcgacagccacgaggccttgggagtgcttaacaccctgttcgagattctggcaccctcctcactgagaccagttgatatgcttctgagaagcatgttcgtgacccctaacactatggcatccgtttccacagtacagttgtggataagcggaatactggctattttgcgcgtactgattagtcagtccaccgaggatatcgttctgtcccgcatccaggaactaagcttcagcccctatctgatctcttgcacagttattaacaggctgagagatggggatagtacttccaccctggaggagcactctgagggtaagcagattaagaaccttcccgaggagactttctctaggttccttctccaactggtggggattcttctggaggatatcgtcactaagcagctcaaagtagaaatgagtgaacagcagcatacattctactgccaggagctgggaactcttctgatgtgtctcatacatatcttcaagagcggcatgtttagaagaataaccgccgcagccactcgcctctttcgctcagatggatgtggcggatcattctacactctagatagcctgaacctgcgcgcccgatccatgattacaacccatcctgccttagttctcttatggtgccaaattctgcttctggtcaatcatactgactatcggtggtgggcggaagtgcagcagaccccgaagcggcacagcctctcgagcacaaaattgctatcacctcagatgtccggcgaggaggaggattcagaccttgcagcaaaactgggcatgtgtaaccgtgaaatcgtcagaaggggggccctgattttgttttgtgattatgtttgccagaacttacatgattctgagcacttaacctggttgatagtgaaccacatccaggacctcatcagcctctcgcacgagcctcccgttcaggattttatctcagctgttcaccggaattcagctgccagtggcttgtttatccaggccatccaaagtagatgtgagaaccttagcactcctaccatgctcaaaaaaacactgcagtgcttagaagggattcatctgagtcagtcaggcgcggtgcttacattgtatgtggatagacttctgtgcacgccctttagggtactggccaggatggttgacattcttgcttgccggagggtagagatgctgttggctgctaatctccagtcatccatggctcaattaccgatggaggaactcaatcgtatacaggaatacctccagagctctggattagcccagcggcaccaacggctgtattccctgctggatcggttcaggctcagtactatgcaggattcgttgtcaccatcaccgccagtcagcagtcacccgctggacggcgatggccacgtgtcgttagagaccgtgtctcccgacaaggattggtacgtccatctagtgaaatctcagtgttggacaaggagcgacagtgcacttttagagggcgcagaactagttaaccgcataccggccgaggacatgaacgccttcatgatgaattcggaattcaatttgtccctgcttgctccatgcctgtctttgggcatgtccgaaatcagcggaggccagaagagtgccctgttcgaggcggctcgggaggtgacactggcccgcgtatcaggtactgtgcagcagcttcccgccgttcaccacgtcttccagcccgaactgcccgcagagcctgccgcttattggtctaagctgaacgacctgtttggcgatgccgctctctatcaatcgctgcccaccttagcccgcgccctggcacaatacttggtggtggtgtccaaactaccaagccaccttcacttgccaccggagaaagaaaaggatatcgttaagtttgtcgttgcaactctagaggcgctgagctggcacctcatacacgaacaaatccccctctcccttgatctgcaagctgggttggattgttgttgtctggcactccagctacctgggttatggtctgtagtgtctagcacagaatttgtcacgcacgcttgctctctgatatactgtgtacatttcattctggaagccgtcgccgtgcaaccgggcgagcagcttctgagccccgagaggcgcacgaatacacccaaggctatctctgaggaggaggaggaagtggaccccaatacgcaaaacccgaaatacatcaccgcagcctgcgagatggttgcagaaatggttgagtctctccagagcgtactcgcgctggggcacaagaggaatagcggagtcccagccttccttaccccgcttctcaggaatatcattatatcacttgccagactgccccttgtaaacagctacacacgcgttcccccactggtttggaagttggggtggtccccaaagcccggaggggactttggtacagccttccctgaaattcctgtagaattcctgcaggagaaagaggttttcaaggagttcatttaccgcattaatactctgggatggacgagtaggactcagttcgaagaaacgtgggccactttgctgggcgtgctagtgacccaaccccttgtgatggagcaggaagagagtcccccggaagaggacacagaaagaacgcaaataaacgtcctggccgttcaggctattacgtcactcgtccttagcgcaatgaccgtgcccgtcgccggaaaccctgccgtgagctgcttagaacagcagccacgaaataaacctttaaaggcactcgacacgagatttgggcgcaagctctctatcatcagagggattgttgaacaggagatccaggctatggtaagtaagagagaaaatatcgccactcaccatctataccaggcatgggacccagtgcccagcctgagtcccgccaccacaggggcgcttattagccacgagaaactactgctgcagattaatccagaacgtgaactcggatctatgtcttacaagttaggacaggtgtctattcactctgtttggctcgggaactcgattacaccactgcgggaagaggagtgggatgaagaagaggaagaggaggctgatgcccccgctccctcaagcccacccacttccccggtcaattctcgtaaacacagagctggtgtcgatatccactcttgcagccagttccttctggagctctacagcaggtggatcttaccctcttcctctgcccggagaactcctgctatactgatcagcgaggtggtgcggtctcttttagttgtctccgacctgttcaccgagaggaatcagtttgagttgatgtatgttaccctgaccgagttgcgccgggtccatccaagcgaggatgagatcctcgctcagtacttggtgccagctacctgcaaggcagcggcggtgcttggcatggataaggccgttgctgagcccgtatctcggctactcgaatccacgttaagatccagtcacttaccttctcgtgtgggggcattgcatggagtgctgtacgtgcttgaatgtgatctgttggacgacaccgcaaagcaactcattccggttatttctgattacctcctgtcaaacctgaaaggcattgcacactgtgtcaacattcatagtcagcagcatgtgctggtaatgtgtgccacagccttttacttaatcgaaaactaccctctggacgttggacccgagtttagcgcttctatcattcagatgtgtggcgtgatgctcagcggctccgaggaatctactcccagtatcatctaccattgtgctctaaggggtctcgagcggctgcttctttcagagcagctctcacggctcgacgcggagtcactcgtgaagctctcagtcgatagggttaacgtccacagcccgcatcgtgctatggccgctctgggcctgatgctgacctgcatgtatactggtaaagaaaaagtgtcccctggacggaccagcgatccgaatcccgctgcaccagactccgagtcagtgatcgtggccatggagagagtgagtgtcctctttgatcggatccgtaaaggcttcccttgtgaggcacgcgtggtggcccgcatattaccacaatttctggacgattttttcccccctcaggatatcatgaacaaggtcatcggggagttcttgagtaatcaacagccctacccccagtttatggcaacggtagtgtacaaagtcttccagacacttcactccaccgggcagtcaagcatggtcagggactgggtgatgctgagtctgtcaaacttcactcagcgggcaccagtggccatggctacatggtctctcagctgtttctttgtatcagcatcaaccagcccctgggtggctgccattctccctcacgtgatttcaaggatgggcaaacttgaacaagtggacgttaacctgttttgtctggtggctactgatttttatcggcaccagatagaggaagagctggatcggcgtgctttccagtcagttcttgaggtcgtcgccgcgccaggatcaccgtaccacaggttgctcacatgcttgcgtaacgtgcataaagtaaccacgtgttag

SEQ ID NO: 120234 - DNA, 3114 bp, synthetic construct
  misc_feature 1..3114: note = Description of Artificial Sequence: Synthetic coding sequence
  source 1..3114: mol_type = other DNA
atggaccgcatggcgagcagtatgaagcaggtccccaaccctctccccaaggtcctaagccggcgcggagtgggggccgggctcgaggccgccgagcgggaatcatttgaaagaacccaaaccgttagcataaataaagccattaatacacaggaagtggcagtcaaagagaagcacgcccggacatgtatcctagggacgcatcatgaaaaaggggctcagacattttggtcggtcgtcaatagactgcctttgtcatcgaacgctgtgctgtgctggaagttctgccacgtgttccataagctactgcgtgacggccatccaaacgttctgaaggactctctgcgttataggaacgagttgagcgacatgtcgcgtatgtggggccatttgtccgaagggtatggccagctgtgcagcatatacctgaaacttctgaggacaaaaatggagtaccacacaaagaatcctaggttccctgggaatctacagatgtcggacagacaactggacgaagccggcgagagcgacgtgaacaacttttttcagctaactgtggagatgtttgactatctggaatgcgagcttaatctctttcagacggtcttcaattcactcgatatgagcagaagcgtgtctgtgaccgcagccgggcagtgccgtctcgcaccgctcattcaggtgattcttgactgcagtcacctatacgactacactgtcaaactgcttttcaagcttcatagctgcctgccagccgataccctgcaggggcatagagatcgtttcatggagcagtttacaaagttaaaggatttgttttaccgttcttccaatttacagtactttaagcgccttatccagataccccaactgcctgagaacccaccaaacttcctgcgtgcaagtgcgctgagtgaacatatctcaccggtggtcgtgattccggctgaggcctcttctcctgattccgaacccgtgctagaaaaagacgacctgatggacatggacgctagtcagcagaatctgttcgataataagtttgacgatattttcggttcctctttttcaagtgatccattcaatttcaattctcagaacggcgtcaacaaagacgagaaagatcacctgatcgaacggctttacagagaaatctccggcttaaaggcgcagcttgaaaacatgaagaccgagtcccaacgggtggtgctgcagctgaaagggcacgtgtccgagcttgaggcagatttagctgagcagcagcacctgagacaacaggcagctgatgactgcgagttcttgagggccgagctggacgagcttcgacgtcagcgcgaggatacagagaaggctcagaggtcactttccgagatcgaaagaaaagctcaagctaacgagcagcggtactccaagctgaaagaaaaatacagcgaactagtccagaatcatgcagacctgctgagaaaaaacgccgaagtgactaaacaggtttccatggcgcggcaagcgcaggtcgacctcgagcgtgagaaaaaggagctggaggacagtctcgagaggatctctgaccaggggcagcgaaagacacaggaacagctcgaggttctcgaaagccttaagcaggagttggctacatcccagcgagagctccaggtgttgcagggaagtctggagacatcagctcagagcgaagcgaactgggctgccgaatttgccgagctggaaaaagaaagggattccttagttagcggagccgctcaccgggaggaagagctttctgcccttcgtaaagagctgcaagatacacagctcaagttagcgagcaccgaagaaagcatgtgccagctagctaaagaccagaggaaaatgctcctggttggctcccggaaggccgccgagcaagtgatccaagacgccttaaaccagctggaagagccaccacttataagctgtgctggatcagccgaccacctactctctactgtaactagtattagctcctgtatagaacagcttgaaaaatcctggagccagtatctggcatgtccagaagatattagcggtttgctgcactcaattacgttgctggctcatctgacctccgacgcgatagcccacggagctactacctgtctacgtgcccctccagagcccgccgacagcctgaccgaggcgtgcaagcagtatggtcgggagaccctggcctatctcgccagcctggaagaggagggctcccttgagaatgccgattccaccgccatgcggaactgtctgtctaaaattaaggccatcggggaggagctcttgcctcgagggctggacataaagcaggaagagctgggtgacttggtggacaaagaaatggccgccacatcggccgcaattgaaaccgccacagctcgcatcgaggaaatgctgtccaagtcccgagccggtgataccggtgttaaactcgaggtgaacgagagaatccttggctgctgcacgtccctcatgcaggctatccaagtcttgattgtcgcttccaaagatctccaaagagagatcgtagaatccggccgtggcaccgcttctcccaaggaattctatgccaaaaatagccggtggaccgaggggttgatttctgcttccaaagcggtgggctggggggccactgtcatggtggacgctgccgacttggtagtgcaaggaaggggaaaattcgaggaattgatggtctgcagccacgagattgctgccagcacagcccagcttgtggccgccagcaaagtgaaagcagataaagattcccctaacttggctcaactccagcaggcctcccggggcgtgaaccaagccacagcaggcgtcgtagcctccaccattagcggaaaatcccagattgaggagaccgacaacatggatttctctagtatgacattgacacagattaaaaggcaggagatggatagtcaagtccgggttttggagctcgaaaacgagcttcagaaagaaaggcaaaagctgggcgaactgagaaaaaaacactatgagttggcgggtgtggctgagggatgggaagaagggacagaggcaagtccaccaacgctgcaggaggtagtgaccgaaaaggagtag

SEQ ID NO: 120235 - DNA, 2961 bp, synthetic construct
  misc_feature 1..2961: note = Description of Artificial Sequence: Synthetic coding sequence
  source 1..2961: mol_type = other DNA
atggataggatggcctcatctatgaagcaggtccctaatcccctgcctaaagtgttgtcccggcggggtgtgggggctggacttgaagccgccgaacgcgagagcttcgagaggacacaaaccgtttcaatcaacaaagccatcaatacacaagaggttgcggtgaaagagaagcacgctcgcacctgcatcctgggaacccaccatgagaaaggcgcccaaactttttggagcgtagtcaacaggctgccacttagctctaatgccgttctgtgttggaagttttgtcatgtcttccataagttgctcagagacggtcatccaaacgtactgaaagatagtctgagataccgtaatgagcttagtgatatgtctaggatgtggggacacctatccgaaggatacggccagctctgtagcatttatctcaagttgcttcgcacgaagatggagtatcatacaaaaaacccaagatttcctggtaacttacaaatgagtgatcgccagctggatgaagcaggggagagcgacgtcaacaatttcttccaacttacagttgagatgttcgattacctcgaatgcgagttaaacttattccagacagtctttaatagcctcgacatgtctagaagtgtgtccgtcactgctgccgggcagtgtcggttggccccactgattcaggtgatactggattgctctcacctctatgactacactgttaaattactattcaaattgcacagctgtttaccggcggacacactccagggtcacagagacagatttatggagcagtttacgaaactgaaggatttgttttaccgctctagcaatttgcagtacttcaagcggctaatccagatcccacaattaccagagaacccccccaattttcttagagcctcggccctcagcgagcacatttctccagtcgtcgtgattccagccgaggcttcaagccctgacagcgaacctgtgttggagaaggatgatctgatggacatggacgcctctcagcagaacctctttgataataagtttgacgacatcttcgggtcttctttttcctcagaccccttcaactttaatagccagaacggtgtaaacaaggacgaaaaggatcatttaattgagagactctatcgtgagatttcaggtctgaaggcacagctggaaaacatgaaaactgagagccagcgcgtagtgttacaactgaaagggcatgtgtcagaactggaggccgacctagccgagcagcagcatcttcgccagcaggctgcagacgactgtgagttcctgcgcgccgagctggacgaattgcggcgccagcgagaagatactgaaaaggctcagaggtctctctctgagatagagcgcaaagcacaggccaacgagcagcgttattctaaactgaaagagaaatatagtgaattagtgcagaatcatgctgacctcctcagaaagaacgctgaggtaacgaagcaggtgtccatggctagacaggcacaggtggaccttgaacgggaaaagaaggagttggaagacagtctcgaacggattagcgaccaagggcagcgcaagacgcaggaacaactcgaagttctagaatcactcaagcaggagctggctacatctcagagggaactacaggtgctgcaaggttccctggagacctccgcacagagtgaagcgaactgggctgccgaattcgccgagctggagaaagaacgggatagtctcgtaagcggagcagctcaccgagaagaggaactgtccgcccttagaaaagaactgcaggacacccaattgaagctagcttctactgaggagagcatgtgtcagttggcgaaggatcaaaggaagatgctccttgtaggaagcaggaaagctgcggagcaagttattcaagacgcactcaatcagctggaagaacccccactaatttcctgcgccgggtctgcagaccaccttctgtccacagtgacatctatatcttcatgcattgagcagctcgaaaagtcctggagccaatatctcgcctgccctgaagacatttccggactgctgcatagcattacgcttcttgcccatctgacctcagatgctattgctcacggcgccacgacttgcctgcgcgccccgcctgagcctgctgattctctcacagaagcatgcaagcagtatgggcgtgaaaccttagcatatcttgctagtcttgaggaggaaggaagtttggagaatgccgattccaccgctatgcgcaactgtctgtcaaagatcaaggctatcggtgaggaactactgccgcgggggcttgacatcaaacaggaagagttgggtgacctggtcgataaggaaatggctgcgaccagcgccgccattgagacagcgacggcccgtatagaaggcaccgctagccccaaggaattctacgctaagaacagcagatggacagaggggctcatctctgcctctaaagccgtgggttggggcgctactgtcatggtagacgctgccgacctggtggtacaaggtcgaggcaagttcgaggaactgatggtgtgttcccacgaaatcgccgcttctaccgctcagcttgtagccgcttctaaagtgaaggccgataaggatagcccaaaccttgctcagctgcagcaagcatcccgcggcgtaaaccaggccactgctggcgttgtggcctcgacaatttccgggaagtcacagatagaggaaacagacaacatggatttctcgtccatgacactgacccagatcaagcgacaagaaatggactcgcaagtgagagtactggaactagaaaacgaactgcagaaagaacgccagaaattaggcgaattgcgaaagaaacattacgagcttgccggcgtggccgaaggctgggaagaggggactgaggcctcccctccaacactgcaggaggtggttaccgagaaagagtag

SEQ ID NO: 120236 - DNA, 3207 bp, synthetic construct
  misc_feature 1..3207: note = Description of Artificial Sequence: Synthetic coding sequence
  source 1..3207: mol_type = other DNA
atgaattccatcaagaacgtgcccgcacgtgtcttgagtcgacgcccaggccattccctggaggcggagagagagcagttcgacaagacccaggccatctctattagtaaggccattaatacccaagaggcccctgtgaaagaaaagcatgcaaggcgcataatcttaggcacccaccacgaaaagggtgccttcaccttttggagttatgcaatcggactgcccctacccagcagttctatcttgtcatggaaattttgccacgtcctgcataaagtgctgagagacggtcatcctaacgtactgcacgactgccagaggtatcggtctaacatcagggagattggagacctgtggggtcatctccacgacaggtacggccagctggtgaatgtgtacaccaaactcctgctaaccaagatttcttttcacctcaaacacccacagttcccagccggcctggaggtgacagacgaagtgctcgagaaagcagccggaaccgatgtgaacaacatttttcagttaacggtagagatgtttgactacatggattgtgagttgaagctgtccgagagtgtttttaggcaactaaataccgccatcgctgtgtcacagatgagctctggccagtgtcggctcgcacctctaatccaggtgattcaagactgctcacacctttatcattataccgtgaagctgttattcaagttacacagctgcctgcctgcagataccctgcaggggcacagggacaggttccacgagcagtttcactcccttaggaatttcttcagacgggcctcagatatgctgtatttcaaaaggcttatccagataccccggctgccagagggtcccccgaacttcctccgggcctcagccttggctgaacatattaagcctgtagtggtgatccccgaggaggctcctgaggatgaggaacccgagaacctcatcgagatctccaccggaccacctgccggtgagcccgtagtcgtagctgatctattcgaccagacattcggacctcccaatggctccgtgaaggatgacagagacctgcagatcgagtccttgaagcgagaggtcgagatgttgcggtccgagctggagaaaatcaaactcgaggcccaacggtacattgcccagttgaagtcccaggttaatgcacttgaaggggagctggaggagcagcggaagcaaaagcaaaaggccctggtggacaacgaacagttgcgccatgaactggcgcagctgagggcagcccagctggaaggggagaggtcccagggcctccgggaggaggcggaacgaaaggccagtgctacagaagcccggtacaacaaactgaaggagaagcatagcgagctcgtgcacgtgcacgccgagctccttcggaaaaacgctgataccgccaagcaactaaccgttacccagcagtctcaggaggaggtggcacgcgtcaaggaacaactcgctttccaagtcgaacaggtgaaaagagaatcagaactaaagctggaagagaagtctgaccagctggaaaagcttaagcgcgagcttgaggcaaaagccggtgagctggctcgggcacaagaggcactgtctcacacagagcagagcaaatctgagctgtccagcaggctggacaccctatccgccgagaaggatgcactcagcggcgccgtacgccagcgcgaggcagacctgctcgctgcccagagcctggttcgcgagaccgaggccgctttgtccagagagcagcaacggagctctcaggagcagggcgaactacaggggcgccttgcggagcgcgaaagccaggaacagggacttcggcaaagacttcttgatgagcagttcgcagtgctgcgcggcgcagccgcagaggccgcgggaattctgcaggatgccgtgtctaaacttgacgaccctcttcatctgaggtgtaccagctcccccgattatttggtgagtagagctcaggaagcattggacgctgtcagcaccctggaggagggccacgcccagtacttgacttctctggccgacgcctctgcgttagtggcagcgcttacaaggttcagccatttggcagccgacacaatcattaacggtggcgctacttctcatctcgcccccactgaccctgccgacagactgatcgacacctgtcgggagtgcggcgcaagagctctggaactgatggggcagctccaagaccaacaagccctgcgtcacatgcaggcatcactggtgagaactccattgcaaggaattctgcaattgggtcaggaactcaagcccaaatccctcgatgtgcgccaggaagaactgggagcggttgtggacaaagaaatggccgccaccagtgcagcaatagaggatgccgtgcggcgaatcgaagatatgatgaaccaagctcgtcacgccagctccggagttaagctggaagtcaacgagagaatattaaactcttgtactgaccttatgaaggccatccgactactcgtgaccacgtccacgtctctgcagaaggaaattgtggaaagtggcagaggagccgccacgcaacaagaattctacgcgaagaattcaaggtggacagaagggctcataagtgcaagcaaggccgtcggctggggagctactcagcttgttgaggctgccgacaaggtggtactccatactggaaagtacgaggagctgatcgtctgttctcacgaaattgcggcatcaaccgctcaactggttgctgcttctaaagtgaaagccaataagcattctccacacctcagcaggttacaggagtgttcacgcaccgttaacgagcgcgcagctaatgtggtggcttccaccaagagtggccaagagcagatagaagacagagacacaatggatttttcagggctatccctgatcaagctgaagaagcaagagatggagacacaagtcagggtgctcgagctggaaaagaccctcgaggcagagcgtatgcgattaggcgagctgaggaagcagcactatgtgctggctggggcttcaggatctccaggcgaagaggtggcaattcgtccttcaaccgctcccagaagcgttaccaccaagaagccacctttagctcagaagcctagtgtggccccccgacaggaccatcagttagataaaaaggatgggatctacccggcccagctagttaactattag

SEQ ID NO: 120237 - DNA, 753 bp, synthetic construct
  misc_feature 1..753: note = Description of Artificial Sequence: Synthetic coding sequence
  source 1..753: mol_type = other DNA
atggcacacgtgggcaccagtagggttgggtccgttctgtcaatgtcactaagcatccacctcctcgtgcccaccatgaccaaaggcgagactggcaagccagggcaccatgaagccccaaggacacttcaggctttcccttggacatgggctcgcgcatctcccggtgttagcgtggatatgagtgccggactaccacaatcactgctgtgctggcccggcgcaccactgctgcctacgccaccactgcccagtgcgacatatgtgggacatagcttgggtctgccgcgagcaggctcaagcgtcggcccatggttctccggtcgctgggtgggtggagcactcgtgcagtggcccctgggcggagggggcccgggatctgtggcagccggcctcggaggcccactcgtcagatggctgctgggtggcggagcactggtaaggtggccgctgggaggaggcgggccagggtctgtagcagccgggtgggggggcccatggttcgggggaaggtgggttggagggcccccaggatccgttgcagcgggatgggggggacctgtcagatggccactcggtggagggggccccggttctgtcgcgactggatggggcggtccatggtttggaggccgttgggtgggaggcccccctggaagcgtggctgccgggtgcggaggagcccttgtgcagtggccattgggtggaggaagcttacatagtatcccctcattccccagagcgtggcggtag

SEQ ID NO: 120238 - DNA, 2016 bp, synthetic construct
  misc_feature 1..2016: note = Description of Artificial Sequence: Synthetic coding sequence
  source 1..2016: mol_type = other DNA
atgcgcccaaagcggttgggaagatgctgcgcaggttctcgtttaggccccggggacccagccgccctgacatgtgcccccagccccagcgcatccccagcacctgagccaagtgcccagccacaggcacgaggcaccgggcagagagtggggtcacgagccacctcgggctcacagttcttatcagaggcccgcaccggcgcccgacccgcctcagaagcgggggccaaagcaggagctaggaggccatcggccttctcggcaattcaaggcgacgtgagatctatgcctgataatagcgatgcaccatggacacgtttcgtgtttcagggcccatttggctcacgtgcaaccgggcgtggcacaggcaaagcagcaggcatttggaagaccccagccgcttatgtggggagacgtcccggagtctcagggccagagagagcggcatttatcagggagctggaagaggcactgtgccctaacttaccacctcccgtgaaaaagatcactcaggaggacgtcaaggtaatgctgtaccttctcgaagagctgctgccccccgtgtgggaatccgtaacttacggaatggtactacaaagggagcgggatttgaatactgccgcccgtattggacagtcactggttaagcagaatagcgtcctgatggaggagaatagtaaattggaagccctcttggggtcagcaaaagaggagatcctctatctgagacaccaggtcaatttgagggatgagctgcttcagctgtattccgactcagatgaggaggatgaggatgaagaggaagaagaagaggaaaaggaagccgaagaggaacaggaagaggaagaagctgaggaagatttgcagtgtgcccatccttgtgacgccccaaagctaataagtcaggaggcactgcttcatcaacaccactgtccccagttagaggccctccaggagaagctacggctcctggaagaggaaaatcaccaactcagagaggaagcaagccagctggacacactagaggacgaggagcagatgctaatcttagagtgtgtggaacaatttagtgaggctagtcagcaaatggctgagttatctgaggtgctggtcctgagattggaaaactatgagcggcagcagcaagaagtcgcccgactgcaagcccaggtgctaaagcttcagcagagatgtagaatgtacggagctgaaaccgaaaaactccagaaacagttggcctcagagaaggaaatccaaatgcagcttcaggaggagagtgtatgggtcgggtctcagctacaggatctgagagagaagtatatggattgtgggggcatgttaatagagatgcaagaagaagtcaagaccctgcgccagcagccaccagtaagcacaggatcagcaacgcactacccatacagcgtgcccctcgagacattgcctggcttccaggagactctggccgaggaactgcggacaagcctaaggcgcatgatttcagacccagtgtattttatggagaggaattatgagatgccacgtggagacactagttcccttaggtatgacttcaggtactctgaagacagagagcaagtgcggggctttgaagctgaagaagggctgatgctcgcggctgatattatgcggggcgaagattttacaccagcagaagagttcgtgccccaagaagagctgggagccgctaaaaaggtgcctgcagaggaaggagttatggaagaggcagaactggtaagcgaggaaacagaagggtgggaggaggtcgaattggagctggatgaagcaacacggatgaatgtggttacttccgcgctggaggcgtccggactgggacctagtcatctggatatgaattatgttttgcagcagctcgccaattggcaagacgcccactaccgacgtcagttgcggtggaagatgctgcagaagggcgaatgcccccatggtgctctgcctgctgccagcagaacatcctgcaggtccagttgtcggtag

SEQ ID NO: 120239 - DNA, 1809 bp, synthetic construct
  misc_feature 1..1809: note = Description of Artificial Sequence: Synthetic coding sequence
  source 1..1809: mol_type = other DNA
atgcgccctaagagactggggagatgctgtgccggttcccgccttggtcctggagatcccgcggcactgacctgcgcccccagcccttcagctagccccgccccggagccatctgcgcaacctcaggccaggggaacaggacagagggtgggatcacgtgcaacctcgggatctcagttcctatccgaggccagaaccggagccagacctgcaagtgaagccggcgccaaagccggagctaggcgcccctccgcttttagcgccatacagggcgacgttcgttcgatgccagataactccgatgctccctggacccgattcgtctttcagggaccttttggaagcagagctactggtcgtggcaccgggaaggccgccgggatctggaagacaccggccgcttatgtaggcagacgtcctggggtgagtggccccgagagggctgctttcatacgcgagctagaggaagcactgtgtcctaacttgcccccccccgttaaaaagattacgcaggaggatgtgaaggttatgctctacctgctggaggaggtgtgcaccgctttcttgattcagctcctaccccctgtctgggagtccgtcacatatgggatggtactgcagagggaacgggacttgaacactgccgcccggattggccagagcctggtcaagcagaacagtgtactcatggaagagaatagcaaactggaagcactcttagggtccgccaaagaggagatcctgtacctccgccaccaggttaacttgagggatgaactcctgcaactgtactcagatagcgacgaagaggatgaggatgaggaagaagaggaggaggaaaaagaggcagaggaggagcaggaagaagaggaggccgaggaggatctccaatgcgcacacccctgcgatgcccccaagctgatcagtcaagaggccctgctacatcagcatcactgtccacagctggaggcccttcaggaaaagcttcgcttgctggaggaggagaatcaccagctccgggaagaagcatcccagcttgacacactggaagacgaggagcagatgcttattctggagtgcgtggagcagttctcagaagcatcccaacagatggccgaactgagcgaagtactggttttaagacttgaaaattatgagcggcagcagcaagaggtggctagattacaggctcaggtgttaaaactgcagcagcgctgccgtatggaaacgctcccaggatttcaggagaccctggcagaagagctccgaaccagcctgagaagaatgatcagtgatcccgtctatttcatggaaagaaactatgagatgcctaggggggatactagtagcttgaggtacgatttccggtattccgaagaccgcgagcaggtgcggggttttgaagctgaggagggtttgatgctggcagctgatattatgcgtggtgaggacttcacaccagccgaggagtttgtacctcaggaggaactcggtgcagctaagaaggtgcctgcagaagagggagtcatggaagaagcagagcttgtaagtgaggagaccgaggggtgggaagaagtagaattggagctggatgaggcaactcggatgaatgtggtcacctctgccctggaggcgagtggcttgggtccttctcacctggacatgaactacgttcttcaacagctggctaattggcaagacgctcactatcggcgccagctgcgctggaagatgctgcagaagggtgaatgtcctcatggcgccctaccggcggcaagtcgcacctcatgccgcagctcttgcagatag

SEQ ID NO: 120240 - DNA, 1860 bp, synthetic construct
  misc_feature 1..1860: note = Description of Artificial Sequence: Synthetic coding sequence
  source 1..1860: mol_type = other DNA
atgcgtccaaaacgactgggtagatgctgcgctgggtcccggctgggacctggcgaccctgccgccttgacatgtgcgccgtcaccatcagcttcaccagcccctgaaccatctgcccagccccaagcgcgcggcaccggccaaagagtggggtccagagcaaccagtggctcccaattcttgtcggaggctagaacaggcgcccgccccgcctctgaggcaggtgccaaggcaggagctagacggccatctgccttcagcgctatccagggggatgtgagatcaatgccagataactccgacgcaccctggactcgctttgtgttccaggggcccttcgggtctcgcgctacaggacgggggaccgggaaggctgctggtatctggaagactcctgccgcgtatgtcgggagaagacctggtgtgagcgggcccgaacgtgccgcattcattagagagctagaagaagccttatgcccaaatctcccaccgcccgtcaagaagatcacacaagaggatgttaaagtgatgctctatttgctggaagagctgttgccgcccgtgtgggaatccgttacatatggcatggtgctacaaagagaaagggacctcaacacagccgcacgcatcggccagtccctggtcaagcagaactcagttctgatggaggaaaatagcaagctggaagctctgctaggatctgccaaagaggaaattctgtacttaagacaccaggtgaatctgagagatgaattgctgcagctctactccgactctgatgaagaagatgaggacgaagaagaggaagaagaagaaaaggaagcagaggaggaacaagaagaggaggaggctgaggaggatctgcagtgcgcccacccatgcgatgctcccaaattaatctctcaggaggctctgctgcatcagcatcattgccctcagctggaagccctacaggagaaactccgtctgctggaagaagaaaaccatcagctacgggaagaggcttcacagctggacaccctggaagacgaggagcaaatgctgatactggagtgcgtggagcagttctctgaagcctctcagcagatggctgagcttagcgaggtgctggttctgcgtttggagaattacgaaagacagcagcaagaggtggccagattacaggcacaggtgctaaagctgcagcagcggtgtcgaatgtacggggccgaaacagagaagctgcagaaacagttagcctcagagaaggaaatccagatgcagctacaggaggaggaaaccctgcccggttttcaggagacactggccgaggagcttcggacgtcactccggaggatgatcagcgaccccgtttacttcatggaaagaaactacgaaatgcccaggggcgacacaagttccttgaggtatgatttcaggtattcggaagacagagaacaggtgagggggtttgaagccgaggagggcctgatgctggccgccgatattatgcgaggggaagatttcacacccgccgaggagtttgtgcctcaggaggagctcggagcagctaagaaagtgcctgccgaagaaggtgttatggaggaggccgagctcgtatccgaagagaccgagggatgggaagaggtggaactggaacttgacgaagccactaggatgaacgtggtaactagcgcgctggaggcatcaggcctaggtccttctcatctggacatgaactacgtgttacaacaattggccaattggcaggatgctcattaccgacgtcagctgcgatggaagatgcttcagaagggtgaatgtccccacggcgccctaccggcagcgtcccgaacttcttgtagaagctcctgcaggtag

SEQ ID NO: 120241 - DNA, 1785 bp, synthetic construct
  misc_feature 1..1785: note = Description of Artificial Sequence: Synthetic coding sequence
  source 1..1785: mol_type = other DNA
atgcgccctaaacgtctcggaaggtgctgcgctggaagtcgactcggcccgggcgacccggccgccttaacatgtgccccatccccatccgcatcccccgccccggagccctccgctcagccccaagcccgggggactgggcaacgagttgggtcccgagcgacctcaggctcccagttcctgagtgaagcccgcaccggggctagacccgcgtcagaagcgggagccaaggccggcgctcggcggccctcggcattctcagcaatccaaggcgacgtgcggagcatgcccgacaacagtgatgccccctggactagattcgtgttccagggccccttcggaagccgagcaacaggcaggggcacgggaaaagctgcggggatctggaagaccccagctgcttacgtcggacgacgcccaggggtctccggcccagaacgggccgcgttcattcgggagctcgaagaggccctgtgtccaaacctacccccccctgttaaaaagattactcaggaggatgtgaaagtaatgctctacttgctcgaggaactgctgccacctgtctgggagtctgtcacatacggcatggtgctacagcgcgagagagacctcaataccgcggctaggatcgggcagagcctggtgaagcaaaatagcgtgttgatggaggaaaactccaagctcgaggctttactcggcagcgcaaaggaagagatcctgtaccttagacatcaggtgaacctgcgcgacgagctcttgcagctttacagcgattctgatgaggaggacgaggatgaggaagaggaggaagaggagaaggaagcagaggaggagcaagaagaagaggaggcggaagaggacttacagtgcgctcatccgtgcgatgctccaaagctgataagtcaagaggcattactgcaccagcaccactgtccacagctggaggccctgcaagagaaacttaggctgcttgaggaggagaaccaccaactgcgggaagaggcaagccagctggatactctggaagatgaggagcagatgctcattctagagtgtgtcgagcagttctcagaggcaagtcagcagatggctgagctctccgaagtgctggtgttacgacttgaaaactacgaacggcagcagcaggaagtcgcccgtttgcaggctcaggtgttgaagcttcagcagaggtgccggatggaaacgctgccaggctttcaagaaaccctcgcggaggagctgaggacctccctccgcagaatgatttccgatccagtctatttcatggaaaggaattatgaaatgccccggggggatactagctccctgcggtatgacttcaggtactcggaggatagagaacaagtgagggggtttgaagccgaagagggattgatgctagctgctgacatcatgaggggcgaggactttacacctgcagaggagttcgtccctcaagaagagctgggggctgcaaagaaggtgccagcagaggaaggcgtcatggaagaagctgagctggtgtccgaagaaaccgaagggtgggaggaggtagaacttgaactggatgaggccaccagaatgaatgttgtcacatcagcactggaggccagcggactggggccctcccacttggatatgaattacgtcttacaacaactggcgaactggcaggatgcgcattaccgtcgccagttgcgttggaagatgctgcagaagggcgagtgtcctcacggagccctgccagccgcgagccgaacatcctgtcggtcctcatgccggtag

SEQ ID NO: 120242 - DNA, 837 bp, synthetic construct
  misc_feature 1..837: note = Description of Artificial Sequence: Synthetic coding sequence
  source 1..837: mol_type = other DNA
atgaaatttcgcgctaaaataaccggtaaggggtgcttggaactttttattcacgtgagcggaacagttgctcgcctggccaaggtttgtgtgctgagagtgcgacccgactccctatgctttggacctgcaggctctggggggctgcacgaggccaggctctggtgcgaagtcaggcagggagcttttcagcaatttcggatggaaggcgtctcagaagatctcgatgagatccacttggagttgactgccgagcacctcagccgcgctgcaagatcggcagctggggccagctctctcaaactccaactcactcacaagcgaagaccttctttgaccgtggctgtagagcttgtcagttcactgggaagggcccgctccgtggtgcacgatttgcctgtgcgggttctgccacgacgagtttggcgtgattgtctacctccttctctgagagcttccgacgcatcaatcaggctgcctaggtggcggactctgcgcagcatcgtagagagaatggccaatgtcggatctcatgtgcttgtggaagccaatctgtccggccgtatgaccctgtcaattgaaaccgaggtggtgagcattcagtcatatttcaagaatctaggaaatcctcctcagtccgctgtgggggtcccagagaatcgggatctcgagtcaatggtccaagtgcgagtggacaacaggaagcttctgcagttccttgaaggacaacaaattcacccaaccaccgcgctgtgtaatatctgggataacacactgctccagctggtgctggtccaggaggatgtaagcctgcagtattttattccggcgttgtag

SEQ ID NO: 120243 - DNA, 1065 bp, synthetic construct
  misc_feature 1..1065: note = Description of Artificial Sequence: Synthetic coding sequence
  source 1..1065: mol_type = other DNA
atgaaatctctgctgctgctggtgctcatcagtatttgctgggccgatcatctttccgataattacaccctggaccatgaccgcgcaatccacatccaggccgagaacggacctcacctccttgtagaggcagaacaggcgaaggtgttttcacaccgcggcggtaatgtgacattgccgtgtaaattttaccgtgaccctactgcctttggtagtggaatacataagatccgcataaaatggaccaagctaacatcggactatctgaaggaggtggatgtctttgtctctatgggatatcacaagaagacctacggggggtatcaaggcagagtcttcttaaagggtggctcagatagcgacgcctctctggtgattacggacttaactctagaggactatggcagatacaagtgcgaggtaattgaaggtttggaggacgacaccgtggtagtggccctggatctacagggagtggtattcccatactttccaaggctcggcaggtacaatctcaattttcatgaggctcagcaagcttgtctcgaccaggacgcagtgatcgcgagctttgatcagctatatgacgcgtggcgtggtggtctggattggtgtaatgccggatggctcagtgatgggagcgtgcaataccccattaccaaacctagagagccctgcggcggtcaaaacacggtgccaggggtgagaaactacggcttttgggacaaggacaaaagtagatacgatgtcttttgttttacatctaatttcaacgggagattctattacctgattcaccccaccaagctaacctacgacgaagctgttcaggcctgcctcaacgacggggcacagatcgcaaaggtggggcagatctttgcagcctggaagatactagggtacgatcgttgtgatgcgggctggctcgccgatgggtcagtgagatatcccatcagccggcctaggagacgatgttctccaactgaggccgcagtgcggttcgttgggttcccagataagaagcataagctgtatggagtgtactgctttagagcttacaactag

SEQ ID NO: 120244 - DNA, 549 bp, synthetic construct
  misc_feature 1..549: note = Description of Artificial Sequence: Synthetic coding sequence
  source 1..549: mol_type = other DNA
atgaagagccttttactactcgttctgattagcatctgctgggccgatcatctgtccgataattacacactggatcatgatcgggcgatccacattcaagagaatggtccccatctgctggtagaggccgagcaggctaaggtattctcacacaggggaggcaacgtgacactgccctgtaaattttatcgggatcctaccgcatttggtagtggtattcataaaattaggatcaagtggacgaagctgacatccgattacctgaaagaggtggacgtctttgtgtccatggggtatcacaaaaagacctatggcggttaccagggtcgggtgttcctcaaggggggatccgatagtgacgccagcctggtgattaccgacctgaccctggaagactatggccggtataaatgtgaagtgatcgagggactggaggatgatactgtggtggtggctctggatctgcagggcgtggtgttcccttacttccctagactgggaaggtacaacctcaacttccacgaagcacagcaggcctgtctagattag

SEQ ID NO: 120245 - DNA, 477 bp, synthetic construct
  misc_feature 1..477: note = Description of Artificial Sequence: Synthetic coding sequence
  source 1..477: mol_type = other DNA
atgaagtccttgctgctgctagtattgatctccatctgttgggccgaccatctctccgacaattatactcttgaccacgaccgcgcaatccatatccaggctgagaatggaccacatttgctcgtcgaggccgagcaggccaaagtgttttcgcaccgtggtggcaacgttaccctgccttgcaagttttatcgcgacccaaccgcatttggctccggaatacataaaataaggatcaaatggactaaactgacttccgactatttgaaagaggtcgatgtgttcgtttccatgggctatcacaaaaagacgtatggagggtatcagggacgggttttcctgaaagggggctccgacagcgacgcttctctcgtgattacagatctgacattggaagattatggtaggtacaagtgcgaagtgatcgaaggattagaggatgacactgtggtggtcgctctggacttgcagggctag

SEQ ID NO: 120246 - DNA, 600 bp, synthetic construct
  misc_feature 1..600: note = Description of Artificial Sequence: Synthetic coding sequence
  source 1..600: mol_type = other DNA
atgaaaagtctgctcttactggtactgatcagtatttgctgggctgatcacttgtctgacaactacaccctggaccatgatcgggcaattcacatccaggcggaaaacgggcctcatctgctggtggaggctgagcaggcgaaggtgttctcacaccgcgggggcaatgtgactcttccctgcaagttctatcgggacccaaccgcttttggcagcggcatccacaagatcaggattaaatggacgaagctgacttctgattacctgaaggaagtggacgtgttcgtgagcatgggttatcataagaagacatatggcgggtaccaggggcgtgtctttcttaaaggaggatccgattcagatgcttcactggtaatcaccgacctaacactagaggattacggtaggtataagtgcgaggttattgaggggctagaagatgacactgtggtggtcgccttagacctccagggggttgttttcccgtattttccaagactgggacggtacaatctgaactttcatgaagcccagcaggcgtgccttgatcaagatgccgtgatcgctagttttgatcagctttatgatgcctggcgatag

SEQ ID NO: 120247 - DNA, 777 bp, synthetic construct
  misc_feature 1..777: note = Description of Artificial Sequence: Synthetic coding sequence
  source 1..777: mol_type = other DNA
atgaaatctctgttattattggttctcatatcaatatgctgggctgatcacctgtctgacaactatacactggatcacgaccgcgcaattcacattcaggcagagaacggcccacatcttctagtagaggctgaacaggctaaggtcttttcccaccgtggaggcaatgtaactttaccctgcaagttttatcgggaccccacggctttcggttctggtattcataagatcagaatcaaatggactaaattgactagtgattatctcaaagaagtagatgtgtttgtgtcaatggggtatcataaaaagacatatggcgggtaccaggggcgggtcttcctcaaaggtgggtctgactctgacgcctccctggttattaccgacctaaccttggaggactatggcaggtacaaatgtgaggtgatcgaaggcctggaagatgataccgtggtggtggccctggacctgcagggtgtggtctttccctattttcccaggctgggaagatacaacctaaactttcacgaggcccaacaggcctgcttggaccaagatgccgtgatcgccagcttcgaccagctgtacgacgcatggcgcggaggattggattggtgtaatgcagggtggctgagtgatggctcagtgcagtacccgatcacaaagccccgagagccctgtgggggccagaacacggtaccaggagtgaggaactacggattttgggataaagacaaaagccggtatgatgtgttctgctttacgagtaattttaactag

SEQ ID NO: 120248 - DNA, 462 bp, synthetic construct
  misc_feature 1..462: note = Description of Artificial Sequence: Synthetic coding sequence
  source 1..462: mol_type = other DNA
atgaaatcactgttgctgctggtcctcatctccatctgttgggctgaccatctatcagacaattatacactggatcatgacagagctatacacattcaggcagaaaacggtccccacctccttgtggaggcagaacaggcaaaggtgttctcacaccggggcgggaacgtgacactgccgtgtaagttttatagggaccccaccgcattcggttctggcatccataagatcagaattaagtggaccaaactaaccagcgactatttgaaggaggttgacgttttcgtgtctatgggctaccataagaagacgtacggaggctaccaggggagagtgtttttaaagggaggctctgatagcgacgccagcctcgtgattacagatctcactctggaggattatgggaggtacaagtgcgaggtgatagaggggctggaagatgacacagtcgtggtcgcctag

SEQ ID NO: 120249 - DNA, 1683 bp, synthetic construct
  misc_feature 1..1683: note = Description of Artificial Sequence: Synthetic coding sequence
  source 1..1683: mol_type = other DNA
atgtttgcccggatgtccgatctgcatgtgcttctcctgatggccttggttggaaaaaccgcttgtggcttctccctgatgtccttgctggagagcttggatccggactggacccccgatcagtatgattacagctatgaggattacaaccaggaagagaatactagtagcaccctgactcatgccgagaatcccgattggtactacactgaggaccaggcagatccttgtcaacccaatccttgcgaacatggcggagactgcctggtacacggttcaaccttcacctgtagttgcctggctccttttagcggtaataagtgtcagaaagtccagaacacttgtaaggataacccttgtggcaggggtcaatgtctgattacccaatcaccaccttattacaggtgcgtatgtaaacatccatacaccggtccgtcctgctcgcaggtagtccccgtgtgccggccaaacccttgccagaacggggctacctgcagccgccacaaaaggcgaagtaaatttacctgcgcgtgccccgaccaatttaagggcaaattttgcgagatcggatcagatgactgttatgtgggtgatggctatagttacaggggcaagatgaatcggactgtaaatcagcacgcatgcctgtactggaactcacacctcctgttgcaggagaattacaatatgttcatggaggacgcggagactcacggcataggggagcacaatttttgccgaaatccagacgccgatgagaaaccctggtgctttattaaggtaacgaacgataaggtaaagtgggaatattgtgatgtcagcgcctgcagcgctcaggacgtcgcctaccctgaagaatcccccacggagcccagtaccaaacttcccggattcgattcttgcggaaagacagagatcgcagagaggaagattaagcgtatttacggcggttttaaatcaactgccggtaagcatccttggcaggcttctttgcaaagctcattgcctcttaccatctcaatgccacagggccacttttgcggtggcgccctgatccacccttgctgggtgcttaccgccgcacactgtactgacatcaagacacggcacctcaaggttgtacttggcgatcaggatttgaaaaaggaggagttccacgagcagtctttcagagtggagaaaatcttcaaatacagccattataatgaaagggacgaaattccacacaatgatattgctctcctgaagctcaagcctgtggacggccattgcgccttagaaagtaaatacgttaagactgtgtgtctccccgatggcagcttcccctccggcagcgaatgccacatatccggctggggtgtcacggagaccggtaaaggttcgagacaattgctcgacgccaaggtaaagttaatagccaataccctttgcaattcacggcagctgtacgatcacatgattgatgattccatgatatgtgcaggcaacctgcaaaaacctgggcaagatacctgtcagggagactcaggcggcccgctgacttgtgagaaggatggcacttactacgtgtatgggattgtcagttggggtttagaatgtggaaaaaggcccggggtctatactcaggtcactaaattcctaaactggatcaaggcgaccatcaaatctgagtcagggttttag

SEQ ID NO: 120250 - DNA, 534 bp, synthetic construct
  misc_feature 1..534: note = Description of Artificial Sequence: Synthetic coding sequence
  source 1..534: mol_type = other DNA
atggaggaaaatttcatctgtagtaggaagacgatggcactctcgtcaacttggattctgtcccccaaaaaaacaggtccactgacgtctatgataactgccaccaggatcatcatccgaaaacgaacccctgttgcccatcttcctactttgaggatccttacgggcacaactttacgaaccaagctgattcatgccagcccgacaccagtcaataccgtagggactgcttctagcatgggcgctcccagccatgctgcagcttggctactgagccttgggataagtgtgcggaagtgcaagatccgcgcccgcacaacgcacgtcgcaggcgctaatgtgtcacttcccagggttctgcccacaacggccgtaagtgtgaatactctaacacaggtgcccgcggccccaaagtggttcctctacgccgggcaaactccagcaaggatgggacttcccgctcccggtatttcgggtgacccaagttcgcctgtacctgtcccaacatcttcccgcggcaacagcgttaagtag

SEQ ID NO: 120251 - DNA, 843 bp, synthetic construct
  misc_feature 1..843: note = Description of Artificial Sequence: Synthetic coding sequence
  source 1..843: mol_type = other DNA
atgtttgcgcggatgtccgacctgcatgtcctgctcctgatggctctggtcgggaaaaccgcatgtgggttcagcctgatgagtctgcttgagtcgctcgacccagactggacgccagaccagtatgactatagttatgaggattataatcaagaggagaacactagcagcacactcactcatgccgaaaacccggactggtactatacagaagaccaggctgatccgtgccagccaaacccctgcgagcatggcggcgactgcctggtgcatggctccaccttcacatgctcatgcctggcgccattttctggaaataagtgtcagaaagtacagaacacgtgtaaagacaatccctgcggacgggggcagtgtctgattacccagtccccaccgtattacaggtgtgtgtgcaaacatccatataccggcccatcatgttctcaggttgtgccggtctgcaggcctaatccctgccaaaatggtgcaacatgtagtcggcataaaagaagaagtaagtttacttgtgcatgtcctgatcagtttaagggcaagttttgcgagatagggagcgacgactgctatgttggcgatggctactcttaccgcggtaaaatgaatcgaacggtgaaccagcatgcttgcctttactggaactcacatttactgttacaggagaactataatatgtttatggaggacgctgagacacatgggattggggagcataacttctgccgtaaccccgatgccgatgaaaagccgtggtgtttcattaaggttaccaatgacaaggtcaagtgggaatactgcgacgttagtgcatgctctgcccaggcctag

SEQ ID NO: 120252 - DNA, 1605 bp, synthetic construct
  misc_feature 1..1605: note = Description of Artificial Sequence: Synthetic coding sequence
  source 1..1605: mol_type = other DNA
atgagccttctcgaaagtctggatcctgattggacaccggatcagtatgactattcatacgaggactataaccaggaggagaacacaagcagcaccttgactcatgctgagaacccagattggtactacacggaggaccaagccgacccatgccagcctaacccctgtgagcatggaggcgattgcttggtgcacggatcaacgtttacttgtagttgccttgcaccattttccggcaacaagtgccagaaggtgcagaatacctgtaaggataatccatgtggtaggggtcagtgccttattacacagagtcccccctactatcggtgcgtgtgtaaacatccatacacgggcccttcctgtagccaggttgtcccagtttgtaggcccaatccctgccagaacggcgcaacctgcagccggcataaacgtcgcagtaagtttacctgtgcatgccctgatcagtttaaaggcaaattctgcgaaatcggcagcgatgactgctacgtgggggatggctatagttaccggggaaaaatgaaccgcaccgtgaaccagcatgcctgcctttattggaactctcacctcctccttcaggagaattataatatgttcatggaggacgcggagacccacggaattggagagcacaacttttgccggaaccctgatgccgacgaaaagccttggtgttttataaaggttactaacgataaggtcaaatgggaatactgcgatgtcagcgcatgttctgcgcaggacgtcgcctatcccgaagagtcacccaccgagccctcaacaaagcttcccggtttcgactcctgcgggaagaccgagatagcggagcgcaagatcaaacgcatttacggcggcttcaagtcaaccgctggaaaacacccttggcaggctagcctgcagtcaagcctgcccctcacaatctctatgccgcagggacatttctgcggtggagccctgatccatccctgctgggtgcttacagctgctcactgcactgatattaaaacccgccacctcaaggttgtgctgggagatcaggacctcaagaaggaggaatttcacgagcagagtttcagggtcgaaaaaattttcaagtattctcactataatgaacgggatgagatcccccacaacgatatcgcattactcaagctaaagcccgtggacggacactgcgctctagagtctaagtatgttaaaacagtgtgtttgcctgacgggagcttcccgtctgggtccgaatgtcacatcagcggatggggcgttactgaaactggaaaaggtagccgtcagttgttggatgcaaaggtgaagctgatcgctaacaccttatgtaattcacgtcagctgtatgaccatatgattgatgattccatgatctgcgccggtaacctccaaaagcctgggcaggatacatgccagggtgacagtggggggcctttgacatgtgagaaagacgggacttactacgtatacggcatcgtgtcctggggacttgagtgtggtaagagacccggcgtgtatacacaggtgaccaagtttctgaattggatcaaggcgactattaaatctgaaagcggattttag

SEQ ID NO: 120253 - DNA, 1656 bp, synthetic construct
  misc_feature 1..1656: note = Description of Artificial Sequence: Synthetic coding sequence
  source 1..1656: mol_type = other DNA
atgttgcccctgttgctgttacccctcctatggggtgggtctttacaggagaagcctgtctacgaacttcaggtgcagaagtccgtgacagtgcaggaagggctgtgcgtgctagttccatgctccttctcttacccctggcgaagctggtatagttcaccacctctctatgtctactggttccgtgacggggagatcccttactacgccgaggtggtagcaactaacaatccagaccgccgggtcaaacccgagacacaaggccgcttccgcctgctgggggacgttcagaagaagaattgtagcctctctattggggatgcccgcatggaagatactgggagttatttctttcgggttgagcgggggagggacgtgaagtattcataccaacagaataagcttaacctggaggtaactgccctgattgagaagcccgatatacacttcctggaaccactcgaaagtgggaggccaaccaggctcagttgctcccttccaggctcttgtgaggccggaccgcccctaacgttcagctggaccggaaatgcattgtcccccctagatcccgagacgactcgctccagtgagcttacactcaccccacggcctgaggaccacggaacgaatcttacatgccagatgaaaagacagggcgctcaggtgacaaccgagcgtaccgtgcaattaaatgtctcttacgccccgcagaccatcacaatttttagaaatggtatcgcactcgagattctccagaacaccagctacctgcctgtgttggagggccaggcattacgtctgctgtgcgatgccccttctaacccgcccgcccatttatcttggtttcagggctctcctgcccttaatgcaacgccaatatcaaacacaggcattctcgagctccgacgggtgcgctccgctgaggaaggggggttcacatgccgcgcccagcaccctctgggattccttcagatcttcctcaatttatcggtgtattccctgcctcagctgctgggtccctcttgttcatgggaggctgaggggctgcactgtagatgtagtttccgcgcccgcccggctcctagcctgtgctggcgtcttgaagaaaaaccgctggaaggcaattccagtcagggctcgttcaaggtaaactcctcctccgccgggccttgggccaattctagtctgattcttcacggcggcttgagcagcgatctgaaagtgagttgcaaagcttggaatatctacggctcacagagtgggtccgttttattattacagggccgaagcaaccttggaaccggcgtggtccctgcggctctcgggggcgctggggtcatggctctgctgtgtatttgtttgtgtctaatattcttcctgatcgtcaaagcgcggcgaaagcaggcggccggtcgaccagagaagatggacgacgaagatcctataatggggacgatcacttctgggtcaagaaagaagccctggccggatagtcctggagaccaagcttctccccccggagatgcgcctccactggaggaacagaaggaactccactacgcaagcttaagctttagtgagatgaaatccagagagcccaaggaccaggaggcacccagtacaacggaatactccgagatcaagacatcaaagtag

SEQ ID NO: 120254 - DNA, 558 bp, synthetic construct
  misc_feature 1..558: note = Description of Artificial Sequence: Synthetic coding sequence
  source 1..558: mol_type = other DNA
atgttcagggaagtgttcgcagacgaagacccagccacgtatgtttgggatggcaattatcaccagccatgggaacccgctgctgctggtgcggtgggggcaggcgcctatagagaggtagaagccgaggaccctgggcgcttggccgttgaggcgttggtaagaactagacggtgtgtctgcgtagctcaacgctgggggggcaaaagagaggttatgtatactgcttttaaggcgctcggggatagcgtcgactatgtgcagttttgccgagtgtgtgactccgatactcggttggatcctatggcactgctcgagcttgtccgtgtgctggacgaagaccctagagtcggcgcggtgggcggtgatgtccggattctcaatcctctagactcgtgggtctcctttctgagctcactcaggtattgggtggccttcaacgtagagagagcttgccagagctactttcattgcgtgagctgcatatcaggaccattggggaccccccccggtcctgcagccacacagcggaggcccagaccaagctgcggcgggtag

SEQ ID NO: 120255 - DNA, 645 bp, synthetic construct
  misc_feature 1..645: note = Description of Artificial Sequence: Synthetic coding sequence
  source 1..645: mol_type = other DNA
atgtttcgtgaagtgttcgcagacgaggaccccgccacttatgtctgggatggcaattatcaccaaccttgggagcctgcagctgctggcgccgtgggggccggtgcctacagggaagtggaagccgaggacccaggcaggttagccgtcgaagccctggtccgtactagacggtgtgtctgtgtggcacagagatggggcgggaagcgcgaggttatgtacacggccttcaaagctctgggcgactcagtggattatgtccaggtgtgtgacagcgatacaagactggatcccatggctctgctcgaactcgtccgggtattggatgaagatcccagagtaggcgcggtaggaggcgatgtgaggattctgaacccacttgactcatgggtgagctttcttagttccttgcggtattgggttgctttcaacgtggagcgggcttgccagagttattttcattgcgtgtcatgcatatccggcccactcgaatcctgcccgggcccccgggaacacgccatgatgccttcctttctggcccccgtacaggtgcatcttcaggtcccactgctgctgcgcgacgcattagtgttacctgcagtggccgagcctgccgacactctggtgcaagtagtacttccctag

SEQ ID NO: 120256 - DNA, 1734 bp, synthetic construct
  misc_feature 1..1734: note = Description of Artificial Sequence: Synthetic coding sequence
  source 1..1734: mol_type = other DNA
atgcgtcaggatgccccaaaacccacgccagcagcctgccgttgttctggcctggctcggagagtgctcactatcgcatttgctctcttaatattgggccttatgacttgggcctacgcagctggggtgcctttagcctctgataggtacggtctgttggcatttggcctgtatggcgccttcctcagcgcccacctggtggctcagtcattattcgcttatctggagcaccggagagtcgccgcagctgcgaggggtcctctcgacgccgccactgctcgctccgtcgccctgacgatatccgcttaccaagaggacccagcgtatctgagacaatgtctggcttccgcgcgagccctgctctaccctcgagcaagacttcgcgtgctaatggtggtggacggaaacagagctgaagacttgtatatggtcgatatgtttcgggaagtgttcgctgatgaggatcccgcaacctacgtgtgggatgggaattatcaccagccatgggagccagcagcggccggtgccgttggcgccggggcatacagagaagtggaagcggaggatcctggccgattggctgtcgaagccttggtgcggacccgacggtgcgtgtgcgtggcacaaaggtggggcggcaaacgagaagtgatgtacaccgcttttaaggctctcggagactccgtggactacgtccaggtgtgcgatagcgacacgagattggatcctatggccctgctggaactcgtgcgggtcttggacgaggacccacgagtgggggccgtggggggggatgttagaattctaaatcctcttgattcatgggtgtcattcctgagctcactccggtactgggtggcgttcaatgtggaaagagcttgccagagctactttcactgcgtaagctgcatctccggtcctctcggcttgtaccgtaataatttactgcagcagttccttgaagcctggtataatcaaaaattcctgggaacccactgcactttcggggacgacagacacttgaccaatcggatgctctccatgggttatgcaaccaagtacaccagtagatcccgctgctactccgaaaccccttctagctttctgcggtggttgagccagcagacaagatggtctaagtcctattttagggagtggctgtacaatgccctatggtggcatagacatcatgcctggatgacatatgaggccgttgtttcggggttatttcctttttttgtcgccgccactgtgctccgtctgttctatgccggcagaccatgggcactcctgtgggttctgttgtgcgtgcaaggagttgctctggccaaagcagcattcgccgcgtggctccgcggctgtctgaggatggtcctattgtcattgtatgcacccctatatatgtgcggacttttgcctgccaagtttttagctctagtgacaatgaatcaaagcggttgggggacttccggtcgtcgtaagctggcggctaactacgtgccccttctgcccctggccctctgggccctcctccttctcggtgggctggtacgctctgtggcccacgaagcacgcgctgactggtctggaccatctagagctgctgaggcctatcatttagcagccggagctggagcttatgtggggtattgggtcgcgatgttaaccctgtattgggtcggagtcagacgtttatgccggcggaggaccggaggctatagggtgcaagtttag

SEQ ID NO: 120257 - DNA, 1659 bp, synthetic construct
  misc_feature 1..1659: note = Description of Artificial Sequence: Synthetic coding sequence
  source 1..1659: mol_type = other DNA
atgcactgcgagagattcctgtgcatcctaaggatcatcggtacaacactcttcggggtgtcgctgcttctcggcataacagctgcttacatcgtcggctatcagttcatccagactgacaactattatttctcctttggactctacggcgctttcctggctagccacttgattattcagagcctgtttgcttttctcgagcatcggaaaatgaagaaatctcttgaaacacctatcaagctgaacaagacagttgccttgtgtattgcagcttatcaggaggatcccgactacctccgaaaatgcctccagagtgttaaaagacttacctaccctggtataaaggtcgtcatggtcatagatgggaactctgaagacgatctctatatgatggatattttcagcgaagtcatggggcgtgataagtccgctacctatatttggaagaacaacttccacgagaagggccccggggagaccgacgagagtcataaggagtcttcccagcatgtcactcagttggtgctgagtaacaaatcgatatgcatcatgcagaaatggggaggcaaacgagaggtaatgtacacagctttcagagccctagggaggagtgtcgattacgtgcaagtctgcgactcagacacaatgctcgatcccgcctcaagcgtagagatggttaaggtcttagaggaggacccaatggttggcggcgtaggaggggacgtgcaaatcctgaataaatatgactcctggatcagtttcctttcttcagtcaggtactggatggcatttaacatcgagcgagcctgtcagagctattttggatgtgtccagtgcatctctggcccactcggtatgtaccgcaactccctgctccatgagttcgttgaggattggtataatcaggaatttatgggaaatcagtgctctttcggagacgacagacatctgacaaaccgcgtcctcagccttggctacgcgactaaatacacagcaagaagcaaatgcctgacagaaacccccattgaataccttcggtggctcaaccagcagactcgatggtctaagagctactttcgcgaatggctctataatgccatgtggttccacaaacaccatctgtggatgacatacgaggcaattattacaggtttcttccccttttttctgatcgccaccgtgatccaactcttttacagggggaagatctggaatatactgcttttcctgctcaccgtccaactggttggcctgatcaaatcaagttttgcatcatgtctgcgtggcaacatagttatggtgtttatgtctttgtattctgtcctctatatgtcttctttgcttccagccaagatgtttgcgattgccaccataaacaaggcgggttggggcacctctggccgaaaaactattgtagtcaattttatcggcctcatcccagtctcggtgtggtttactattcttcttggcggcgtaatttttacgatatataaggaatccaaaagaccgttcagcgagtctaagcagactgtactgatcgttgggactttattgtacgcctgctactgggttatgctgctgaccctttatgtggtgttgataaataaatgcggacgcaggaagaaaggacagcagtatgacatggtcctggatgtgtag

SEQ ID NO: 120258 - DNA, 951 bp, synthetic construct
  misc_feature 1..951: note = Description of Artificial Sequence: Synthetic coding sequence
  source 1..951: mol_type = other DNA
atgcactgtgagaggttcctttgtatcctgcggatcatcgggacaaccctctttggcgtctcactgttgcttggcattaccgccgcctatattgtcggctaccagtttatccaaaccgacaactactatttctcatttgggctttacggtgcttttctagccagccacctgatcatccagtcattgtttgcttttctagagcatcgtaaaatgaagaagagtctggaaactcccattaaacttaacaaaacagttgcactgtgtatagccgcatatcaggaggatccagattatctgcgcaaatgcctccagtcagtgaagaggctcacttatccggggattaaggtcgtgatggtgatagacggcaactctgaggacgacctttatatgatggacatttttagtgaagtgatgggccgggataaaagtgcgacttatatttggaagaataatttccacgagaaggggccaggagagactgacgagtctcacaaagagtcgtctcaacatgtgactcagcttgttttgtcaaacaagtcgatttgtattatgcaaaagtggggaggtaagagagaggtgatgtataccgccttccgggcgctgggccggagcgtggattacgtccaggtgtgcgacagtgacactatgttagatcccgcgtctagcgtagagatggtgaaggtgctcgaggaagaccccatggtggggggggtgggaggcgatgtgcagattctcaacaaatacgattcatggatctcattcctttcctctgtgagatattggatggcattcaatattgaaagggcttgccagtcctacttcggctgcgttcagtgcatatccgggcccttgggcatgtatagaaactcgctcctacacgtccttactttcgcagtcacccataatactttggtgcctctgggtgctgtgcagtactgtggaattcgttag

SEQ ID NO: 120259 - DNA, 1389 bp, synthetic construct
  misc_feature 1..1389: note = Description of Artificial Sequence: Synthetic coding sequence
  source 1..1389: mol_type = other DNA
atggcacaagtgagtataaataacgactacagcgaatgggatctgtcaacagatgctggcgagcgcgccaggttgctgcaatctccctgcgtagacaccgcacctaagagcgagtgggaagcctcgcctgggggcttagatcgtgggacaactagcacactaggggcaatttttattgtggtgaacgcatgccttggagccgggctcctcaatttccctgcggcgttttctaccgcagggggagtggctgccggtatagccctccagatggggatgctcgtgtttatcatctctgggctagtaattttagcctattgcagtcaggcatctaatgagagaacatatcaggaagtggtctgggccgtttgtggtaaactaacaggcgtgctctgcgaggtagccatcgccgtgtataccttcggcacctgtatcgcctttttgatcattattggcgaccagcaggataaaatcatcgcagtaatggccaaagagcccgagggggccagtggaccctggtataccgatcgaaagtttacaatctctctgacagcctttttattcatactgccactctccattcccagggagatcggattccagaaatacgcttccttcctcagtgtcgttggcacctggtatgtgactgcgattgttatcatcaagtatatttggccagacaaggagatgacacccggaaacatcctgactcgccccgccagttggatggctgtgttcaacgccatgccgaccatctgctttgggttccagtgccacgtgagttccgtaccagtcttcaatagcatgcaacagccagaggtgaagacgtggggaggggtcgtaaccgcggccatggtgatcgccctcgctgtatatatgggaaccggcatatgtggatttctgacatttggtgccgccgtggatcctgacgtcctgctgtcttacccatctgaagacatggcagtcgcggtggcacgggcctttatcattctgtccgttttgacctcctatcctatcctgcacttctgtggtagggccgttgtggagggactgtggctgaggtaccagggcgtgcctgttgaggaagacgtgggcagagagaggagacggagggttttgcagaccctggtttggttcctccttacacttctgctcgcactatttattcctgacattggaaaggttatatcagtgataggaggtctcgccgcttgtttcattttcgtttttcctgggctctgcctcattcaggcgaaattaagcgaaatggaagaggtgaagcctgcgagttggtgggtgctcgtcagttatggcgtccttctggtgactctgggcgcattcattttcggccagactaccgcaaacgctatattcgtggacctgttggcctag

SEQ ID NO: 120260 - DNA, 1662 bp, synthetic construct
  misc_feature 1..1662: note = Description of Artificial Sequence: Synthetic coding sequence
  source 1..1662: mol_type = other DNA
atgcctgtccagctgaccacagccctccgcgtggttggaacctccctcttcgccctggcagtactcggaggcatcctagcagcatatgtgaccggctaccagttcatacataccgaaaagcattatctgtccttcggcctctatggagccatcttgggtctgcatctccttatccagagccttttcgccttccttgaacatcgtcgtatgcgaagagccgggcaagccctgaagctcccctcgccacggcgcgggtctgtagcactatgtatcgcggcgtatcaagaagatcctgactatctccgaaagtgtctgcggagcgctcagcgaatatcatttcccgaccttaaagttgtcatggtggtggacggcaacagacaagaggacgcctacatgttggatatcttccacgaagttctcggtggtaccgagcaggccggattcttcgtttggcggtcgaacttccatgaggccggcgagggcgaaaccgaggcctcacttcaggagggaatggatagagttcgggatgttgtgcgggcttccaccttcagctgcattatgcagaagtggggggggaagcgagaggtcatgtacacggcttttaaagccctgggagacagcgtcgattacatacaggtctgcgatagcgacacagtccttgaccctgcgtgtactatagagatgttgcgggttttagaggaggacccccaggtgggtggagtcggcggggacgtgcagattttgaataagtatgattcctggatatcatttctcagctcagttaggtactggatggcgttcaacgttgagcgggcctgccaatcctattttggctgtgtccagtgcattagtggaccattaggcatgtatcgaaatagtctgcttcagcagtttctagaagattggtatcatcagaagtttcttggcagcaagtgctcatttggtgatgatagacacctgacaaatcgcgtgctgtccctgggctacaggactaagtacacagcccgctctaagtgcctgacagaaacacctacaaaatatttaaggtggctgaaccagcagacccgatggtctaaaagctactttagagaatggttgtacaactctttgtggtttcacaagcatcatttgtggatgacgtacgaatccgttgtcactggtttttttccttttttcctcatcgcaactgtaattcagctgttttatagaggaagaatctggaatatactcctgtttcttctgacagtgcagctcgtgggaataattaaagcaacttacgcctgcttcttacggggtaatgctgaaatgatattcatgtctctttacagcttgttatacatgtccagtttgctgcctgcgaagatttttgcaattgctacgattaacaaaagcggatggggcactagcgggaggaaaaccattgttgtgaacttcattggcctgatcccggtatctatctgggtagccgtcctcctcgggggcctggcctacacagcgtactgccaggatctcttttccgaaaccgagctagccttccttgtaagtggggccatcctctatggatgctactgggtcgcgcttttgatgttgtatcttgcaattatcgcacgcagatgcggaaaaaagccagaacagtatagtctggcgtttgctgaagtctag

SEQ ID NO: 120261 - DNA, 1308 bp, synthetic construct
  misc_feature 1..1308: note = Description of Artificial Sequence: Synthetic coding sequence
  source 1..1308: mol_type = other DNA
atggcagctcatctgctgcctatttgtgctctcttccttacgttgcttgatatggcccagggttttcggggccccttattgccaaaccggccttttacaacagtgtggaacgccaatacacagtggtgcctggaacgccacggggtggacgtcgacgtatctgtctttgatgtggtggctaacccaggccaaacattcaggggacccgacatgaccatcttttattcttcacaactcggcacttacccctactatactcccaccggcgaaccagttttcgggggtctgcctcaaaatgccagtctaatagcccatcttgctcggacctttcaggatatcctcgccgccatcccagccccagacttctctggcctcgccgtgatcgactgggaagcatggagaccgaggtgggccttcaattgggatacgaaagacatctaccgacaacggagtagggcgcttgtacaagcacagcaccccgactggcccgccccccaagtggaggctgtggcccaggaccaatttcagggtgccgctcgtgcgtggatggctgggactttacagctcggtcgtgccctgaggcccagagggttgtggggcttttatgggttcccagattgctacaactacgactttctctcgccaaactacaccggccagtgtccgtcagggatcagagcccagaacgaccagttaggatggctctggggccagtcccgggccttgtacccgagtatttatatgcctgccgtcctcgagggcactggtaaatctcagatgtacgttcagcacagggtggccgaggcctttagagttgccgtggccgcaggcgatccaaacctccccgtccttccctatgtgcaaattttctatgataccacaaaccattttctgcctctggacgagctagaacactccctcggagagtctgcggcacaaggcgctgctggggttgtactatgggtttcatgggagaacacccgcactaaagaatcttgtcaggctataaaggagtacatggacaccacactcggcccgttcattttaaatgtgacctccggggctctcctgtgttcacaggcactctgtagtgggcacggccgatgtgtgcgccggacatcgcatcccaaggctctgttgcttttgaatcccgcttcgttttcgatccagctcactccggggggcggtccactgtctctaagaggcgccctctcattagaggatcaggcccaaatggccgtggaattcaagtgtaggtgctatccaggctggcaagctccctggtgcgaacggaaaagcatgtggtag

SEQ ID NO: 120262 - DNA, 1308 bp, synthetic construct
  misc_feature 1..1308: note = Description of Artificial Sequence: Synthetic coding sequence
  source 1..1308: mol_type = other DNA
atggcggcacacctgctgccaatttgcgctctctttttgaccttgctggacatggctcagggctttcgcgggccacttctccctaacaggcctttcactacagtatggaatgctaatacccagtggtgccttgaacggcacggggttgatgtagatgttagcgtctttgacgtggtggctaacccagggcagacgttccgcggcccagatatgacgatattctattcttcccagctcggaacctatccatattacacccccactggcgagccggtgttcggtggcctgccccagaacgcttccttaatagcacacctggcccggactttccaggatattctagccgcaatccccgctcccgacttttcaggtctggcagtcatcgactgggaggcttggcgccccagatgggccttcaattgggacacgaaggatatctatagacaacgcagtagagctctggttcaagcccagcaccctgactggccagctccccaggtagaggccgtggcccaagatcagttccagggtgccgcacgcgcctggatggctggcacattgcaacttggccgcgcccttcggcctcgtggattatggggtttttatggattccctgattgttacaattacgattttctcagcccaaattacaccggccagtgtccgtccggtattcgcgcccagaacgatcagcttggatggctgtggggccagtcaagggcgctttaccctagcatatatatgcctgccgtcttagaaggcaccggtaagagccagatgtacgtgcagcacagagtggccgaggcattccgcgtggccgtagccgcaggcgatcccaacctgcctgtgctgccatatgtgcagatcttctacgacactactaaccattttcttccgctagacgagctggaacacagtcttggtgagtctgccgcgcagggtgccgctggcgtggtgctgtgggtgtcctgggaaaacacaaggaccaaggagtcatgccaggctattaaagaatacatggacacgacacttggtccttttattctcaatgtgacctctggagccctcttatgctcccaagccttatgctctggccacggacgctgcgtgcgtaggacttcgcatcccaaggcactccttctgctgaacccagcgagcttttccatccagctgacaccgggcggcggcccactctctctgcgcggagcgttgtccctggaggaccaagcccagatggccgtagagttcaaatgtcgctgctatcccgggtggcaggcaccttggtgcgaacgaaagagcatgtggtag

SEQ ID NO: 120263 - DNA, 1218 bp, synthetic construct
  misc_feature 1..1218: note = Description of Artificial Sequence: Synthetic coding sequence
  source 1..1218: mol_type = other DNA
atggcggcccacctcctcccaatatgtgccctgtttttgaccctactcgacatggcacagggctttagggggccactgctgccaaataggccgtttactacagtatggaacgccaatactcagtggtgtctggagcgccatggcgttgacgtggatgttagcgtgttcgacgtggtagctaaccccggccagaccttcaggggtcccgatatgacaatattctatagttcccagctcggcacctacccttactatacgcctaccggtgagcccgtctttggcggccttccccagaacgccagtttaatcgcgcacttagcccggacgttccaggacatcttggcagcaatccccgcaccggacttcagcggtctggcagttattgactgggaggcctggcgcccacgctgggctttcaattgggacacgaaggacatataccggcagcgatctcgagcactggttcaagcccagcaccctgactggccggccccacaggtggaagccgtggcccaggaccaatttcagggagccgcccgcgcgtggatggccggcactctgcagcttgggagggccctccggccgaggggcttgtggggcttttacggctttcctgactgttacaactatgactttctatctccaaactacacaggacagtgcccgagtggaattcgcgcccaaaatgaccagctgggatggctctgggggcagagccgagccctttatcccagcatctacatgcctgcggtcctggaggggaccggaaagagccaaatgtatgtccagcaccgtgtagcggaagcttttagggtcgccgtggctgcgggcgacccaaaccttccagttcttccatatgtacagatcttctacgatactaccaaccacttccttccactggagtcatgtcaggctataaaggagtatatggacactacacttggccccttcatcttgaacgtgaccagcggagcactcctgtgctcacaggctttgtgctccggacacgggagatgtgtccgcaggacctcccatcccaaagccctattactgctgaacccagcgtccttttccatccagctgacacccggcggcggaccactcagcctcaggggggccctgtccttggaggatcaggcacagatggctgtcgagtttaaatgtagatgctaccccgggtggcaggccccttggtgcgaacgtaagagcatgtggtag

SEQ ID NO: 120264 - DNA, 1308 bp, synthetic construct
  misc_feature 1..1308: note = Description of Artificial Sequence: Synthetic coding sequence
  source 1..1308: mol_type = other DNA
atggccgcccatctgcttccaatatgtgcactcttcctgaccctgctagacatggcacagggattcaggggtcccctcttaccaaataggcctttcactacagtttggaatgccaatactcagtggtgtctagaacgacacggagtagatgtcgatgtgagcgtgttcgacgtcgtggctaatcccgggcagactttccgaggccccgatatgacaattttttactcctcacagttgggtacatatccatattacaccccaacaggtgagcccgtcttcggaggtctcccccaaaacgcgtcccttatcgctcatctggcacgcactttccaagacattctagcggccattcccgccccagacttcagcgggctggccgttattgattgggaagcatggcgacccaggtgggcgttcaattgggataccaaagacatttacaggcagagatcccgcgctctggtccaggctcagcacccagactggccagcgccacaggttgaggcagtggcacaagaccagtttcagggagctgcgcgggcctggatggctggtacgctgcagttaggacgggccttgaggcctaggggcctatggggtttctatggatttccagactgctacaattacgactttttgagcccaaattacactggccagtgtccatctgggattagagctcagaatgatcaactcgggtggctttggggccagtcccgcgccctgtacccctctatttatatgcctgccgtcctggaagggacaggcaagagtcaaatgtacgttcagcatagagtcgcagaggccttccgcgtggccgtagctgctggcgaccctaacctgccagtgctgccctatgtgcagatcttttatgacacaactaatcacttcctccctttagatgagcttgaacactcccttggcgagagtgccgctcagggagccgctggagtcgtgctgtgggtaagttgggaaaacactcggacgaaagaatcttgtcaggcaatcaaggaatatatggataccactttggggccgttcattttgaacgtgacctcgggagctttgctttgtagccaggctttgtgtagcggccatggaaggtgcgttcgcaggacttcccatcctaaggccctgctgctgctgaaccccgcttccttcagcattcagctaacacctggcgggggtccactgagtctgaggggagctctttcccttgaggatcaggcccaaatggctgtcgagttcaagtgtcgctgttaccccggatggcaggccccatggtgcgagaggaagtcgatgtggtag

SEQ ID NO: 120265 - DNA, 312 bp, synthetic construct
  misc_feature 1..312: note = Description of Artificial Sequence: Synthetic coding sequence
  source 1..312: mol_type = other DNA
atggctgcccatctactgcccatctgtgccttgtttctgactctgctggatatggcccagggctttcgaggccctctgctgcctaaccggcctttcactactgtctggaacgctaatacacagtggtgccttgagaggcatggagtcgatgtcgacgtcagcgtattcgatgtggtggccaatcccgggcagacgtttcggggacccgatatgaccattttctatagctcccaactcggcacctacccctactacactccaactggggagcctgttttcgggggactcccccagaacgccagtctcatctag

SEQ ID NO: 120266 - DNA, 531 bp, synthetic construct
  misc_feature 1..531: note = Description of Artificial Sequence: Synthetic coding sequence
  source 1..531: mol_type = other DNA
atgtatgtccaacaccgcgtggccgaagcttttagagttgctgttgctgccggagatcctaacctgccagtgcttccatacgttcaaatcttctatgatactactaaccacttccttccacttgacgagctggagcattcgttgggcgagtctgctgctcagggtgcagcaggcgtggtgctatgggtttcctgggagaatactcggaccaaagagtcctgtcaggccatcaaggaatacatggacactacccttggcccttttatccttaatgttacgtcaggggctctgttgtgctcccaggcactgtgttccggacacggaaggtgtgtgcgacgcacatcacatccaaaggccttgttgctgcttaatcctgcatccttcagtatccagttgaccccaggcggaggtcccctgagcctcaggggggccctgtctctggaggaccaggcgcaaatggcagtcgaatttaaatgtagatgctatccaggatggcaagccccgtggtgcgagcgcaagtcaatgtggtag

SEQ ID NO: 120267 - DNA, 210 bp, synthetic construct
  misc_feature 1..210: note = Description of Artificial Sequence: Synthetic coding sequence
  source 1..210: mol_type = other DNA
atggctgcccacctgcttccaatctgtgccctctttctgactcttctggacatggcccagggcttccgggggcccctgctccccaatcgcccatttacaaccgtctggaatgccaatactcaatggtgccttgagagacatggggtggatgttgacgtttctgtcttcgatgtggtagctaatccggggcaaactttccgaggaccctag

SEQ ID NO: 120268 - DNA, 762 bp, synthetic construct
  misc_feature 1..762: note = Description of Artificial Sequence: Synthetic coding sequence
  source 1..762: mol_type = other DNA
atggccggcactttgcagctgggtagggccttacggcctcgcggcctctggggattctatggattcccggactgttataattatgacttcttaagccctaactacaccggtcaatgcccctcagggataagagctcagaatgaccagctaggatggctttgggggcagtctcgggctctttacccgagtatctatatgcccgccgtgttagaaggcactggcaagtcccagatgtacgtacagcacagggtggccgaggccttcagagtagcagttgctgctggcgacccgaaccttcccgttctgccctacgtgcagatcttctatgacaccaccaatcactttctgccacttgacgagcttgagcacagcctgggtgagtccgctgcccagggggccgcgggggttgttctctgggtgtcctgggagaatacacgcactaaggaaagctgtcaggccattaaagaatatatggataccactttgggcccattcatccttaacgtgaccagcggcgccctgctttgcagtcaggccctgtgctctggacatggtcgatgtgtcagaagaactagtcaccccaaagcccttttgctgctgaatccggcttccttctccatccagctgacgcctgggggtggccctttaagcctgcgcggcgcattgagtcttgaagatcaagcccagatggccgtcgagttcaaatgccggtgttaccctggctggcaggcaccctggtgtgaacgaaagagcatgtggtag

SEQ ID NO: 120269 - DNA, 1422 bp, synthetic construct
  misc_feature 1..1422: note = Description of Artificial Sequence: Synthetic coding sequence
  source 1..1422: mol_type = other DNA
atgcgggccgggcctggaccaaccgttacgctggccttggtgttggccgtttcatgggcaatggaactgaagccaaccgcacctccgattttcaccggacgaccctttgtggtggcatgggacgtccccacccaggactgtgggccgcggctgaaagtacccctcgacctgaacgcatttgatgttcaggcttcacctaacgaggggttcgtaaaccaaaatatcaccattttctatagagaccgactgggactttatccgaggttcgacagtgccggtagatctgttcatggtggagtaccgcagaatgtttcactctgggcccataggaaaatgctgcagaaacgcgtggaacattatattaggactcaagaaagtgccggcctggcagtcattgattgggaagattggagaccagtttgggttagaaattggcaggataaagatgtgtatcggcgcctctcacgccaattggtggccagtcggcaccctgactggccacccgataggattgtgaagcaagcacagtacgaatttgagtttgccgcacaacagtttatgctcgaaaccctcagatacgtgaaggccgttaggccgcgacacttgtggggattctacctgttccccgattgttataatcatgattatgtgcaaaattgggagagttataccggcaggtgtccagacgtcgaagtcgcacgtaacgatcaactcgcatggctctgggcagaatccaccgccctatttccttccgtttaccttgatgaaaccctggcaagttctaggcacggaagaaattttgtcagttttcgggtgcaggaggcgttaagggtcgcccggactcaccacgccaaccatgcactgcccgtgtacgtttttacccgcccgacctacagcagacggctgacgggactctccgaaatggacctgatcagcactattggggaaagtgctgccttgggagctgctggcgtcattctctggggagacgcaggatataccacctcaacagagacctgccagtatctgaaagactatctgacccgccttctggtgccttatgtggtgaacgtcagctgggcgacacagtattgctcaagggcccagtgccatggtcacggtagatgtgttcgacgcaacccatctgctagtacttttctgcatctatccacaaactctttccgtctggtccctgggcacgctcctggtgaacctcagctgcgcccagttggagaactgagttgggcagacatagaccacctccagacccacttccggtgccagtgctatctcggctggagtggcgagcaatgccagtgggaccataggcaggctgccgggggcgcctccgaggcatgggctgggtcccatctgaccagtttactggccttggccgcactggcctttacatggacgttgtag

SEQ ID NO: 120270 - DNA, 1422 bp, synthetic construct
  misc_feature 1..1422: note = Description of Artificial Sequence: Synthetic coding sequence
  source 1..1422: mol_type = other DNA
atgcgagccggacccggcccaacagtgacactcgctctggtgttggccgttagttgggcaatggaactaaagcctacagcgccgcccatatttacagggcgcccttttgttgtggcctgggacgtacctacccaggattgcggaccacgattgaaggtgccattggaccttaatgcgttcgatgtccaggccagccctaacgagggtttcgtcaatcagaatattacaatcttttatcgtgatagactgggtttgtacccccgattcgactccgcagggcgaagtgtccatggaggggtaccacaaaacgtcagcctgtgggcgcataggaaaatgctgcaaaaaagggtcgagcactacattaggactcaggaaagcgccgggctggcggtgatcgactgggaagactggaggccagtctgggttaggaattggcaggacaaggatgtgtatagacgtctgtcacggcaactggtggcttctaggcatcctgattggcctcccgatcgtatcgtgaaacaggctcagtatgagttcgaattcgctgcccagcaattcatgctggagactctccgctacgtcaaggctgtccggcctaggcacttgtgggggttctatctcttccctgattgttacaatcacgactatgtgcaaaactgggagagctatactggccgctgtcccgacgtggaggtggcccgcaacgaccaattagcatggctgtgggcggagagcactgcactctttccatcagtctacctggatgaaacactggccagtagtcgccatggaagaaactttgtttccttccgggtccaagaggcactcagggttgctcggacccatcacgctaaccatgcgctgcctgtgtacgtgttcacccggcccacctacagtcgccgcttgaccgggctctccgagatggatctcatctcgaccatcggcgagtctgccgcgctcggagctgctggggtgatactgtggggagacgccgggtatactactagtaccgagacctgccagtatctgaaggattacctcactcgcctcctcgtgccctacgttgtaaatgtgagttgggcaacccaatattgctcaagggcacagtgccatggtcacggacgatgcgttcgccgtaacccttctgcaagtacattcctccatctatccactaacagcttccggttggttcccggccacgcaccaggggaaccgcagctgcgacccgtaggggaacttagctgggctgatatcgatcatctacagacacatttcagatgccagtgttacctggggtggagcggtgagcagtgtcagtgggaccataggcaagccgctgggggcgcatcggaggcctgggcgggtagtcatctgacctcactgcttgctctggctgcgttagcttttacctggacgttatag

SEQ ID NO: 120271 - DNA, 147 bp, synthetic construct
  misc_feature 1..147: note = Description of Artificial Sequence: Synthetic coding sequence
  source 1..147: mol_type = other DNA
atgagagctggccctggtcctactgtcacccttgccctggttttagcggtctcttgggcgatggaactgaaaccaactgcacccccaatctttactggtcgaccctttgtggtggcttgggatgttcccactcaggattgcggttag

SEQ ID NO: 120272 - DNA, 354 bp, synthetic construct
  misc_feature 1..354: note = Description of Artificial Sequence: Synthetic coding sequence
  source 1..354: mol_type = other DNA
atgcgagctggtcccgggcccaccgtgacgttggccctcgtccttgcagtaagctgggccatggaattaaaacccacagcccctcccatctttacagggaggccattcgtggtagcgtgggatgttcctacccaggactgcggacccagactcaaggtgccgctagacctcaacgcctttgatgtgcaggccagtcccaatgagggcttcgttaatcagaacattaccatcttttatcgtgaccgacttggcctttatccccggttcgactctgcagggaggtccgttcacggaggagtccctcaaaatgtttcgctgtgggcccaccgaaaaatgctccagaagcgcgtctag

SEQ ID NO: 120273 - DNA, 246 bp, synthetic construct
  misc_feature 1..246: note = Description of Artificial Sequence: Synthetic coding sequence
  source 1..246: mol_type = other DNA
atgcgcgctggccctgggcctacggttactttagcgcttgttctggccgtcagttgggcgatggaactgaaacctaccgctccccctatctttacaggtcgaccatttgtggtggcttgggacgtgcctacacaagactgcggtcctagactgaaagtgcccctggatctgaatgcgttcgacgtgcaagcaagccccaatgagggcttcgtgaatcagaatattactattttctatagggactag

SEQ ID NO: 120274 - DNA, 231 bp, synthetic construct
  misc_feature 1..231: note = Description of Artificial Sequence: Synthetic coding sequence
  source 1..231: mol_type = other DNA
atgcgtgccggcccgggccccacagtgacactggccctggtcttggcggtgtcgtgggctatggaactgaaacccacagcccccccaattttcaccgggagacccttcgtggtggcctgggatgtgccaactcaggattgcggtccccggctgaaagtccctctggatctgaacgcttttgacgtgcaagcatcacccaacgagggctttgtaaatcaaaacataacctag

SEQ ID NO: 120275 - DNA, 1422 bp, synthetic construct
  misc_feature 1..1422: note = Description of Artificial Sequence: Synthetic coding sequence
  source 1..1422: mol_type = other DNA
atgcgtgccgggcccggccctactgtgactctcgcattagtcctagcagtgagctgggcaatggagctgaaaccgacagccccccctattttcacgggccgccccttcgttgtggcctgggacgttccaactcaagactgcggacctcgactcaaagtgccgctggacctcaacgccttcgacgttcaggcatcccctaacgagggttttgttaatcagaacatcactatcttttatcgcgaccggttaggcctgtatccgcgtttcgattccgccggcagaagtgtccatgggggagtgcctcagaacgtcagcctatgggcccatagaaaaatgctgcagaagcgcgttgagcattatatacggactcaggagagtgccggactggctgtgatcgactgggaagactggagacccgtttgggtccgcaattggcaggacaaggatgtctatcggagattgtcacggcagctggtcgccagccgacaccccgattggccaccagatagaatcgtcaagcaggcccagtatgagttcgagttcgctgcccaacaattcatgttagaaaccctaaggtatgtgaaggcggtgcgcccccggcacctatggggattttacttgttcccagactgttacaaccatgactatgtgcagaactgggagtcctacaccggacgctgtcccgatgtggaggtggctagaaatgatcagctggcgtggctttgggccgagtccaccgctctcttccccagtgtctacttagatgagactttggcatcctcacggcatggacgcaactttgtgtccttccgcgtgcaggaggccctacgggtagcccggacacaccacgcaaaccacgcgctccccgtctacgtgttcactaggcctacatacagtcgccgcctgacagggctgtctgagatggacctgatatccacaatcggagaaagcgcagctttaggagcggcaggtgtcattttgtggggagacgcaggctacaccacctcaaccgaaacttgtcagtacctgaaggattacctgacacgcttactggtgccttacgtcgtcaatgtgagctgggctacccaatactgctctcgggcccaatgccacggtcacgggcgctgcgtacggcgcaacccctctgcgtccactttcctgcacttgtccactaattccttccggttagtaccgggccatgcgccaggtgagccacagctgcggccagtgggggagttatcctgggctgatatagaccatctccaaacacacttcagatgccagtgctacctgggctggtcaggtgagcagtgtcaatgggatcaccgccaagccgccggcggtgcatcggaggcctgggccgggagtcatttaacctcactgctggctctggctgccctggcgtttacttggacactctag

SEQ ID NO: 120276 - DNA, 1422 bp, synthetic construct
  misc_feature 1..1422: note = Description of Artificial Sequence: Synthetic coding sequence
  source 1..1422: mol_type = other DNA
atgcgagcaggacctggcccaacagtaactcttgcactagtgctagccgtatcatgggctatggaactaaaacctaccgctcccccaattttcacaggacgccccttcgtggtggcgtgggacgtccccacccaggattgtggaccgcgcttgaaagtgccattagaccttaatgcattcgacgtgcaggcaagtcccaacgaaggctttgtgaaccagaacatcacgattttttatagagataggctgggcctttacccaagatttgacagcgcaggtcggtccgtccatggaggggtgccacaaaatgtgtctctttgggcccaccggaaaatgttacagaagcgtgtagagcactatatccgaacacaagagtctgctggcctggcagtgattgattgggaagactggagacctgtctgggtgaggaactggcaggataaagacgtgtatcgaaggctgtcccgccagctggtggcgtcgcgacacccggactggccacctgatcgcatagtgaagcaggcccaatatgagtttgagttcgctgcccagcagtttatgttggaaacccttcggtatgtaaaggccgtgaggccccggcatttgtggggcttctacttgttccccgattgctacaaccacgactacgtgcagaattgggaatcatacacaggaagatgcccagatgttgaggtcgcaaggaatgaccagttggcttggctctgggcagagagtaccgctttgttccccagtgtgtacctagatgagaccttagccagctcgcgccacggccgcaactttgtctccttccgagtacaggaagctctcagggtggcaaggactcaccacgctaatcacgccctacccgtgtatgtgttcaccaggccaacttatagtagaaggttgactgggctaagcgaaatggatctcatttctacaattggggagtccgccgcactgggagctgcgggtgtgattctgtggggggatgcaggatataccacctcgacagaaacgtgtcagtacctgaaggactacctgactagacttctggtgccatatgtggttaatgtgtcttgggcaacccagtattgctctagagctcagtgtcacggacacggcagatgtgtaaggaggaaccctagcgcctcgaccttcctgcatctgtcaaccaactcttttcgcctcgtaccaggacacgccccgggggaacctcaactgaggcctgtaggcgaattgtcctgggcagacatcgaccacctgcagacgcatttccggtgccaatgttacctaggctggagtggtgagcaatgccagtgggaccatagacaggccgccggcggcgcatctgaggcttgggcaggaagtcaccttactagtttgctggccttagctgccttggcatttacttggaccctgtag

SEQ ID NO: 120277 - DNA, 366 bp, synthetic construct
  misc_feature 1..366: note = Description of Artificial Sequence: Synthetic coding sequence
  source 1..366: mol_type = other DNA
atgagagcagggccggggccaaccgtaaccttagcattagtgctagccgtgagttgggccatggaactgaaacctacggcaccacccatcttcactgggcgaccgttcgttgtggcctgggatgtgccaacacaggactgcgggccacgactgaaggtccctttagatctgaacgcatttgacgtccaggcatcacccaacgagggatttgtcaatcagaatatcaccatattttacagagaccggctcggactgtacccacgtttcgattccgctggccgttccgtgcatgggggggtccctcagaatgtgtctctgtgggcccacaggaaaatgcttcagaagcgggtcgaacattacatttag

SEQ ID NO: 120278 - DNA, 1254 bp, synthetic construct
  misc_feature 1..1254: note = Description of Artificial Sequence: Synthetic coding sequence
  source 1..1254: mol_type = other DNA
atgactacccagctgggcccggctctggtactgggagtggctctgtgtctcgggtgcgggcaaccactgcctcaggtgcctgagaggccgttcagtgttctgtggaacgttccgtcagcacactgtgaggccaggtttggggtccatctgcccctgaacgcgctcgggatcattgccaatcgtggccagcattttcatggtcaaaacatgaccatcttctacaaaaatcagcttggcctgtatccctacttcggcccaagggggacggcccataatggcgggattcctcaggcattgccactggatagacatttggcactcgcggcataccagattcatcactctttacgccctggtttcgctggtcctgcggtactagattgggaggaatggtgccccctttgggctggtaattggggaaggcgacgggcctaccaggccgctagttgggcctgggctcagcaagtttttccagatctcgacccccaagaacagctgtataaggcctacacaggttttgagcaggccgcccgtgcgctgatggaggacaccctaagagtggcccaggcgctgcgccctcacgggctgtggggcttttatcactaccctgcgtgcggtaacgggtggcactccatggccagcaattatacaggccgctgtcacgctgcaacgttggcccgaaacacacagctacactggctctgggcggcctcaagtgcactgttcccctcaatctatttgcctcccagactgccacccgcccaccatcaggccttcgtgagacatcgactcgaggaggccttccgggtcgcactcgtgggacaccggcacccccttcctgttctggcttatgttcggctcacccaccgtcgctccgggaggttcctctcgcaggacgacctggtgcagtccattggtgtctctgccgctctgggtgctgcaggtgttgtgttatggggggatctgagtctgtcatcaagcgaagaagaatgttggcacctccacgactacctggtagatactttggggccgtacgttatcaacgtgacccgcgctgccatggcctgctctcaccagaggtgtcatggccacggccgctgcgctcggagagatcctggtcaaatggaggcctttctgcacctttggcccgacggctcactgggagactggaaatcattctcttgccactgctactggggatgggcagggcccacttgccaggagcctagaccaggcccaaaagaggcggtatag

SEQ ID NO: 120279 - DNA, 1164 bp, synthetic construct
  misc_feature 1..1164: note = Description of Artificial Sequence: Synthetic coding sequence
  source 1..1164: mol_type = other DNA
atgactacacagttaggacccgcgctggtgttgggcgtagcgttatgtctgggttgcggacagccgctgccgcaggtgcccgaacgtcccttctctgtactttggaacgtaccgagcgctcactgtgaagccaggtttggcgtccacctgccattgaatgccctcgggattattgccaatcgcgggcaacacttccatgggcagaacatgacaatcttttacaagaaccagctgggcctgtacccctacttcggacctaggggaactgcacacaatggaggcattccgcaggcactccctctcgacagacacctggcactggctgcataccagattcatcactcgctgcggcctggatttgccggaccggccgtccttgactgggaagaatggtgtcctctttgggctggtaactggggccgcaggcgggcttatcaggcggcatcatgggcctgggcgcagcaggtcttcccggacctggacccacaggagcagctgtataaggcatacaccgggttcgaacaagccgccagagcgctgatggaagatacactgagagtggcacaggccttgaggcctcacggcctgtggggattctaccactatcctgcatgcggtaatgggtggcacagcatggccagcaactataccggccgatgtcacgctgcaacactggcacggaacacacagttgcattggctgtgggccgctagttcagcactgttcccgtccatctacttaccccctcgactgcctcccgcacaccatcaggccttcgtgaggcatcgcctggaggaggcatttagagtggcactggtaggacaccgtcacccgctgccagttctggcatacgttcgactgacacaccggagatcagggcgctttcttagccaagaggagtgctggcacctccatgactatctggtagacacactgggcccatatgttatcaatgtcaccagggctgccatggcctgcagccatcagcggtgtcacggtcatggtcgctgcgctcggcgggaccccggtcagatggaggccttcctgcacctatggcctgatgggtctcttggcgattggaagtcatttagctgtcactgttattgggggtgggctggtccaacgtgtcaggagcccagaccggggccgaaagaggctgtctag

SEQ ID NO: 120280 - DNA, 507 bp, synthetic construct
  misc_feature 1..507: note = Description of Artificial Sequence: Synthetic coding sequence
  source 1..507: mol_type = other DNA
atgcttccccctgctcaccaccaggccttcgtacgtcataggttggaggaagccttccgggttgcactggtgggtcatcggcacccactccccgtgctcgcatacgtacgcctgactcaccgccgcagtggcagattccttagccaggatgatttggtacaatccattggcgtctcagccgcgctcggggccgccggcgttgtcctgtggggggacctgagtctgagctcaagtgaggaagagtgttggcacttacatgactacttggtggacaccctggggccttacgtcattaacgtgacgagagccgctatggcatgctcacatcagagatgtcatggccatggaagatgcgcccggagagatccagggcagatggaggcctttctgcatctgtggcctgatggatccctgggcgattggaaatccttctcgtgccattgttactggggatgggcaggtccgacatgtcaggaacccaggcctgggcccaaagaggccgtgtag

SEQ ID NO: 120281 - DNA, 483 bp, synthetic construct
  misc_feature 1..483: note = Description of Artificial Sequence: Synthetic coding sequence
  source 1..483: mol_type = other DNA
atgactacccagttgggccctgctcttgtgctaggggtagctttgtgtttaggctgcggtcaaccgctgcctcaggttccggaaaggcccttctccgtgctgtggaacgttccaagcgcacactgcgaagctagattcggcgtccatttgccgctaaacgccctcggcatcatcgcaaaccgtggacagcattttcacggccagaacatgactatcttttataaaaaccagcttggattgtatccttactttggcccccggggaaccgctcacaacggaggtatccctcaagccttgcctctagatagacatttagcactagctgcataccaaattcatcactcgctccgccccggattcgccggccccgctgtcctggactgggaagagtggtgccctttatgggctgggaactggggcagacggcgagcttaccaggcggcatcttgggcctgggcacagcaagtatttccggacttgtag

SEQ ID NO: 120282 - DNA, 1164 bp, synthetic construct
  misc_feature 1..1164: note = Description of Artificial Sequence: Synthetic coding sequence
  source 1..1164: mol_type = other DNA
atgactactcagctcggaccagccctggtgttgggggtggctctgtgcctgggctgtgggcagccgctccctcaggttcccgaacggccgttttctgttctttggaacgtgccttccgcccactgtgaagccaggttcggagtgcatcttcctttgaatgccttagggatcatcgcaaacagggggcagcattttcatggccagaatatgactattttctataagaaccagctcggactgtacccttatttcggccctcgcgggacggctcacaatggtggcattccacaggccttgccactagatagacacctggctctggcagcctaccagattcaccacagcctgcgccccgggttcgctgggcccgccgtgctcgattgggaggaatggtgcccactttgggcgggaaattggggtaggaggcgggcctatcaagctgcgagctgggcctgggcccaacaggtctttccagatcttgatccacaggagcagctgtataaagcgtataccggctttgaacaggccgcacgagccttaatggaagatactctgagagttgcccaggcattacggccacatggcctctgggggttctatcattatccagcatgcggaaacggctggcactccatggcctccaattacactggcaggtgtcatgccgccactctcgcaaggaacacccaactacactggctgtgggctgcctcaagcgcgttgtttcctagtatatacctccccccacgactgcccccagcacatcaccaggccttcgtgagacaccgcttggaggaggcattcagggtggccctggtcgggcaccgccatcctttgcccgtgctggcctatgtcagactgacacacaggcgcagcggccgtttcctatcccaagaggaatgctggcatctgcacgactacttagtggacactctgggaccctacgtcattaacgtgactagagccgccatggcgtgttcacatcagcgctgccatggccacggccgctgtgcacgccgcgatcctggacagatggaggccttcctacatttatggcccgatggatccttgggggactggaagtccttttcttgccactgctactgggggtgggcaggccctacctgccaggagcctcggccaggaccaaaagaggcagtgtag

SEQ ID NO: 120283 - DNA, 417 bp, synthetic construct
  misc_feature 1..417: note = Description of Artificial Sequence: Synthetic coding sequence
  source 1..417: mol_type = other DNA
atgctacctcctgcccaccaccaggcgttcgtgaggcaccggcttgaagaagcctttcgtgtggccctcgtagggcatcggcatccattgcctgttctggcctacgtaagactgacccatcggcggagcggccgattcctctcacaggaggaatgttggcacttgcatgactatctcgttgatacccttgggccgtatgtcatcaacgtcacccgcgctgcaatggcttgttctcatcagagatgtcacgggcacggcagatgtgccaggcgagatccaggacagatggaggccttcctacatctgtggcctgacggcagccttggggattggaagagcttttcgtgtcattgttactggggatgggccggccccacatgccaggagcctcgtcccgggcctaaggaagccgtctag

SEQ ID NO: 120284 - DNA, 1518 bp, synthetic construct
  misc_feature 1..1518: note = Description of Artificial Sequence: Synthetic coding sequence
  source 1..1518: mol_type = other DNA
atgagtagtgtacaacaacagccgccccccccccggcgcgtgacaaatgtgggtagtttactgcttacaccccaggagaacgagtcactgttcacctttttggggaagaaatgcgttacaatgagctcagcagtagtgcagctctatgccgccgatcgtaactgtatgtggagcaagaagtgtagcggagtggcctgtctggttaaagataatccccaacgaagctactttctgagaattttcgatataaaggatggaaaactgttgtgggaacaggagctgtataacaactttgtctataacagtcccaggggttactttcatacctttgcgggcgatacttgtcaggtggctcttaattttgcgaatgaagaagaagcgaagaagttccggaaggcagtgactgaccttctcggcagacgtcaacggaagagcgagaagcgaagggatcccccaaatggccccaatttgccgatggcaacagtggatataaaaaaccccgaaattacaacgaatcgattctacggcccacaggtaaacaatatatcacacacaaaggaaaagaaaaaaggaaaagccaaaaagaagcggctcactaaggcagacatcggaacccctagcaatttccagcacattggccatgtcgggtgggaccccaatacaggttttgatctgaacaatcttgacccggagctgaaaaatttatttgatatgtgtggcattagcgaagctcagctcaaggaccgagagacatcgaaagtgatctacgatttcatcgaaaagaccggcggggttgaagctgtgaaaaacgaactccggaggcaggccccccctcccccgcccccctcccgagggggtccccctcctccgccacctcccccacacaactcaggccctccaccacccccggccagaggtcggggagcgcccccaccacctccctctagggctccaacagccgcccctcctcctccaccaccctctcggccctcggtcgctgtgcctccgcctccaccaaatcgcatgtatccgcccccccctcccgctttgccctctagtgcaccaagcgggcctccacctccaccaccgtccgtactgggcgtggggccagttgccccccctccaccaccccctccgcctcccccaccaggaccacctcctccaccaggtctcccctcagacggtgatcaccaagtgcctaccacggccgggaacaaggctgctttgctggaccagatccgggagggagctcaactcaaaaaagtcgagcagaacagtaggcccgtctcttgctccgggcgagacgccctgctggatcagattagacaagggatccagttgaagtccgtggcagatggccaggagtccacccctccaacaccagcaccaacatcaggaattgtcggtgctctaatggaagtaatgcagaagagatcgaaggccatccactcatctgatgaagatgaagacgaggacgatgaagaagatttcgaggacgacgatgaatgggaagactag

SEQ ID NO: 120285 - DNA, 1446 bp, synthetic construct
  misc_feature 1..1446: note = Description of Artificial Sequence: Synthetic coding sequence
  source 1..1446: mol_type = other DNA
atgaaagtgctgtcggaggggcagctaaaactgtgtgtggtgcagcctgtgcacctcacatcctggctgctgatcttttttatcctcaaatcaataagctgtttgaaacctgcgaggctccctatctatcaacggaaaccatttatagctgcatggaacgctccaactgaccagtgccttatcaaatacaacctcagactgaacttgaaaatgtttccagttatcggttctcccttggcgaaagcgcggggtcagaatgttaccatcttttatgtcaaccggctaggatactacccttggtataccagtcaaggtgtgcctattaatgggggcctgccccagaatatctcactacaggtgcacctggaaaaggcggatcaggacatcaattattacattccagcggaagacttttctggtctggccgttattgattgggagtattggcgtcctcagtgggccaggaactggaatagtaaggatgtgtaccgacagaagtcacgcaagcttatctctgatatggggaagaatgtttctgcaactgacatagagtacttagcaaaggtgacattcgaggagagtgccaaagccttcatgaaggaaacaattaaactgggtattaagagtaggcctaagggactgtggggatattacctgtatcccgattgccataactataatgtttacgccccaaactactcggggtcctgtcctgaagacgaggtcctaagaaacaacgagctgtcttggctctggaattcttcggccgcattataccccagcataggggtatggaaatcactgggggattcggagaacatcctacgtttctccaagttccgagtccatgagagtatgcgcatatccacaatgaccagtcacgattatgccttgcctgtgttcgtgtataccagactgggatatagagatgaacctttgttctttctctccaaacaggatcttgttagcaccatcggcgagtcggccgccctgggtgcggcggggatcgtgatctggggagatatgaacctgaccgcgtctaaagctaattgtaccaaagtgaagcaatttgtgtcatctgacctcggctcttatattgctaacgtcactagagctgccgaggtgtgctcccttcacctgtgtcgcaacaacggtagatgtatacggaaaatgtggaatgcccctagttacctgcatctgaatccagcctcataccacatcgaagccagcgaggacggagagtttaccgtcaagggaaaggcatctgacaccgacctggccgtgatggcagacacattttcttgtcactgttatcagggatacgaaggcgccgattgtagagagatcaagaccgcggatggttgtagtggggtgagcccatctccggggagtctgatgactctttgtctgttgctgcttgcgagttaccgcagcatccagctgtag

SEQ ID NO: 120286 - DNA, 138 bp, synthetic construct
  misc_feature 1..138: note = Description of Artificial Sequence: Synthetic coding sequence
  source 1..138: mol_type = other DNA
atgaaagtactcagcgaggggcaactgaaattgtgtgtggttcagcccgtgcacctgactagctggctgctgatattttttatcctcaaatccatctcctgccttaagcccgcccgactgccaatttatcagcggtag

SEQ ID NO: 120287 - DNA, 192 bp, synthetic construct
  misc_feature 1..192: note = Description of Artificial Sequence: Synthetic coding sequence
  source 1..192: mol_type = other DNA
atgaaggtgttaagtgagggtcagctgaagctttgtgttgtacagcccgtgcatttaactagttggctcttaatcttcttcatccttaagtcaatcagttgtctgaaaccagcccgcctccccatctaccaaaggaagccattcatcgctgcttggaatgctcctaccgaccagtgtctgataaagtattag

SEQ ID NO: 120288 - DNA, 15366 bp, synthetic construct
  misc_feature 1..15366: note = Description of Artificial Sequence: Synthetic coding sequence
  source 1..15366: mol_type = other DNA
atgaccagtaggagactggaagaatccatgggcgcggtacagatgggcctggttaacatgttcaaggggttccagtctaaggttctacctcctctttcgcccaaggtggtgaccgaggaggaggtgaatcgtatgctgactccatccgaattcctaaaggagatgtccctcaccaccgagcagaggttggccaagaccagactgatgtgccgaccacaaatcatcgaattactcgatatgggggaaaccactcaccagaaattctcaggaatcgatctggaccaggccctgttccaacctttccccagcgagatcattttccaaaactacacaccatgtgaggtgtatgaggtcccccttatcctgcggaacaacgataaaattccccgccttgtgaaggttgtcgaagagtcaagcccgtatttcaaagtgatcagccccaaagacataggacataaagtcgctccgggcgttcccagcatctttaggattctgtttaccccagaagagaacaaggactacgcacatacactgacatgcgtcaccgagagggaaaagttcattgtgccaatcaaagctcgtggagctagggcaatcctcgatttcccagacaagctgaactttagtacatgtcctgtcaagtatagtactcaaaagattctcctggtccgcaatattggaaataagaacgcagtgttccacattaaaacttgtagaccgttctccattgagcccgccatcggcactctaaacgttggagagtccatgcagctggaagtcgagttcgagccccaaagcgtgggcgatcatagcggtcgcctgattgtgtgttatgacaccggggaaaaggtgttcgtgagcctgtatggcgcagccattgacatgaacatccgactcgataagaattccctcacaattgagaagacctatatcagcctggcaaaccagagaacaatcacaatccacaatagatcgaacatcattgcacattttctgtggaaagtgtttgcaactcaacaagaagaagaccgggagaagtacagggcctgcgatgacctcatcaaagaagaaaaggatgagacagatgagttttttgaggaatgcatcaccgacccgctgcttagagaacacctgtcagtgctgtcacgcacattcgctaaccagaggaggttagttcagggtgattcgaagctgttttttaataacgtctttactgtggagcccttggaaggcgacgtctggccaaattcatcagcagagatcaccgtgtatttcaatccactggaagccaagctctaccagcagacaatctattgtgacatactgggcagagaaatacgcctgcccctcagaattaaaggcgaaggaatggggcctaaaatccacttcaacttcgaactgctggacatcggaaaggtctttaccggctcggctcactgttacgaggcaatactgtataacaaaggatcaatcgacgccctgtttaacatgacgcctccaacctccgcacttggggcatgttttgtgttctctcctaaggagggaattatagagcctagcggagtacaagctatacagatctccttctcctctactatcctcggaaacttcgaagaggaattcctcgtgaatgtgaacggctcccctgagcctgtgaaactcacaatccgcggatgtgtgatagggcctacttttcattttaatgttccagctctgcatttcggtgatgtttcattcggatttccccacaccctaatctgctccctcaataatacctcactgatcccaatgacttataaactgaggatccctggcgacgggctggggcacaagtctatcagctattgcgaacaacatgtagactacaagcggccaagttggacgaaagaggaaatttcttccatgaaacccaaagaattcacaatttctcctgactgcgggaccattaggccacagggctttgcggcaatacgagtgacactgtgctcaaacaccgtccagaaatacgagctcgccctggtcgtggacgtcgaaggcataggggaagaggtattagctcttctgatcactgctcggtgtgttgtccctgcgctccatctggtgaatacagaggtggattttgggcattgctttttaaagtacccgtatgaaaaaactttgcagttggccaatcaagacgacctccccggattctatgaagtgcagccacaggtgtgtgaggaggtcccaacggtgctctttagctctccaactccaagtggtgtaatctccccatccagtaccattcatatccctctggttctggagacccaggtaaccggcgaacatcgcagcaccgtgtacatctcaatctttggctctcaggacccgccgcttgtgtgtcacttgaagtctgccggcgagggccccgttatctacgtgcaccctaatcaagtagacttcggcaatatatatgtgctgaaggactcaagccgcatactcaacctgtgtaaccagtctttcatcccagcgtttttccaggcacatatggcgcacaagaaaagtctgtggacaatagagcccaatgaggggatggtccctccagagacagatgtgcaactcgctctgaccgctaacttgaatgatacccttactttcaaagattgtgtgattctggatattgagaacagcagtacctatcgaatccctgtgcaggcttctggaaccggctccacaatcgtgtccgataaaccttttgccccggagttgaatctaggcgcacactttagcctagatacgcattactaccattttaagctaattaacaaagggcgtcgcatccagcagctgttctggatgaatgacagtttccggccccaggcaaaactgagtaaaaagggaagagtaaaaaaggggcacgcgcatgtgcaaccgcagccaagcggcagccaagagcctcgcgacccacagagccctgtttttcacctacatcctgctagtatggaactttaccctggccaggcgatcgacgtgattcttgagggatatagcgccactccacgtatcgtgaaagaaaagttagtttgccatgccatcatcggagcacaaaagggtaaatccctcgtcatggctgtgaacatcacgtgcgagttcgtggctcccctgatccagctgagcacaaagcagctgatctaccgactagagaagaagcccaattccatcctgaaacctgactaccaaccactcgccataaagaatatcagtaccctgcctgtcaacctgttgctgagtactagcggaccattttttatttgcgaaacggacaaatcccttcttcctgctactcctgagccaattaagctggagatcgacgaagagaagaatctgcttatcaaatttgaccctagttatcgaaacgacttaaacaactgggttgctgaggagatcttggctattaagtacgtggagcatccccagatagactccctggacctccgtggggaggtccactaccccaatttgtctttcgaaactaaagagttagatttcgggtgtatcctgaacgacactgagttgatcagatacgttacaataacaaactgttcacccctggtggttaagttccgctggttctttctagtgaatgacgaggagaaccaaatacgatttgttactctgcctaagaagccttatagtgcccccgtgtcccagatggaatctattccagccaccagtgaggccgcaagcccccctgctatcctcgtgaccgttgagtcccccgagatggacttaaacgattttgtcaagactgtgctggtggatgaggacgcaaggcctgaggagaaggagctgagaaaaaccaaggccagttcagtcatatccgatgagataaagatatcatctactgaaatcgagagaatctatagttcccaatcccaggtggaggaccaggagtctcttcagacctgcgaacagaatgagatgctgtctattggaatcgaagaggtgtttgatatcttgcccctattcggcgtcctgcaacctcatagctcccatcagatctcctttaccttctacgggcatgcaaacatcatcgctcaggccaaagctctgtgcgaagtggaggaaggtccgacatatgaaatcacactgaaaggtgaggcttcattggtgaactactctttcgatacgaaggacattcactacggtcttcaactgttcgaccacgtcactgagagggaaataaccctgactaatatgggaaaggtggggttcgaatttaaagtgctaaccgaccaccagagtagtcctgacaaccttcttcctggtgtgcctctgatcttgccggtgtcggggttcatttcttcacatcaggagcaagtactgaaggtctattatctacccggcgtccctgaggtatttaaaaggagctttcagattcagatagcccacctggatcccgagaacattaccttgagtggcgaggggatcttcccacagatttgtttggaccttcctcggaatctgactgcaaatgagaaatacgagatgttcttgaatcaggcacgtaagaatacagacaaggaatacaataagtgtgaaatgttggatcactttgatatcataacagaggaagtaccggaagacgagcccgccgaagtatccgcccatctgcagatggaagtagaacggctaatagtgcaatcctacgttctcgagcaccagaagactacaacacccgacccaatggacgatccgtgttttagccatcgctctcgacgaaagttggcaaaaattcagttacctgaatacattctggacttcgggtatattatcttgggagaagtgcgtacacatatcatcaagataatcaacacaagccacttccctgtgagcttccacgcagataaacgtgtcctccacgagaccgggtttagcacagaactcgaccgtgtaaaaaacctgccccattgcgaaaccgagatcttcgaggttaggtttgaccctcagggcgcgaacttgcctgttggctccaaggaagtgatcctcccgataaaagtggtgggaggtccaacagtgcacatctgcttgcaggctaaggttaccatacctactatgacactgtctagaggcaaggtcgactttgccaccatacagtgcggccaatgtttggtggaaacgattcagttgtctaatcacctgcaagtaccctgcgagtggttcgtacagagccagaaacctgtagacaagctggaaaaacacatgcctaaatatctcaggcagaagctgcgcgcggaacttaaacctaaaacacgcatctttgaaattcagccgatttctggggtcctggatcccggggaaaagtcgaatgtgcaagtaaaatttatgcccaaggaggaaaagttttactctcagacgctagtgtttcagatagctcagtctgcccagaagctgactctccttgccagaggccagggactcgaaccccgacttgaattctcaccttccgtgctggacctgggacccctgttactatgcgcccctggagacgaagctgaggtgatcgtaaaaaatccgtgcaacttccccattgagttctacagtcttgagttcgaccagcagtaccttatcgaggagaagatactaagaaaactcaagggttacgattcatataatacactattgcttccgcctaggaaccctggcgagaagctgccgcctgagctttacgaatatttcaaggaaattaaaaaaagtaaggaggagcaaatgagggccaagtatctcgagaatcttgcccaggaaaacgaagaggaggatattacgagtagcgatcaggggacctccaactcaaccaagaggacctctttgagcaggggcatcagtgtcacaagcaatcttgaggagtggcatgccctgctggtcgagagcaaaacttacctggaggaagaagaagacgaagagtcactggaaaagattatcttccagactgataagctacagtcgattgacagtcattcaatggaggaggtgggggaagttgagaacaatccggtatctaaagcaatcgcgcgacacctgggaatcgacatcagcgcggaaggtcgtctggccaaaaataggaaggggatcgcaatcattatacacgggacgcctttaagtggcaagtccgccaatgcagtaagcgttgccaagtactacaacgccgcttgtctcagcattgactccattgtgctagaggcggtggcgaatagcaacaacattccaggtattagggcccgtgaactatgtataagggctgctattgagcagtcggtgaaggaaggggaggaggccgcccaagaagctgcggttggccagaatgtgatcggccagggccggctgagtacagataccctgggcaaattagcaagcgaaatgacactggtggccccggaaatcaagccgggaaagagcgttcgaggctccgtggtgataactaagtcaaaggccgattcccacgggagtggaagccagaagcagcatcacagtcaccagtccgagacccctcagatcagctcttcacctcttccccccggacctatccatagatggctgtccgtctcgccgagtgtagggggcgagactgggttgatgagctgcgttctgcctgacgagctgttggttcaaatcttggctgagcgcatccagttgtccgattgctataggggagttgttttcgacggccttgacacccttttcgcccagaacgccgctgccgcattgctgtgcctcctgaaggccattggtagccgtgagcacatatacatcctcaatatggcacaggattacgctgcaatgaaagcccaggaaaaggctaagaaagagcaggaagagcgaaagcataagggggccttggagaaggaaaaggagcgtctacagaatatggatgaggaagagtatgacgcgctgactgaggaagagaaactgacttttgatagaggcattcagcaggctctccgggaacgcaagaagcgggaacaggaacgcctggccaaagaaatgcaggaaaaaaagctgcagcaggaacttgagcggcagaaggaagaagacgagttgaaacgcagggtgaaaaagggaaaacaggggccaatcaaggaggagccgccaatgaagaaatcccaggccgctaataaacaagtacccccactcactaaggtggatgtgaagatggaaaccatcgagcgcaaaatttccgtgagagaacagacaatgagcgaaaaagaggagcttaacaagaaaaagaggaatatgggcgatgtatctatgcatggactccctcttgtccaggaccaggaggacagcgaaggagacaacagcaaagaccccgataaacaactcgcccccaaattcaagacatatgagttgacactgaaggacgtgcagaacatcctgatgtactgggatcgcaaacagggggtgcaacttccacctgccggcatggaggaagccccacacgagcccgacgatcaacggcaagtccccctcggcggccggcgggggcgaaaagacagggagagagagcgactggaaaaggagagaactgaaaaagaacgtttagaaagagaaaaagccgagagagagcgcttagagaagctgagggctctggaagaaagaagcgattgggaaggagagggcgaggaggatcatgagggtaagaaagagaaagaccttggcgtcccgttcctggatattcagaccccggattttgaaggactttcttggaagcaggccttagagtctgataaactgcccaagggcgagcaaatcctggacattctgggcctgggcgcctcaggcccccctatccctccacctgccctgtttagcatcgtctcctatcctgttaaacggccaccccttactatgaccgatgacttggagcattttgtgtttgtaatccctccgagtgaagacatctcactcgatgaaaagaaggagatggaaatagaatctgattttttggcaacaaccaacacgactaaagcccaagaggagcagacctcctcctcaaaaggcggcaaacaaaagatgaaggaaaagatagatcaagtattcgagatccaaaaagacaagcggcacatggctctgaaccgcaaggttctttctggcgaacccgccggaactatctcacagctgtcagacactgacctggacaacttcaatggtcagcattcgcaggagaaattcactcggctaaaccacttccggtggatcgtgccagccaatggagaagtgaccctgcaggttcattttagctccgatgagttcggcaacttcgaccaaacattcaacttcgagatcttagggacatgttgccaataccagctttattgcagaggaatttgtacatatccatatatatgtcaggaccctaaggtagtgtttcctcagcggaagatggatatgaaaacaaacgaggttatatttaaaaagtatgtgatgtcgacagagacatactacttcgggcctctcctttgtggtaagtcccgtgacaagtacaaaagctccctcttccccggcaacatggagactctgacaatcctgaacaccagcttaatggtggtggaagccagtttttacttccagaatgacgtgaaggccaatacctatttcctggaaccgaataccatggtcctcaaaccaaatgagaagcagattcttaatgtttgggcctacccaacatctgttggcgtgtttgaagacagtattgtttgttgcatcaacgataaccccgaacctgcaatattccagctttcctgtcaagggatccgaccggagttagagttggaacctagacaacttcactttgataggctcctcttgcacagacaagagtcaagggtagttctgctccggaacgtcactctacttcccgtggcctggagaataacgtccctggagcatctgggcgatgattttacagtgagcctgatgcaaggcacaatcccccctgaggccgaatacggtctccatctatacttccagccaacgaagccagttaatattaagaaggccatcaggctcgaagtcctggacgctgaaaaccttctgggcgtggtgcagatagaaaacatcatggtctttgccgaagcctatgacatcgccttggatataacattccctaaaggcgcggaaggtgggcttgattttggcattgttcgcgttactgaggaggccaagcaacccctgcaattaaagaatcgtggcaaatacgagattgccttctcctttagtgtcgacagtgtgggcattagcactccaaacatcaattccatgatttctgtccagcccaagaaaggcagcctgacgccgacagaaaagccaactaatgtgcaagtcttctttcacgccaagaaggaggtcaaaatcgaacatcagcccgtgctgagatgccaaatcatcgagcccaatatttctgaaggcggggaaataatagcgtccatcccaattaagttttctgcgaacgccgtctactcgaagtacaacattacacctagctccgtaatcaatttcggcgctctaatttgtggtaccaggaagtcaaccacatttaccattgaaaaccaaggagtgactgattttaagtttgcactttataaactgaccggcgagagtccaatccaccaaaagaaggctgccagtcatgtgcggcacgccaggtcgagagagtctgagagtttttacaagaccggctcatctcgggccgcaaaattttcagacaccatccagaaagaggtgaccacaaccggccaggcgcgtttcgcccatggaatgtttacagtttaccccggtttcggaagtatccctagtgggggacagcaggtgataaacgtggactgcgttgcagacgccatgggtaagtgtgaagaatttattgccattgatatctctggccgcgatcctgctgtacatccagcaggcattctttataccctgttggcagaggcctgcctccctgcctttgtcaccgaaaataatgcattgatcttcgaagaacaccaaatttgtacatctgctaatctgcaccatattctccagacaatcgaatctgggggtctgttcgtggaagacgagaataagtttattttctgtaatgtcctcgtcggcagacaggctaaagcgcgcttcaaaatatctaatgttgggaagatcacttgtgatgtgaacatcgtagttcggccaatctcaaataaaccatttgctcgaattgtggacatatttgaggtcgagccctcaaagatgtgcatcgctagccactcccacgcctttgctactgtatccttcactcctcaaatcatgcaaaattatcagtgtatattcgaggcaaccttagacggcttgccttcaaccctcgccaaatcccgcgggctggtcttcgatattgccggcgagggaaatctcccgagggtgactgtggtcagaccagtcctccacaaccagtatgggaaccctctgctgctctttaagagactgctgctgggtcattcggaaaaactgccattgattcttaagaacaatggggtgctccctgcccaactgcacgttgatctccaagatgagctgggtgtgttcagcctaaaggggagaccgacaactgcttatatatacatcaccgaagagaataaaccgcatgtgaaagcaaaaaaagctcatacagcctcccttgtggtgagtcctggggatactgccgagtttgatgttgtgtttcacagccagaaggttggccgcatgcgcggtataatccatctgtctgtgataaataaccagtacgaggaaacgagcattcatatggtcggcgaaggttacgaggatgacataactttggacaacatacacggcctcgtggcaccaacctctcaggaggatattagcattagtgaatttaccgaaattatcgaagataacgacatggaggatctggtggccgctgctctcgtggatcacattcaattcggcgactgtcacattggtcacagttataatgctagcttcaccgtgaccaatcattctcaggttaaccttattcgctttgagtggcctgtttctgcaacaatcgcattctctcctcaaatgggacacctgcatccaggctgtgcaaaggatattgtcgttacgatgaagtccgatgtacctatcaatttgaagaacatgcgtatccgctgcaaactgagcagaataatgtttcagctgccagcggaccaagttcccgattgggacgatcgtatgcatacagtcaaatgggtggacgtacccaggaacatgcccgggacctttacaaccaaacgcaaggtcatcgaaacggatcccgaacctgcacactcagttttggaggaaaattaccaagagctgcaacttcagatatctgctaacgtcgatttcgcttcatatcactgtcaggctcgggatgtgcggttcaaggaaacgctcgtataccagaccagagtcttcgaatttgatgtgatcaacagcgggcgggtacaactcgagttttcatgggtctccgaagacactagcaaggcagtgtcttttgccaagcctgaccaccagggctcggctcagaaggaccagttatcacaggggacaatgcacacagggagcacactcgacagcacgatggaccactgggctgaaggttctccacagcctttctccgtcgaacccagttccggaattgtcccggtgggtaaaatccagaagttcaaagtcaagttcagcccactcgatatcggggacttcgagagcaacctcttttgtcagatccctaaccttccacccggggaacaaggtcccgtgttggtagcaaagggcaggagtacccttccgatctgccacttcgacctgaaggactcggattacattagcggacaccagcggaaccccgagctgcgggggtccagcgggggtgcactggaccccaacacccgggtgattgagttcactacagtggggatcggagggaaaaacctaagaacattcacaatcctcaatccaactaactcaacatattctttctgctggatctccgaggagattgaatccctgcagaaccctgcagcatttacctgtctcacagaaaaaggcttcatccatccggagaagaaggcggaaatagtgttccagttcacgccctttcacctgggcattactgaatcctcctggacctttctgataccagagcacaatataactgttccgtttctcctggtcggtaaaacgactgagcctttgatctctctcaacaaaagtcatctgaatttttccagtttgctgatcggaagggaggctcgggaaacggtgcagatcatcaacaaggaagagcaggggttcgatttcagtttccaggataatagcagatacagcgaaggcttctccaactctcttctggtgtgcccgatggaagggtggatccctccccttagtcgttttcctatagacatctttttcaccccaaaacaggagggtgatgtgaacttcaatctgatttgtaatgtggaaaagaaggtacatccagtaactttaaacgtaaaggctgagggctacaccatgaacgtggagataaagtgcaaagatcgtacaggatccatcactttattgacccccaatcagaccaatattatcaatttctatgaggtggaactcaacgagtgcgtgcagtgtgaatttaactttattaacacgggcaagtttacctttagttttcaggcccagctgtgcgggtcgaagactctccttcagtaccttgaattctctcccatcgattccactgtggacgtcggacagagcgtacatgcaacattgtccttccagccactcaagaaatgtgttctgactgacttggaattaattatcaagatttcgcacggccctacctttatgtgcaacatctctggttgcgctgtatctcctgctatacattttagtttcacttcttataattttggcacctgttttatttaccaggccggaatgcccccgtacaaacagaccctcgtaatcacaaacaaggaggaaacccccatgagcattgattgtctgtacacaaacaccacccacctcgaggttaatagcagagtagatgtcgtgaagccggggaatacactggaaatccctattaccttttatccacgggaaagcattaattatcaggagctgatcccttttgagataaatggtctgtcacagcaaacagtggaaattaagggaaagggaaccaaaatgaagatacttgtcctcgacccggcaaataggatagtgaagctgggcgccgttctaccagggcaagtggtgaagaggactgtctcaatcatgaacaactccttggcccagctcacctttaaccagtcgatcctatttaccattccggagttacaggaacccaaagtgctgacccttgcaccattccacaatataaccctaaaacctaaggaagtttgtaagctcgaagttatttttgccccaaaaaagcgggtcccccccttcagcgaggaagtgttcatggaatgcatgggtctgctgagaccactgtttttgctatcaggatgctgtcaagccttggagatttcccttgaccaggagcacattccattcggcccagtcgtgtaccagactcaggccactagacgtatcttgatgatgaacaccggggacgttggtgctcgatttaaatgggatatcaaaaagtttgagcctcacttctccatttcgccggaggaggggtacatcacctcgggcatggaagtgtcctttgaagtgacttatcaccccacagaagtcggcaaagagtccttatgtaaaaacattctctgttatatccagggagggtctcctctttcactaacgttgtctggggtctgcgtcgggcctccagcagtcaaagaagtggtgaacttcacatgccaggtccgcagcaagcacacccagactatccttttatccaacagaaccaaccagacatggaacctgcacccaattttcgagggtgaacattgggagggtcccgagttcattactctggaggctcaccaacagaataagccttatgaaataacctaccggcctcggacgatgaatctggagaataggaagcaccagggaaccctgttttttcctctgccggatgggaccgggtggttgtacgcattgcatgggactagcgagctgccgaaagcggtggctaatatctatcgagaagtgccgtgtaaaacaccctacaccgagctcctgccgatcacaaattggctcaacaaaccccagcgctttcgcgtcatcgtggagatccttaagccagagaagcctgacttgtccataactatgaaggggctggattacatcgacgttctgagcggtagtaagaaggattacaaactcaatttcttcagtcacaaagaaggcacatacgccgccaaagtaatcttcaggaatgaggtgaccaacgagttcttgtactacaatgtcagctttcgcgtgattccctccggaatcataaagaccattgagatggtgacccccgtgagacaggtggcttccgcctcaattaagctggaaaacccgctcccctattcagttacgttctcgactgagtgcagaatgccggatatcgctctcccgagtcagtttgttgttcccgcgaactccgaaggcacattttctttcgagtttcagccgctgaaggctggcgaaaccttcggccggcttacattgcacaacaccgatttaggttactatcagtacgaactgtacctgaaggcgacaccagctctgccagaaaagccagttcattttcaaacggtcctagggtcctcccaaataatcctggttaagtttataaactatactcgccagagaacagaatactattgtcgtacagactgcacagattttcacgctgagaaactcatcaatgctgctcccgggggccagggtgggacggaagcctctgtggaggttttgtttgaacccagccacctcggagagaccaaggggatacttattctgtccagtttggccggtggtgagtacattattccactctttggaatggcgttaccgccgaaacctcaggggcccttttccatacgggccggatactctatcatcattccctttaagaacgtcttttaccacatggtgaccttcagcatcattgtcgacaatcccgccttcacaatcagagccggcgagtccgtgcggcctaagaagatcaataatattactgtcagctttgagggcaatcctagcgggtccaaaacgccgatcaccaccaagctgacggtgagttgccccccaggagagggaagtgaaactggtgtcaaatgggtatattacctgaaagggatcaccctgtag

SEQ ID NO: 120289 - DNA, 2853 bp, synthetic construct
  misc_feature 1..2853: note = Description of Artificial Sequence: Synthetic coding sequence
  source 1..2853: mol_type = other DNA
atggaatcagccggagggttcaaattgggtatggagcctctcagcgggggcggcgtctgcgaaaaaaagaagttactgaagatgacaagtcgccgcttagaagagagcatgggggcggtgcagatgggcctcgtcaacatgtttaaaggtttccaaagcaaggttttgccccccctgagccccaaggtggtcacagaggaggaagtgaatagaatgttaaccccatcagaattccttaaagaaatgtccctcacgacggagcaacggctagccaagaccaggctcatgtgccggccccagattatcgagttgcttgatatgggcgagaccacccaccagaagttcagcgggatcgaccttgaccaagcattattccagcccttccctagtgaaattatcttccagaactataccccgtgtgaggtttacgaggttcctttgattttacgaaacaacgacaagatccctagattggttaaggtggtcgaagagagtagcccatactttaaagtcatcagtccgaaggatataggccataaggtagctcctggagtgccgtctatttttcgcattttatttacaccggaagaaaacaaggattacgcacatactttgacatgtgtcactgaacgtgaaaagttcatcgtccctattaaggcaaggggggcgagagcgattctcgactttcccgataaattgaatttttccacctgtcctgtaaagtacagtacccagaaaatccttctggttcggaacatcggtaataagaacgcagtttttcacattaagacatgtcgaccattcagcatagaaccagccattggcaccttgaatgtcggcgaatccatgcaactcgaagtagagttcgaacctcagtctgtaggagaccatagcgggcgtctgatagtgtgttacgacacgggcgagaaggtgtttgtgagcctgtacggtgccgccatcgatatgaacattagattggataaaaattccctgacgattgaaaaaacgtatatcagtctggccaatcagaggacaatcacgatccacaatagatccaacatcatcgcccattttctatggaaagtctttgctacccaacaagaggaagatagggagaaataccgggcctgtgacgacctgatcaaagaggagaaggacgaaacagacgagttcttcgaagagtgcataacagatcccctgttgcgcgagcatctgagcgttctatcaagaaccttcgctaatcagcgcagactcgtacaaggagattcaaagctgttctttaacaacgtgttcacggtcgagccactcgagggagatgtgtggccaaactctagcgctgagatcacggtgtacttcaacccgctcgaagcgaagctctaccagcagacgatttattgtgacattcttggaagagaaattaggctccccctaaggattaaaggcgaggggatgggccctaagatacatttcaattttgaactgctggatattggaaaagtctttacggggtctgcacactgttacgaagccatcctgtacaacaagggctcaatcgatgcgctgtttaacatgacaccaccaacatctgctctgggagcatgcttcgtgttctctccaaaggaaggcattatcgaaccttccggagtccaagccatccaaataagtttctcatctactatcttaggaaacttcgaagaagagtttcttgttaacgtcaacggtagccccgaaccagtcaagctgaccattcggggatgcgtgatcggccctacctttcactttaacgtgcctgcactgcatttcggagacgtttcatttggcttcccacacacactcatctgttctctcaataacactagcctcatcccgatgacctacaaactgcgtattcctggcgacggactgggacacaaatccattagctattgtgagcagcacgtggattacaaacgcccgagttggacaaaggaagagatatcatctatgaaacctaaagagtttaccatctccccagactgtggcactatcagaccccaaggattcgccgctatcagggttacactgtgtagcaacaccgtgcagaagtatgaacttgcactcgtggtggatgtagaaggaattggggaagaagtgctggccctgctcatcacagctaggtgcgtcgtccccgctttacacttggtgaataccgaggtagatttcgggcattgctttctgaaatatccttacgagaagactctgcagctcgccaatcaggatgaccttccaggattctacgaggtgcagccccaagtgtgcgaggaggtgcccactgtgctcttctcatcaccaactcccagcggcgtgatctccccctcgtccaccatccatattccacttgtcctggagacacaggtgactggcgaacaccgcagcaccgtctacatttccatctttggctctcaagaccctcccttagtgtgccatcttaagtctgcgggagagggcccagtgatttacgtgcatcctaaccaagtggacttcggaaatatctatgtgctcaaggacagttctagaatcctcaacctttgcaaccaatccttcatccctgccttctttcaggcacacatggcacacaagaagagtctttggacaatcgagcctaacgaaggtatggtgccacctgagacagacgtccagcttgccttaactgccaacctgaacgatacactgacatttaaggattgcgtcatcttggatatagaaaacagctcaacgtataggattcccgtccaagcctctggcactggctcaactatcgtgtccgataagccttttgcccccgaactcaacctgggggcacacttcagatag

SEQ ID NO: 120290 - DNA, 2823 bp, synthetic construct
  misc_feature 1..2823: note = Description of Artificial Sequence: Synthetic coding sequence
  source 1..2823: mol_type = other DNA
atggagtccgccggaggttttaagctaggcgagaagaagaagttgctgaagatgacatcacgaaggctggaagaatccatgggggcggtacagatgggattggtgaatatgttcaagggtttccagtcgaaggtgcttccccctctgagccccaaggtagttactgaagaggaggtgaaccgcatgctgaccccctccgagtttctgaaggaaatgagcctgacaactgagcagagactggcaaagacccgcctgatgtgccggccacagattatcgaactgctcgatatgggcgaaaccactcaccaaaaattcagcggcatagatttggaccaggcactgtttcagcccttcccctccgaaatcatatttcagaactataccccctgtgaggtgtacgaggtgccgcttatactaaggaacaatgataaaattccacgcttagtgaaagtcgtcgaggagagttcaccatatttcaaagtcatcagccccaaggacatcgggcacaaagtagctcccggagtgccgagcatattcagaatcctttttactcccgaggagaacaaagattacgcccacaccttaacttgcgtgactgaaagagaaaagttcatagtgcctattaaggctaggggcgcccgcgccatactcgattttccagacaaactgaacttcagcacctgccccgttaaatacagcacccagaagatcctattggtccgaaatatcggcaataaaaacgccgtattccacatcaaaacctgccgtcccttctcaatcgagcccgctatcggtacattaaatgtcggcgagagtatgcagctcgaggtcgagttcgagcctcagagcgtcggcgatcactccggacggctcattgtctgctatgacaccggcgaaaaggtgtttgtgtcgctctatggggcggccattgacatgaacatcaggttggacaagaattccctcacaattgagaagacctacatttcactggctaaccagcgcacgattacaatccataatcgctctaatattatagcccactttctttggaaggtatttgccacccaacaggaggaagacagagagaagtacagggcctgcgatgacttgataaaggaggagaaagatgaaaccgatgagttttttgaagaatgtatcactgatccacttctcagagagcacttgagcgtcctctcccgtacattcgcaaaccaacgaaggctggttcagggagactctaagttattttttaataacgtcttcaccgtggaacccctggagggagacgtttggcctaactcctccgctgagatcactgtgtattttaaccccctggaagcaaagctctatcagcagacgatttactgtgacatcctcggccgtgaaatccgccttcctctccgcattaagggggaaggtatggggcccaaaatccacttcaacttcgagctcctggacattggtaaggtgttcacgggatctgcccactgttacgaagccatactgtacaataagggcagcatagacgcactgtttaacatgaccccccccacaagcgcactcggagcatgcttcgttttttcgcctaaggaagggatcatagagccctcgggagtgcaggcgattcagattagtttctcttcaactattctgggaaacttcgaagaggagttcctcgtgaatgtcaacggctcccctgagcccgtcaagcttaccattcgcgggtgtgtgattggtccgacctttcacttcaacgtgcccgctctgcattttggagatgttagcttcggtttccctcacaccctgatttgctcacttaataatacaagcctgattcccatgacttataagcttcggatcccgggagatgggcttggtcataagtcaatcagctactgtgaacagcacgtggactacaagaggccctcatggactaaagaagaaataagcagcatgaagccaaaagagttcactatatcccccgattgtggcacaatccgtcctcagggatttgccgctatcagggttaccctatgtagcaacaccgtgcaaaagtacgagctggctttggttgtggacgtcgaaggcatcggcgaggaggtgttggcactgttgatcacggcgaggtgtgtcgttccagctctacacttggtgaacacggaagtagattttggccactgttttctgaaatacccttacgaaaaaactctacagttagccaatcaggacgatttgcccgggttctacgaagtgcagccccaagtgtgcgaagaggtgcccaccgtgcttttcagtagccctaccccctccggagtcatctcaccttcctccacaattcacatccccctcgtcttggagacccaggtgaccggcgagcacaggtccacagtgtatatatcaatctttggatcccaagatccacctttagtttgtcacttgaagtcagccggggaggggcctgttatttatgtgcacccaaaccaggtggacttcgggaacatatatgtgttgaaggactcatcccggatcctgaacctctgtaaccagtccttcatccccgctttttttcaggcacatatggcccataaaaagtctctttggacaatcgaacctaatgaaggaatggtgccgcctgagacagatgtgcaactggccttgaccgcaaacctgaacgataccctgactttcaaagactgtgttatcctcgatattgagaactcttcaacctatcggatccccgtccaggcaagcggaacaggatctacaatagtgagcgataagcccttcgctccagaactgaatcttggcgcccacttcaggtag

SEQ ID NO: 120291 - DNA, 15363 bp, synthetic construct
  misc_feature 1..15363: note = Description of Artificial Sequence: Synthetic coding sequence
  source 1..15363: mol_type = other DNA
atgacatctcgaagactggaggaatccatgggggctgtacagatgggattggtgaacatgtttaaggggttccagtctaaagttctccctccacttagtcctaaggtcgttacagaggaagaggtgaacaggatgctcacgccctcagaattcttaaaagaaatgtctcttactaccgagcaaaggctcgctaagaccaggcttatgtgcaggccacagatcatcgaactgctggatatgggcgagaccacacaccagaagttttcgggaattgacctggatcaggcattattccaacctttcccgagcgaaatcatcttccagaactatactccctgcgaggtttatgaggtgccactcattcttcggaataacgacaaaattccacggctggttaaggttgtggaagagagttccccctactttaaagtgatcagtcctaaggacataggtcataaggtcgcccccggggtgcctagcatttttaggatcctgtttaccccggaggagaacaaagactatgcacatactctcacgtgcgtaaccgagcgagaaaagtttatcgttcctatcaaggcaaggggggcccgggccatcctggatttccccgacaagctgaacttctcaacttgccctgtcaaatacagtacccaaaagatcctgttggttagaaatataggaaataaaaatgcagtatttcacatcaaaacttgccggcctttctccatcgagccagcaattggcaccctcaacgtgggggaatccatgcagttagaagtggagttcgagcctcaaagcgtgggagaccactcaggacggctgatcgtatgctatgacacaggggagaaagtcttcgtgtcattatatggagccgccatagacatgaacattcgtctggacaaaaattccttgaccatcgagaagacttacataagtcttgccaaccagaggacaattacaatccataatagatcaaatataatcgctcatttcctatggaaagtgttcgctacccagcaggaagaggaccgtgagaaatatagggcctgtgacgaccttatcaaggaggagaaggacgagacggacgagttctttgaagagtgtattactgatcctctcctgcgcgagcacctcagcgttctcagtcgcacatttgctaaccagcgtcgcttggttcagggtgatagtaagctgttctttaataatgtttttacagttgagcctctcgagggcgacgtgtggccaaattcgtctgccgagatcaccgtatacttcaaccccctggaggcaaagctgtaccaacagacaatttactgcgacatactgggacgagagataaggctgccactcagaatcaaaggggaaggaatgggtccaaagattcattttaacttcgagctgctggacatcgggaaagtcttcaccggatctgcgcattgttacgaggccattctctacaataaggggtcaattgacgccctcttcaatatgactccgcccacttcagcgctcggcgcctgttttgtgtttagccctaaggagggcatcatcgaacccagtggcgtgcaggctattcagatttctttttctagtactatcctgggtaactttgaggaggaattccttgtcaacgttaacggtagccctgagccggttaaactcactatccgcggatgcgtaatagggccaacctttcatttcaacgtgcctgcactccacttcggcgatgtgtcatttggatttccacatacattgatttgtagcttgaacaacacgtcattgatcccaatgacgtataagctcagaatcccaggagacgggctggggcacaagtcaatatcttattgtgagcagcatgtggattacaagcgcccttcttggaccaaagaggagattagttctatgaagcccaaggagtttactatcagccccgattgcgggactatacgcccacagggctttgctgccattcgcgtgacactctgttccaacactgtgcaaaagtacgagctggccctcgtggttgatgttgagggaatcggcgaagaggtcctcgctctcttaattactgcacggtgtgtggttcctgcgctccacttagtgaacaccgaggtcgatttcggtcattgcttcttgaaatacccgtacgaaaaaacactgcaactggccaatcaggatgacctccctggcttctacgaggtccagccccaggtctgtgaagaagtgcctactgtgcttttttcttcccctactccttctggggtgatctcgccttcatctacaatccatatacccttggtcctggagacacaggtgacgggggaacaccgctcaactgtatatatttcaatttttggttctcaggaccccccattagtgtgccacctgaaaagtgctggagaaggcccggtgatctatgtacatccaaaccaggttgactttgggaacatctacgtccttaaagattcgagcagaatattaaatctgtgcaatcagtcttttatacctgcgttcttccaggcccacatggcacataagaaaagcctctggacaatcgaacccaatgaggggatggtaccaccagagaccgacgtgcagctggccctcacagctaatcttaacgataccttgactttcaaagactgcgtgatcctggacatagagaattcctcaacctaccgtatacctgtacaggcctcggggaccggcagtacaatcgtgtcagacaaaccattcgcccctgaactcaacctcggcgctcacttttccctcgacacccattactaccatttcaaactaatcaataaggggcggaggatacaacaattattctggatgaatgactccttcagacctcaagctaagctgagcaaaaagggacgcgttaagaaaggccatgcacacgtgcagccccagcccagcgggtcccaggaacctcgggacccgcaaagtcccgtatttcatctgcatccagcctctatggaattgtatccagggcaagcgatagatgtgattctagaaggctattctgccacgccccgaatagtgaaggagaagctcgtgtgccacgccattatcggggctcagaaaggcaaatccctggtcatggctgtcaatattacatgtgagttcgttgctccgctcattcagctgagcaccaaacagctcatttaccgcctcgaaaaaaagccaaactctatcctgaagccagattatcagcctctcgcaattaagaatattagtacattaccagttaacctgctgctatctacatccggaccattcttcatctgcgagactgacaagtctttgctacctgcaacccctgagccaatcaagctggaaatcgacgaggagaagaacctattaatcaagtttgaccctagctatcgcaatgatctgaacaattgggtcgccgaggagattctggccatcaaatatgtcgaacaccctcagatcgactcactcgatctgaggggcgaggtccactatcccaatttgagcttcgagactaaagagctcgactttggatgtattcttaacgatacagagttaatacggtacgttactattaccaactgttcacctttagtcgtaaaatttcgatggtttttcctcgtaaacgatgaagagaatcagatcagattcgttactctgccaaaaaaaccatactccgccccagtatctcagatggaatccattcctgccacaagcgaagccgcctcgccgcccgccatactggtcaccgttgaatcacctgaaatggaccttaacgactttgtaaaaactgttctcgtggatgaggacgccagaccggaggagaaagaactaagaaagacaaaagcatcctccgtgatatccgatgtacggtgcccgtttcacggagaggaaagaatctatagctcgcaatcccaggtagaggaccaagaatcgctgcagacctgcgagcagaatgaaatgctcagcatcggcattgaagaggtttttgacatattgccactcttcggcgtgcttcaaccccactcctcacaccagatttcttttactttctatggccatgcaaacattattgcccaggcaaaggccctgtgcgaggtggaggaaggcccgacctacgagattaccctcaaaggtgaagcgtcccttgtcaactattccttcgataccaaagacatccattacggtctgcagttgttcgatcacgttaccgaaagagaaattaccttgaccaacatggggaaggtcggttttgagtttaaggtattgacagatcatcaatcctctccggacaatttattgcccggtgtccctcttatccttcctgtgagcggctttataagttcacatcaggagcaggtacttaaagtgtactatctgccaggcgtacccgaagtatttaagaggagtttccaaatccagatcgcccatcttgacccggagaatatcactctatccggcgagggaatctttccccagatctgcctggacctgccacgaaacttgaccgccaatgagaaatacgagatgtttttaaatcaggcccgcaagaacaccgacaaagagtacaacaagtgcgaaatgttagatcacttcgatattatcaccgaggaggtgcctgaagatgaacccgctgaagtgtctgctcacctgcaaatggaagttgaaaggttgatcgtgcagtcttatgttctcgagcaccaaaaaactacaactccagaccccatggacgatccgtgtttcagtcatcgctcacggcggaaacttgcaaagattcaactccctgagtatattttggattttgggtatatcatactgggggaggttcggacccacataattaagatcattaatacaagccatttccccgtttctttccacgctgacaagcgggtgctgcacgaaaccggattctctacggaacttgacagggtgaaaaacttaccacactgcgaaactgaaatatttgaggtgagatttgacccccagggtgcaaatctgcctgtagggtccaaagaggtcatcctgcctatcaaggtagttggcggaccaacagtgcatatttgcttgcaggccaaggtgactatccctactatgacattaagtagaggtaaagtagactttgctacaattcagtgcggccagtgcctcgtggaaactattcaactttccaatcacctccaggtcccctgcgagtggttcgtccagagccagaagcccgtggataaactagagaaacacatgcccaagtaccttcgtcaaaaactgagagcggagctaaagcccaagacccgcatttttgagattcagccgatttccggagtgttagatcccggagaaaaaagcaatgtacaagtgaaattcatgccgaaagaagagaagttttattcccagacccttgttttccagatcgctcagtcagcacagaaattgacactcctcgcccggggacaaggcctcgaaccacggctcgagttttcaccgagcgtactggatcttgggcccctcctgctgtgcgcgccgggagacgaggccgaggtcatcgttaagaacccctgcaatttccccatcgagttctactcccttgagttcgatcaacagtatctgattgaagagaaaatcctaagaaaacttaaaggatacgactcatataacaccctcctgctaccaccgcgcaacccaggcgaaaagctccctccagaattgtacgaatactttaaggaaattaagaagagtaaagaagagcagatgcgagcaaaatatctggaaaatctggcacaggagaacgaagaggaggatattactagcagcgaccagggcacaagcaatagcaccaaaaggacctcactcagcagaggaatctccgtgacaagcaatctcgaagagtggcacgccctcctggttgagtcaaaaacctacttggaggaagaggaggacgaggagtctctcgaaaaaatcatttttcagactgataagctgcagagtatagattcccactctatggaagaagttggcgaggtggagaataatcctgtatctaaagcaattgccaggcacctgggaattgatattagcgctgaaggccgcttagcgaaaaaccgcaagggcatcgccatcattatccacggtaccccactgtccgggaaaagtgcgaatgccgtgtcggttgcaaagtattacaatgcggcatgcttgtccattgacagcatcgtgctggaagcagtcgctaatagtaataatatccccggaataagagcgcgcgaactctgcattcgggcagccattgagcaatcagtcaaggagggcgaagaggctgcccaagaagcagccgtgggccaaaatgtcatcgggcagggacgcctctccaccgacacactgggcaaacttgccagcgagatgacattggttgctcccgagattaagcctggcaagtcagtacgcggatctgtggtcatcactaagagtaaggccgacagccatggaagcggtagtcagaaacagcaccactcgcatcagtccgaaacccctcagataagctcttcgcccctgccgccagggccaatccatagatggctcagtgtttctcctagcgtgggaggtgagacaggcctgatgagctgcgtgctccctgacgaactcctcgtccagattcttgcggagcggatccagctcagtgattgctacagaggcgtcgtatttgacgggctggacactctgttcgctcagaatgccgccgccgccctgctttgtcttctcaaggctattggatccagggagcacatctatattttaaacatggcacaggattacgcagcaatgaaggcccaagaaaaagcaaaaaaggaacaggaggaaagaaaacataaaggagcattagagaaagagaaggaacggcttcaaaacatggatgaggaggagtacgatgccctgactgaggaagagaaacttacgttcgatagaggaattcaacaggccctccgtgagcgcaagaaacgcgagcaggaaagattggcgaaggagatgcaggaaaaaaaactacaacaggagctggaacggcagaaagaagaggatgagttaaaaaggcgtgttaaaaaaggcaagcaaggacccattaaagaagagccccccatgaaaaagtcccaggcggctaataagcaagtacctcccctcactaaggtagacgtgaagatggaaacaatcgagcgcaagatctcagtgcgggagcaaaccatgtccgagaaggaggaacttaacaagaaaaagagaaacatgggagacgtttccatgcatggattaccgttggttcaggatcaagaggatagcgaaggcgacaatagcaaagacccagacaaacagctcgctcctaagttcaagacttatgaactgactttgaaggacgtacaaaacattctcatgtattgggataggaaacaaggggtgcagttacctcccgctggcatggaggaggcacctcacgagcctgacgaccagcgtcaggtgcctttaggcgggcgccgcggccgaaaagaccgagaacgcgaacggctggagaaagagagaaccgagaaagaaagactcgaaagggaaaaggccgaaagagaacggctggagaagctccgcgctctggaagaacggtccgactgggagggtgagggtgaggaggaccatgagggaaagaaagagaaagaccttggagtgccgtttcttgatatacaaactccagactttgaaggtctgtcctggaaacaggctctggagtcagacaagctgcccaagggcgagcagatcctagacattctaggcctgggagctagcggtccgccaatccctcccccagcgctgttctcaattgtgtcctacccggtgaaacggccacccttaactatgaccgatgatctcgaacactttgtcttcgtgatcccaccctctgaggacatctctctcgacgagaaaaaagagatggagatagagagtgacttcttggccactactaacacaaccaaggctcaggaagagcaaacctcttctagtaaaggaggtaaacaaaagatgaaggagaagatagaccaggtgtttgagatacagaaagataagcggcatatggccctcaaccgtaaggtgttgtcaggggaacccgcaggaaccatttcacagctctccgataccgacctggacaacttcaacggtcagcatagccaggagaagttcacccgcctgaaccacttcagatggatcgtccctgcgaatggagaagtgacccttcaggtccatttcagctcggatgaattcggaaactttgaccagacattcaatttcgaaattttgggcacgtgttgtcaataccagctgtactgccgcggaatctgcacatacccctacatctgccaggaccctaaggttgtgtttcctcaacgtaagatggacatgaagactaacgaagtgatattcaagaaatacgtgatgagcactgaaacttactattttggcccattgctgtgtggcaagtccagggacaaatacaaaagttctttgttcccgggtaacatggagacgttaaccattctgaacacctcgcttatggtggtcgaggccagcttctacttccaaaatgacgtcaaggcaaatacctatttcttggagccgaacaccatggtcttgaaaccaaacgagaagcaaatcctcaacgtttgggcctatcccacatctgtaggcgtgttcgaagactctattgtttgttgtattaatgataatcccgaacctgcgattttccaactgtcctgccagggaatcaggccagagctggagttagagcctcgtcagttgcacttcgatcgactgctgctccatcggcaggagagcagagttgttctgctgcggaatgtgacactgctccctgttgcctggcgtatcacttctctggaacacctgggggatgacttcacagtcagcctaatgcagggtactattcctcctgaagccgagtacggcttgcacctttacttccaaccgacgaagcctgtgaatatcaaaaaggccatcagattggaggtactagatgcagagaacctgttgggtgtggtgcagatcgagaatatcatggttttcgccgaggcctacgacatcgcacttgacatcaccttcccaaaaggagccgaaggggggctcgatttcgggatcgtccgcgtcactgaggaagccaaacagcccctgcaattaaaaaacagaggtaagtacgagatcgccttcagttttagtgtagactcagtgggaatctctacgccaaacataaattcaatgatatccgtccagcccaaaaagggctccctaacgccaactgagaagcctacaaacgtgcaggttttctttcacgcgaagaaggaagtgaagatcgagcaccagcccgtcctgaggtgtcagattattgaacctaacataagcgagggcggtgaaattatcgcctccatcccaattaaatttagcgcgaacgcagtatacagcaaatacaacatcaccccctcatctgtgattaacttcggcgctcttatctgcggtacccggaaaagtactacttttaccattgagaatcaaggagtgacagactttaagttcgctctgtataagctgacgggggaaagtccaattcaccagaagaaagcagccagtcatgtgagacatgccagaagccgcgagtcagagagtttctacaaaaccggcagttccagagccgcaaaattctccgacaccatccagaaggaggtaacaaccaccggtcaggcccggttcgcacatggcatgttcacagtgtaccccggtttcggcagtatcccatcaggcggtcaacaggtgataaacgttgattgtgtggcagacgcaatgggtaagtgcgaggagtttatcgcaattgatatctccggaagggaccctgccgtacatcccgctggcattctctacacacttctggccgaagcttgcctgcctgcatttgtcacagagaacaacgctcttatctttgaagagcatcaaatttgtaccagcgccaatctgcaccacatcttgcagacaatcgaatcaggaggtctattcgtggaggacgaaaacaaatttattttttgtaatgtgctggtgggccggcaggctaaagctcgatttaagatcagcaacgtagggaaaatcacttgcgacgtgaatattgttgtacgcccaatctcaaataagccctttgcacgtatcgtggatatctttgaggtggaaccttcaaaaatgtgtattgccagccactcacacgcgtttgccaccgtgtccttcacacctcaaattatgcagaactatcagtgcatatttgaagcaactctggacgggcttcctagtactctggcgaagtccagagggttggtgttcgatattgcgggagaaggcaatctgcctcgggtcaccgtcgtgagacccgtgctgcataaccaatatgggaaccccctgctcctttttaagcgactgttactcggccactcggagaagctaccactgatcctgaaaaacaacggcgtcctgccagctcagttgcacgtagatcttcaggacgagctaggtgtcttttccctgaagggccggcccacaacggcgtacatctacattacagaggagaacaagccacacgtcaaagccaaaaaagctcacacagcttctctggtggtgtctcctggagacactgctgagtttgacgtggtcttccattcacaaaaggtaggccggatgaggggcatcattcatctgtccgtgatcaacaaccagtacgaggagacatccatccatatggttggcgagggctacgaagacgacatcacacttgataacatacacggtctggtcgctcccacaagccaggaggatatatcaatatcggagttcacagaaatcattgaagacaatgatatggaagatctcgtagccgccgcactggtcgatcacatacagttcggagactgccatatcggacactcttacaacgctagtttcacagtgactaaccactctcaagtcaacctgattcgctttgaatggcccgtgtctgctacgatcgccttctcgccccagatggggcatctccatcccggttgcgccaaagatattgttgtaacgatgaaaagcgacgtccctattaatctgaagaatatgaggattagatgcaaattgtctcggatcatgttccaactgccagccgaccaggtcccagattgggatgatagaatgcacaccgtaaaatgggtcgacgtccctcggaacatgcccgggacatttacaaccaaaaggaaagttatcgaaactgaccctgagcctgcccatagtgtgctcgaagagaactatcaggagctgcaactgcagatttcagccaacgtagatttcgcgagttatcactgtcaagctcgggatgtgcgctttaaggagaccctggtatatcagacacgggtgttcgagttcgatgtgattaatagtggtagagtgcagctagagttctcttgggttagcgaggacaccagtaaagctgtctcatttgctaagccagatcaccagggatcagcccagaaggatcaactgtcccagggcaccatgcacacaggctccaccctggactccactatggaccactgggcagagggcagcccacagcccttcagtgtggaaccatcaagcggcattgtgcctgtcgggaaaattcaaaaatttaaagtcaagttcagcccccttgacatcggggacttcgagagcaacctgttctgtcagatacctaacctgccacctggggagcagggccccgtgctggtagctaagggtaggtccactctcccaatctgtcattttgacctgaaggactcagactacatctccgggcatcagcggaatcccgaactacgtggctcatcaggcggagcgctggaccccaacacccgcgtgatagagttcactacagtgggtataggcggtaagaacttgagaacatttaccattttgaaccccactaattcaacttacagcttttgctggatcagcgaggaaattgaaagcctgcagaaccctgctgcttttacatgtctgaccgagaagggattcattcatcccgagaagaaagccgagattgtgtttcaattcactcccttccaccttggaattactgagtcttcgtggaccttcttgattcccgaacataatattactgttccgtttcttcttgtggggaagactacggagcctctcatttctttaaacaaatcacacctaaacttctcatcactgttaatcggaagagaggctcgggagacggtacagataatcaacaaagaggagcagggtttcgacttttccttccaagataacagtcgctattccgagggattctcaaatagtctactggtctgtccaatggaagggtggatcccccccctctccaggttcccaattgatatatttttcacgccaaaacaggaaggggatgttaatttcaacctcatttgtaatgtcgagaaaaaggtccaccccgtgaccctcaatgtcaaggccgagggatacacgatgaacgtagagataaaatgcaaagatcgaacgggttctatcacacttctcacgccaaaccagacaaatattatcaatttttacgaggtggaacttaatgagtgtgttcaatgcgagttcaacttcatcaatactgggaaatttacatttagcttccaagcccagctttgcggctccaaaacactactacagtatctggagttttcccctattgattcaaccgtggacgtcgggcagtcggtgcacgctactctgagttttcagccactgaaaaaatgtgtcctgacagatctcgagctaattattaaaatcagccacggaccaacctttatgtgtaatatatccgggtgtgcagtgtctccagctattcacttttccttcaccagttacaattttggaacctgtttcatttaccaggcaggcatgcctccttataagcaaactctggtaataacaaataaagaggagactcctatgtcaatcgactgcctgtataccaacacaacgcatctcgaagtgaattctcgggttgacgtagtcaaaccggggaacaccctcgaaattcccatcaccttctacccgagagagagcattaattatcaagaattgatacccttcgaaatcaacggcctctcacagcaaacagtagagataaaggggaagggtacgaagatgaagatcctggtgctcgatcctgctaaccgcatcgtgaagctcggagctgtgcttcccgggcaggtcgtgaagaggactgtatccattatgaacaactccctggcccagcttacctttaatcagtcaattcttttcaccattcctgaacttcaggaaccaaaagtgttaacacttgcgccattccacaatataacgctaaagccaaaggaggtctgcaagctcgaagtgatcttcgctccgaagaaaagggtgccccctttcagcgaggaagttttcatggaatgcatgggcctattacggcctctgtttttgctgagtggctgttgccaggccttggaaataagcctggatcaggagcatatcccgtttggaccggtcgtctaccagacacaggccactagacggatccttatgatgaataccggtgacgtgggcgccaggttcaagtgggacattaaaaaatttgagccgcatttctcaatttctcccgaggagggatatattacatcgggaatggaggtgtcgtttgaggtcacctatcatcctaccgaggttggcaaagagtccctgtgcaagaatattctttgctacattcaaggaggttcgccactctctctgacccttagcggtgtttgtgtgggcccaccggctgtcaaagaagttgtcaactttacatgccaggtgcgtagcaagcacacacagacgatactgctaagcaatcgcaccaatcagacttggaatcttcaccccatatttgagggagagcattgggagggcccagagtttattaccctggaggcccatcaacagaacaagccgtacgagattacatacagacctcggactatgaatctggagaaccgaaagcaccagggcaccctattttttccattgccagacggcacgggctggctgtacgcccttcacgggacgtctgaattgcctaaggctgtggcaaatatatatagggaggtcccctgcaaaactccgtatacagaactcctgcccataactaactggttgaacaagccacaacggttccgagtgattgtggagatccttaagccggaaaaaccggacctgtccattaccatgaaggggttagactacatcgatgttctgagtgggtcaaaaaaggattacaaactgaattttttctcccacaaggagggaacatacgccgccaaggttatctttcgtaatgaagttactaatgaatttctttactacaacgtgtcatttcgagtcatcccttctgggattattaagactatcgagatggtgactcctgtcaggcaagtagcaagtgcatctatcaaactcgaaaatcctcttccctattctgtaacgttttcaacggaatgtaggatgcccgacatcgcattgccaagtcagttcgttgtcccagcaaactccgagggcactttctccttcgagttccagcctctcaaagcgggcgaaaccttcggtcggttgacgctgcacaacactgatctcggctattaccagtacgagctctacctcaaagccaccccagccctgccagagaagccagttcatttccagacagttttgggcagcagccaaatcatcctggttaagtttattaattatacccggcagcggaccgaatattactgtcgaacagactgcaccgactttcatgctgagaagctgattaacgccgcccccggcggtcaggggggtactgaggcctctgtcgaagttctgttcgaaccaagccaccttggagagacaaaggggattctgatactgagcagcctcgctggcggcgagtatatcatcccactgtttggcatggctctgccacccaagccccaaggaccgttctccatccgggcagggtacagcatcatcattccatttaagaacgtgttttaccacatggtgacgttcagtattatcgtagataaccctgcttttacaattcgcgccggcgaatcagttcggccaaaaaagatcaacaatatcacagtgtcttttgagggtaatccgagtgggtcgaagacccctatcaccacaaaactgaccgtgtcatgtcccccaggcgagggatctgagactggggttaaatgggtatactacctgaaaggaataactctctag

SEQ ID NO: 120292 - DNA, 3054 bp, synthetic construct
  misc_feature 1..3054: note = Description of Artificial Sequence: Synthetic coding sequence
  source 1..3054: mol_type = other DNA
atgaccagccgcagactagaagagtccatgggagcagtccagatgggtctcgtgaacatgttcaaggggtttcagtcaaaggtcctgccccctctgtctcctaaagtggtcaccgaggaagaagtgaatagaatgctgacacctagcgaatttctgaaggagatgtctctgacgaccgaacaaagattagccaagactcgccttatgtgcaggcctcagataatcgagctgctggacatgggcgaaaccacccatcaaaagttctccgggattgacctggatcaggccctgttccagccatttccatctgaaatcatattccagaattacacaccatgtgaagtctatgaggtgcctcttatcctgaggaacaacgataaaatccctcggctggtcaaggtggtggaggagtcgagtccctatttcaaagtaattagcccaaaagacataggtcataaggtcgcccctggcgttccatcaatctttcgtattctttttaccccagaagaaaacaaagactacgcccacacgttgacttgcgtcaccgaacgagaaaaatttatcgtgcccattaaagcccggggagcaagggcaatcctggactttccggacaagcttaatttctctacatgcccagtaaagtatagcacacaaaaaatcttattagtcagaaatattggcaataaaaacgcagtattccatattaaaacttgccgtcctttttcaatagagcctgccattggaaccttaaacgtgggggagtctatgcaattagaggtcgaattcgagccacagtccgtgggcgaccacagcggaagactcattgtgtgttacgacactggagagaaagtgttcgttagcctgtatggtgcagctattgatatgaacattcgactggacaagaactcacttacaatagagaagacatacattagtctggctaaccagcgcacaattactattcacaataggtcgaacatcattgcacattttctgtggaaggtctttgccactcagcaggaggaggatagggagaagtacagagcttgcgatgatttaataaaggaggaaaaagatgagaccgacgagttcttcgaagaatgtattacagacccccttctgagagagcacttatctgtgctgagccgtacctttgctaaccagcggaggctggtccagggagacagtaagctcttcttcaataatgtgttcacagtggagcccttggagggcgacgtatggccaaactcctctgctgaaatcaccgtttacttcaatcccttggaagcaaaactgtatcagcagacgatctattgtgacatcctgggcagggagattcgactgcctctccgcattaagggtgaggggatgggccccaaaatccactttaatttcgagcttttagatattggaaaggtcttcacaggctcagcccactgctacgaggccattctttataataagggcagcatcgatgctttattcaacatgacaccaccgacaagtgccctcggcgcttgtttcgtgttcagccccaaggagggtattattgagccctctggcgttcaagcaattcagattagcttcagcagtaccatcctgggtaatttcgaagaggaatttctggtgaatgtgaacggctcacctgagccagtaaagctgaccattaggggatgcgtcatcggaccgacattccattttaatgtaccggccttacatttcggggacgtgtcctttgggtttcctcacacgctcatttgtagcctgaacaatacttccttgataccgatgacttataagctccgaatacccggagacggcctgggccacaagtcgatcagttactgtgaacagcacgtggactataaacgccccagttggacgaaagaggagatttccagcatgaagcctaaagaatttacgattagcccagattgcggaactatcaggccgcagggattcgcggccatccgcgtcactctatgttccaataccgtccaaaaatacgagctcgcattggttgtagacgttgagggcatcggtgaagaggtcctcgcactcctgatcaccgcccgctgtgtcgtgccagcccttcatcttgtcaatacggaagttgacttcggtcattgcttcctgaagtacccttatgagaagacacttcagctggccaaccaggacgacctgcccggattctacgaggtacaaccccaggtctgcgaagaggtgcctactgttctcttcagttcccccaccccatcgggggtgattagtccgagtagcaccattcacattcccctcgtgctcgaaacgcaggtgactggggagcacaggtcgacagtttatataagcatcttcggaagccaggaccctcctttggtgtgtcatctcaagtccgccggtgaaggtcctgttatctatgtgcatcccaaccaggtcgactttgggaatatttatgtgctcaaggattctagtagaattctaaatctctgtaatcaaagtttcattcctgcattttttcaggctcatatggctcataaaaagtccctgtggactatagaaccaaatgaaggcatggtgccacccgagacggatgtccagttagctttgaccgctaatctgaatgacacgctgaccttcaaagactgtgtaatattggatatcgagaacagctctacgtaccgcatccctgtgcaggcaagcgggactggaagtactatcgtcagcgacaagcccttcgcaccagagttgaacctcggggcacattttagccttgatacccattattatcactttaagctgataaataaaggccggaggatccagcagctgttttggatgaacgacagctttcgacctcaagcaaaattgtctaagaaaggacgtgtgaagaagggacacgcccatgtgcagccacagccatccggttcacaggagccaagagaccctcagtcccccgtatttcacttgcatcctgcatccatggaattgtacccgggccaggccattgatgtgattctggaaggttattccgcgaccccccgcgtgaggggctag

SEQ ID NO: 120293 - DNA, 2223 bp, synthetic construct
  misc_feature 1..2223: note = Description of Artificial Sequence: Synthetic coding sequence
  source 1..2223: mol_type = other DNA
atgactagtagaaggctggaagagagcatgggtgccgtccagatgggcctggttaatatgtttaaggggtttcagtctaaagttctgcccccgctctctcccaaagtcgtgaccgaggaagaggtgaacagaatgctgacaccgagcgagttccttaaagaaatgagcctaactacagagcagagactggcaaaaaccagactcatgtgcaggccacagataattgagctcctggatatgggggagaccacgcaccagaagttctccggcattgacctggatcaggccttgttccaaccatttccgtctgagatcatattccagaactacacaccctgcgaggtctatgaggtgccgttgatacttcggaacaacgataaaataccaagactggtcaaagtagtcgaagaatctagtccctattttaaggtgatcagtcctaaagacataggacacaaagtggcaccaggtgtgccgagtatcttccggatcctctttacccctgaagagaacaaagattacgctcacaccctaacatgcgtaacagagcgtgagaaattcattgttcctatcaaagcgagaggtgcgcgggccattctcgattttcctgacaagctgaattttagcacatgcccagttaagtactccacacaaaaaatcttgctcgtgcgcaatattggcaacaaaaatgccgttttccatattaaaacctgccgcccctttagtattgagcctgccatcggcaccttaaacgttggagagagtatgcagctcgaagtggagttcgagccgcaatctgtgggcgaccattccggacggctaatcgtatgttacgacacaggagagaaagtgttcgtgagcctgtacggtgccgccatagacatgaatataaggctggacaagaactctttgactatcgaaaaaacctacatctctctggcaaaccagcgcacaattaccatccataatcggagtaatataatcgcacatttcctatggaaggtcttcgcaacacaacaggaggaggacagagagaagtacagagcctgcgatgacctgattaaagaggagaaggacgaaaccgacgaattttttgaagaatgcattacggaccctttgctgagagaacatttgtctgtcctgtccagaactttcgcaaatcagcggcgcctggtacagggagattcaaaattgtttttcaacaacgttttcactgtagagccccttgagggagatgtgtggcccaatagctctgctgaaatcaccgtttacttcaatcctctggaggcaaaactgtatcagcaaacaatctattgtgacattctgggtcgcgaaatacggctaccactaagaatcaaaggtgaaggcatgggtccgaaaatccattttaacttcgagttactggatatcgggaaagtattcactggtagcgcccactgttacgaggccattctttacaacaagggctctattgacgccctgtttaacatgaccccacctacatcagcactgggggcttgtttcgtgttctcacccaaggaggggatcatcgaacccagcggcgtgcaagctatccagatcagcttctcatcaacaatcctggggaacttcgaagaagaattcctcgtcaacgtcaacggttcgcccgaacctgtgaagctcactatcaggggctgtgtcatcggcccaacattccattttaacgtcccggcactgcattttggagatgtgtccttcgcgactcaggaactcagggaccctcaggtgctgatcccattccagcggttcccacataccttgatatgttctctgaacaataccagtctgatacctatgacatacaaactccgcattccaggcgatggcctggggcacaaatccatttcctattgtgagcagcacgttgactacaaacgaccgtcctggacgaaggaagagatctcatctatgaaacctaaagagttcacgatttcaccagactgtggcaccattagaccacagggatttgccgctatacgcgtaactctgtgtagcaacactgttcagaagtacgagttggctctagtggttgatgtggaggggattggtgaggaagtgttggcacttctgatcactgccagtgcccccgaactgtgtaatcggaaagtaatgctgagcgttctgcagtggaagattcatcgtgctaaacgatccctgccacgcgataccgtcgctgtgacatag

SEQ ID NO: 120294 - DNA, 3645 bp, synthetic construct
  misc_feature 1..3645: note = Description of Artificial Sequence: Synthetic coding sequence
  source 1..3645: mol_type = other DNA
atgactagtaggaggctcgaggaaagcatgggcgccgttcagatggggctggtgaacatgttcaaagggttccaatctaaagttctcccccccctgagtcccaaggttgttacagaggaggaagtgaacaggatgctaactccttccgaattcctgaaagaaatgtccctcaccaccgaacagcgactggcgaagactagattgatgtgtcggccccaaattatagaactgctggacatgggagaaaccacgcatcagaagttctctggaattgacctggatcaggccctgttccagccattccctagcgaaataatcttccagaattacacaccttgtgaggtctatgaggtcccactgatactgcgtaacaatgataagatcccacgactcgtaaaggttgtggaagaaagctcgccttacttcaaagtgatctctcccaaagacatcgggcataaagtggcacctggcgtccccagcatatttcgaattctgtttaccccggaggagaacaaggactacgcgcacacactcacttgtgtcactgaaagagaaaaatttattgtacctatcaaagcaagaggcgccagggccattctcgattttcccgataagctgaacttttccacttgtcctgtcaaatactctacccagaaaattctgctggtcagaaatattggaaacaagaacgccgtctttcatattaagacgtgccgcccgttctctatcgagcccgccatcgggactttgaacgtgggagaatcaatgcagttggaagtggagttcgaacctcagtcagtaggagatcactccggccggctgatagtgtgttacgacactggagaaaaggtattcgtctctctgtacggagctgcaatcgacatgaacattcggttggataagaactctctgacgatcgaaaagacttatatatctctggcaaatcagcggacaatcaccatccataacagaagtaacataattgcccactttctgtggaaggttttcgctactcagcaggaagaggatcgggagaagtatcgggcctgtgacgacctgatcaaagaggagaaagacgagaccgatgagtttttcgaggaatgcataacagatccattgttgcgggaacacctttcagtgctgtcacggacctttgctaatcagcggaggctggtgcaaggcgattctaagctcttctttaataatgtgtttaccgtagagccgcttgaaggcgacgtgtggcccaattcctctgctgagatcacagtgtacttcaacccactggaagcaaagttgtatcagcagacaatatactgtgacattctaggaagagagatcagactgccgcttaggatcaaaggtgaaggaatgggccctaaaattcacttcaacttcgagctgctcgacataggcaaagtcttcaccggatctgctcactgctacgaggctatcctgtacaataaaggtagcatcgatgcgctgttcaacatgactcctccaacttcggcacttggcgcatgtttcgtgttctcgccaaaggaagggattatcgagcctagcggagttcaagctatacagatctcctttagttccacaattctgggcaatttcgaggaagagtttctggtaaacgtgaatggctcccctgaaccagtgaagctcacaatccggggctgtgtcattggtcccaccttccattttaatgtgccagccttgcacttcggcgatgtcagtttcgggtttcctcacacgctgatatgttccctgaataacacttcccttatcccaatgacatataaactgagaatccccggggatggactcggacacaaatctatctcttattgtgaacagcacgtagactataaacggcctagctggactaaggaagaaatctcgagcatgaagcctaaagagtttactatcagtcctgattgtggcaccattcggccccaagggttcgccgccatacgtgttaccctctgtagcaataccgtgcagaagtatgaacttgctctggtggtggacgtcgagggcataggggaggaggtcctggccctactgataacggctagatgtgtcgtcccggccctccaccttgtaaatacagaggtcgatttcgggcactgtttcctcaaatacccgtacgagaaaactttgcagttggcaaatcaggatgacctcccaggattttatgaagtgcaaccacaggtgtgcgaggaggttccaactgtgctattttcttcgccaacaccttcaggagtgatttctcccagcagcacaattcacatccctctggtgcttgaaacgcaggtcaccggcgagcatagatcaactgtctacatttccattttcggttctcaagatcctcctttggtatgtcatctgaaatcagctggtgaggggcccgttatttatgtccatccaaaccaggtggatttcgggaacatctatgtcctgaaagactcatctcgtatcctcaacctgtgcaaccagtcattcatcccagccttcttccaggcccacatggcccacaagaagagtctgtggacaatagagcctaatgaagggatggttccccctgagaccgatgtgcagctggcgcttacagcgaacctgaatgacaccctaacattcaaagactgcgttatactagacattgaaaattcttctacgtaccgcatccctgtgcaagcttcaggtacaggctccaccatcgtgagtgataagcctttcgctccagagctcaacttgggcgctcatttcagtctggacacgcactactatcattttaaactcataaacaaggggaggcggattcagcagcttttttggatgaacgattcctttcgcccccaggcaaagctgtcgaagaaggggcgggtgaagaagggtcacgctcatgtgcaaccccagccatccggttcacaggagccccgtgacccccagtctccagtgtttcatctacacccagccagtatggagctttacccagggcaagcaattgacgtcatcctcgaggggtatagtgccacacctagaaaacccaatagcattctcaaaccggactatcagcccctggccattaaaaacatttcgaccctgccagtgaacctgctgctgtcgacaagcggcccattcttcatctgtgagacggacaaatcactgttgccagccactcctgagcccataaagctggaaattgatgaagagaaaaacctgcttatcaaatttgatccctcctatcgtaacgaccttaataattgggtagcagaggagatccttgccataaaatatgtggagcacccccaaatcgattctctagatctccgcggggaagtccactaccctaacctgtccttcgagacgaaggagcttgacttcggctgtattttgaatgacaccgaactcattagatacgtcacgattacaaactgttccccccttgttgttaagtttagatggtttttcttggtgaacgatgaagaaaatcagatccgattcgtcacactacccaagaagccctactcagcaccagtttcgcagatggagtccattcctgccacatccgaggccgcctcccccccagcaattttggtaaccgtcgaaagccctgagatggacctgaacgattttgttaagtag

SEQ ID NO: 120295 - DNA, 3054 bp, synthetic construct
  misc_feature 1..3054: note = Description of Artificial Sequence: Synthetic coding sequence
  source 1..3054: mol_type = other DNA
atgactagccggagactggaggaatccatgggggccgttcagatgggcctcgtaaatatgttcaaaggcttccagagcaaggtactgcctcccctctctcctaaagtcgtaaccgaggaggaagtgaatcgcatgctcacaccgtcagaattcctgaaggaaatgtccctgacaactgaacagagactggctaaaaccagacttatgtgtcgcccacaaatcattgaattgctggatatgggggaaacgacccaccagaagtttagcggcatcgacctcgatcaggcattgttccagccatttccttccgagattattttccagaactatacgccctgcgaggtgtatgaggtccctctgatacttaggaataatgataagattccgcgcctggttaaagtcgtcgaggaatcttctccttatttcaaagttatttcccccaaggacatcggacataaagtggcccccggggtgccaagcatcttccgaatactgtttacgcccgaagagaacaaggattacgcccatactctgacctgcgtgacagagagggagaagtttattgtgcccatcaaagctcgcggggccagggctatcctggatttcccggataagctgaatttttcaacctgccctgtgaagtatagtacccagaagatcctgctggtcagaaatataggaaataagaacgcagtttttcatatcaaaacatgccgacccttttccatcgaacccgccataggaaccctgaacgtaggcgagtcaatgcagctggaagtcgaatttgaacctcagtccgtgggagaccactccggccgcctcatcgtgtgctacgatacaggagagaaagtgttcgtgtctttatatggcgcagccatcgatatgaacatacggctcgacaagaactcgctcacaatcgagaaaacatacatctcgcttgccaaccagagaacgatcacaatccataacaggagcaatattatcgctcacttcctgtggaaggtatttgccacgcagcaggaggaagaccgggaaaagtaccgggcttgtgacgacctcatcaaagaggagaaggatgagacagacgaattttttgaagaatgcattaccgatccccttctgcgtgagcacctaagcgttttatcacgtacctttgccaaccagcggaggctagttcagggggactccaaactatttttcaacaacgtctttaccgtggagcccctggaaggagacgtgtggcctaactcatctgccgagatcactgtttacttcaatcctcttgaggccaagctctatcaacaaacaatatactgcgacatcctcggaagagagattcgcctgcctctgcgtatcaaaggggagggtatgggacctaaaatacacttcaactttgagctcctggacataggcaaagtttttacgggctcagcccattgctatgaggctatcttatataacaaaggttctattgacgccttattcaacatgactccccccacctccgcgttgggcgcatgcttcgtgtttagccctaaagaaggtatcatcgagccgtctggcgttcaagccatccagatctcgttctcctccacaatcctaggcaactttgaggaagagttcctcgtgaacgtgaacggatccccagagccggtgaaattgaccatcagaggatgcgttattgggccaactttccatttcaacgtgccggcactgcattttggcgacgtgtcctttgggtttcctcacaccttaatatgttctttaaacaatacaagcctgatccctatgacatataaactccggattccaggcgacggcttgggccacaaatcaatctcgtactgcgagcagcacgtggattacaaacgcccctcatggactaaagaagagataagtagcatgaaacctaaagagttcactatcagcccagactgcggaactatacgtccacagggtttcgctgctatcagggtcactttatgctctaacacagtacagaagtatgagctcgccttagtggtggatgttgagggcattggagaggaggtgttggcccttctgattaccgccagatgtgtggtgccagcactgcacttggtcaacacggaagtcgacttcgggcactgcttcctgaaatacccctacgaaaaaacactgcagctcgccaatcaagacgacctgcctgggttttatgaggtacagcctcaggtctgtgaggaagtgcccacggtgctcttctccagtcccactccgtctggcgtgatttcacccagctcaaccatccacattcccttagtgttagagacccaggtaactggcgaacataggtctactgtgtacatttctatattcgggtcacaagatcctcctctggtgtgtcacctgaaatcagccggggaaggacctgtgatctatgtgcaccctaatcaggtcgactttgggaacatctatgtcctgaaggacagctcacgtatcctcaacttatgcaaccaatcgttcattcctgcctttttccaggcccatatggcacacaaaaagagcctgtggaccatcgaacccaatgaggggatggttccaccagaaacagatgtccagctagccctgacagccaatctcaacgatacactgactttcaaagattgcgtgatacttgacatcgagaactcctctacctatcgcatccctgtacaagcctctggaactggctctaccatagtgtctgacaagccttttgcccctgagcttaacctaggcgcgcacttttctttagatacacactactatcactttaagcttattaacaagggccgacggattcaacagctcttctggatgaatgattctttcaggccccaggcaaagttgagcaagaagggacgcgttaagaagggccacgcacacgtacagcctcagccatcggggagccaggaaccccgggatccacagtcccccgtttttcacctccaccccgccagcatggaattgtacccaggacaggccatcgacgtgatcttagagggatattccgctactccacgcgttaggggctag

SEQ ID NO: 120296 - DNA, 822 bp, synthetic construct
  misc_feature 1..822: note = Description of Artificial Sequence: Synthetic coding sequence
  source 1..822: mol_type = other DNA
atggccacctgggacgaaaaagccgttacccgacgcgcaaaggtggcacccgccgagcgcatgagtaagttcttacggcacttcactgtggtgggcgatgactaccacgcctggaatattaattataaaaaatgggagaatgaggaggaggaagaggaggaggagcagccccccccaacccccgtgagcggggaggaggggagagctgccgcccctgatgtcgcaccggctcccgggccggcacctagggctccgttagattttaggggaatgctgcgaaaactgttcagctctcaccgtttccaggtgattatcatttgtctggtggtgttggatgctttactcgtccttgcagaactcattctagatctgaagattatccagcccgacaagaataattatgccgccatggtcttccactacatgtccatcacaatcctggtcttcttcatgatggagattatcttcaaactattcgtgttcaggctcgaattctttcatcataaattcgaaatactcgatgctgtggtggttgttgtgagttttatcctagacatcgtgctcttgttccaagaacaccagtttgaggcgctgggcctcctgattttgctcagactatggcgcgtggcccgtatcatcaatggtataataatatccgtcaagactcggagtgagagacagctgttgcgtttaaagcagatgaatgtacaattggctgccaagattcagcacttggagtttagctgctccgagaaggagcaagaaatagaacgccttaataagctgcttaggcaacatggcctcctgggggaggtgaactag

SEQ ID NO: 120297 - DNA, 822 bp, synthetic construct
  misc_feature 1..822: note = Description of Artificial Sequence: Synthetic coding sequence
  source 1..822: mol_type = other DNA
atggctacttgggacgaaaaagcagtgacccgtcgtgctaaagtagctccagccgaacggatgagcaaattcctgagacatttcaccgtggtgggggatgactaccacgcgtggaatatcaattacaaaaagtgggaaaatgaagaagaggaggaggaggaggagcagccaccacccactcccgtgagcggagaagaaggccgtgctgccgcccccgacgtcgcccccgccccggggcctgccccgagagccccgctggacttccgcggcatgctgcgaaagctgtttagctctcatcggttccaggttattattatctgtctggtggtgctggatgccctcctcgttttggcagagctaatactcgacctgaagataatccaaccagacaaaaataattatgccgcgatggtattccattatatgagtatcacaatccttgtgttcttcatgatggaaataatttttaagctgttcgttttccggctcgaattcttccatcataagtttgaaatcctcgacgcagtcgtggtggtcgtgtcatttatcctggacatcgtgctcctctttcaggaacaccagttcgaagcactgggtttgctaatcctgctgaggctttggcgggtggcccgtatcattaacggcattattatttcggtgaagacgcgtagtgaaaggcaattactgcgattgaagcaaatgaacgttcagctcgccgccaagattcagcacctcgaattttcgtgctctgagaaggagcaggagatcgaaagattaaataaactcctgcggcagcacgggttgctcggagaggttaactag

SEQ ID NO: 120298 - DNA, 237 bp, synthetic construct
  misc_feature 1..237: note = Description of Artificial Sequence: Synthetic coding sequence
  source 1..237: mol_type = other DNA
atggctacttgggatgagaaagccgttacccgccgggcaaaggtggccccagccgaacgcatgagtaagtttctgaggcattttacggtcgtcggggatgattaccatgcgtggaatattaattacaagaagtgggaaaatgaggaggaagaagaagaggaggaacagccgccacctacacccgtgagcggcgaagagggtagggcagctgctcccgacgtagcacccgccccctag

SEQ ID NO: 120299 - DNA, 900 bp, synthetic construct
  misc_feature 1..900: note = Description of Artificial Sequence: Synthetic coding sequence
  source 1..900: mol_type = other DNA
atggaagagctgttgccagatggtcagatctgggcgaacatggatccagaggagagaatgcttgctgccgccactgcctttactcacatctgcgccggacagggcgaaggagatgtgaggagggaggcacagtcaattcagtacgacccttactccaaggccagtgtggctcctggtaagagacctgctctgcctgtgcagcttcagtacccccatgtggaaagcaatgtgcctagtgagactgtgtccgaagcatcccagagactccgtaagccagtcatgaaaaggaaggtgttgcggagaaagccagacggcgaagttttggtgacggacgaaagtatcatcagcgaatcagaaagcggaactgaaaacgatcaggatctttgggacctgaggcagcgtctcatgaacgttcagttccaggaggacaaggaatcctccttcgatgtgtcccagaagttcaatctgccacacgagtaccaggggatcagccaggaccagttgatctgcagtctccagcgtgagggtatgggctccccggcatacgagcaggacctgatagtggcttccagacccaagagctttattctccctaaactggatcagctgtcccgcaatcgcggtaaaaccgatcgtgttgcccgatacttcgaatataaacgagattgggatagcatcagactacctggagaggaccatcggaaggagttgcggtggggggtccgtgaacagatgctttgtagagccgagcctcagtccaagcctcaacacatatacgtgccaaacaattacctggttcccactgaaaagaagaggagcgccttaagatggggggtaagatgcgatcttgccaacggggtgattccaaggaagctgccttttccattaagccccagttag

SEQ ID NO: 120300 - DNA, 900 bp, synthetic construct
  misc_feature 1..900: note = Description of Artificial Sequence: Synthetic coding sequence
  source 1..900: mol_type = other DNA
atggaagagttgctgcccgatggccaaatctgggccaatatggaccctgaggaacgaatgcttgccgcagccacagcctttacacacatttgcgctggacaaggagagggggacgtccggcgggaagcgcagagtatccagtatgacccctacagtaaagcttctgtggctcctggtaagaggcctgcactccctgtccagctacagtatccacatgtggaaagcaacgttcccagtgagactgtcagtgaggcatcccagcgtctgcgcaaacccgtcatgaagagaaaggtactgcggaggaagcctgacggagaggttctcgtgaccgacgagagcattatatctgaatctgagagcgggaccgaaaacgaccaggacctttgggacctgagacagcggctgatgaatgtgcagttccaagaggataaggagagctccttcgacgtaagccagaagttcaatctgccacatgagtatcagggcataagccaggaccagttgatttgttctttgcaacgggaaggtatgggtagccccgcatacgaacaggacttgatcgtagcgtcccgccccaaaagttttattctgccgaagctggatcagctaagtcgcaaccgggggaagacggatagggtggctcgttatttcgagtataagcgagactgggatagcattaggctgcccggtgaggaccacagaaaggagctgaggtggggtgtcagggagcagatgctgtgccgtgccgagccacagagcaagccacagcacatctatgtgccaaacaattacctggttccaacagagaaaaaaaggagcgcccttaggtggggagtgcggtgcgatctcgctaacggggtgatcccaagaaagctgcccttcccactgtctccctcatag

SEQ ID NO: 120301 - DNA, 900 bp, synthetic construct
  misc_feature 1..900: note = Description of Artificial Sequence: Synthetic coding sequence
  source 1..900: mol_type = other DNA
atggaggaactactgcctgatgggcaaatctgggccaatatggaccccgaagagcggatgcttgctgctgccacggcctttacacatatttgtgcaggccagggggagggagacgtgcgtcgcgaggcacaatccattcagtacgatccgtatagtaaagcctctgtcgcacccggtaaacgccccgccctacccgtgcagctgcagtatccccacgtagagtctaatgtcccctccgagaccgtttctgaagcttctcagaggctgcgcaaaccagtgatgaaacgaaaagtgctgaggcgaaaacccgatggggaggtgcttgtgactgacgagagcattatttcggagtcagagtcaggtaccgagaacgaccaagatttatgggatctcagacagcggcttatgaatgtgcagttccaagaggataaagagtcctcatttgatgtgtctcagaagttcaacctgccccatgagtatcagggcatcagtcaagaccagctaatctgtagccttcagagagaggggatgggatcacccgcctacgagcaggacctcattgtggcctcccgaccgaagtcgtttattctgcctaagctcgaccaactgagtcggaaccgcggcaaaaccgatagggtggcccgctacttcgagtacaagcgggactgggatagcatccgcttacctggagaggatcatcgcaaggagctcagatggggtgtccgggaacagatgttgtgccgcgctgagccgcaatcaaaaccccagcacatttatgtacccaacaactatctggtgccaacagagaaaaagaggagtgccttgcggtggggggtccgatgcgatctcgccaacggcgtcatccctcgaaagctacctttccccctcagtccttcttag

SEQ ID NO: 120302 - DNA, 1113 bp, synthetic construct
  misc_feature 1..1113: note = Description of Artificial Sequence: Synthetic coding sequence
  source 1..1113: mol_type = other DNA
atgctccctagactgatttgtatcaacgactatgagcagcatgcaaagtctgtgctccctaaatcgatttacgactactacagaagcggggcaaacgacgaagagaccctcgcagacaatatcgcggcattcagccgctggaagctgtacccaaggatgctcagaaacgtggccgaaacagacctgagtacctcagtcctggggcaaagagtgagtatgcccatatgtgtgggcgccacggctatgcaaaggatggcccacgtcgacggcgaacttgcgacagtcagagcctgtcagtcattaggaactggtatgatgttgtcatcatgggctacctcatctatcgaagaggtggccgaggccggccctgaggccctgcggtggctccaactttacatctataaagatagagaggtcactaagaaactggtccggcaggccgagaagatggggtacaaggccattttcgtcactgtagatactccctatttggggaaccgcctggatgatgtgagaaataggttcaagctgcccccacagctgcgcatgaagaacttcgagacttcaacgttatccttttcacctgaggaaaacttcggcgatgattcgggtctggcagcctatgttgcaaaggcaatcgaccccagtatctcgtgggaggacattaaatggctccgccgactgaccagcctgccaatcgtggccaaagggatcctgcgcggggacgatgcacgagaagcagtgaagcatgggctcaatgggattctagtatccaaccacggagctcgacaactggacggagtgcctgcgacaattgacgtactgcctgagatagtggaggcagtggaagggaaagtggaggtgttcctcgacggcggagtgcgcaagggcacggatgtactcaaagccctcgccctcggggcaaaggctgtttttgtggggcgtcccatcgtgtggggactggcattccaaggagagaaaggggtccaggatgtgctggagatcctgaaggaggagtttaggctcgcaatggccctgtccgggtgccagaacgttaaggtaatcgataaaaccttggtcaggaagaatcccctggcagtcagcaaaatatag

SEQ ID NO: 120303 - DNA, 1056 bp, synthetic construct
  misc_feature 1..1056: note = Description of Artificial Sequence: Synthetic coding sequence
  source 1..1056: mol_type = other DNA
atgtccctggtgtgtctgacggacttccaggcccatgccagagaacagcttagcaagtcaaccagagacttcatcgaggggggggcagatgattcaatcacccgcgacgacaacatcgccgcatttaaaaggatacgcctcaggcccagatacctgcgggatgtatcggaagtggacacgaggactactatccagggcgaagagatctctgcccctatctgcattgcccctactgggttccattgtcttgtgtggcctgacggcgagatgagcaccgcccgtgccgcccaggccgccggtatttgttacatcacctccacctttgcttcttgtagtctcgaggacattgtgatcgctgcgcccgagggacttagatggttccagttgtacgtccatccagatctgcaactgaataaacaactcatccaaagagtcgaaagtcttgggttcaaagcactcgtaatcacgttggatacgcccgtgtgtgggaaccgtcggcatgacattaggaatcagctgaggcggaatctgacacttacagatctgcagtcccccaagaaggggaatgcaattccctattttcagatgactcctatctccacatcactgtgctggaatgacttgtcttggttccagtccataaccaggttacccatcatccttaaaggcattctgaccaaagaggatgccgagctggcggttaagcacaatgtgcagggaatcattgtaagcaaccatggtggccggcagctggacgaggtactcgcgtcaatcgatgctctcaccgaagtcgtggccgctgtcaagggcaagattgaggtatatttggacggaggtgttaggactggtaacgatgtgctgaaagctttagcacttggggccaagtgcatctttttggggaggcctattttatggggtcttgcttgtaaaggcgagcacggcgtcaaggaagttcttaatatactgactaatgaattccacactagcatggccttgacagggtgtaggtctgttgctgaaatcaacaggaatctcgtgcagttttcaagattgtag

SEQ ID NO: 120304 - DNA, 1095 bp, synthetic construct
  misc_feature 1..1095: note = Description of Artificial Sequence: Synthetic coding sequence
  source 1..1095: mol_type = other DNA
atggaggataaaatgtggagtgagtgtgaaggcccggagatgagcttggtttgcctgactgatttccaggcccacgcccgagaacagttgtccaagtctacgcgggattttatcgagggaggcgccgacgactccataacccgcgacgacaacattgctgcctttaagcgtatacggctgaggccgcggtatcttcgtgacgtgtcagaggttgacaccaggacgacaatacaaggagaagagatctccgccccgatctgcatcgctccaacgggcttccactgtctggtctggcccgacggtgagatgagcactgcgagagctgctcaggccgccggtatatgttatatcacatctacttttgcctcatgctctctagaagatatcgtcatagcggctcccgagggactgaggtggtttcagctttacgtgcatcctgacctccagctcaacaagcagctcatccaaagggtggagtcacttgggtttaaggccctcgtcattacactcgatacacctgtctgcggaaacaggaggcacgatattcgcaaccaactcaggcgcaacctgactttaaccgacctacagagccccaaaaagggtaacgccatcccctactttcagatgacccctattagcacctcgctgtgttggaacgacctgagttggtttcagagtatcactagacttcccatcatcttgaaggggatcttaaccaaagaagacgctgaactggctgtgaaacataatgtccaagggatcattgtttcaaaccacggcgggcgccagctggatgaggttctcgcctctatcgatgcgctcactgaggtggtggccgccgtgaagggaaaaatagaagtgtacctggacgggggagtgcgcactggcaatgatgtgctgaaggctctggccctcggtgcaaagtgcatcttcctgggaaggcccatcctctgggggctggcgtgcaaaggagaacatggcgtcaaggaagtcctgaatatccttaccaacgaattccacacatcgatggctctcactggttgtagaagtgtggcagagattaatagaaatctggtccagttttctagactctag

SEQ ID NO: 120305 - DNA, 561 bp, synthetic construct
  misc_feature 1..561: note = Description of Artificial Sequence: Synthetic coding sequence
  source 1..561: mol_type = other DNA
atgtccttagtgtgcttgaccgacttccaggctcacgcacgggagcagctgagcaagagcacccgcgatttcatcgaggggggagcagacgactcaattacccgggatgacaacatcgccgcgttcaagcggatcagactgcgacctagatacttgcgggacgtaagtgaggtcgacactaggacaaccatccagggcgaggaaattagcgccccaatttgcatagcacccactgggttccattgtttggtttggcccgacggcgagatgtctacagccagggcacccgagggcctccgatggttccagctgtatgtacaccccgatctccaactcaacaaacaactgatccaacgcgtggagtctttgggatttaaggccctggtgatcacactggatacacctgtgtgcggtaaccggcgccacgacatcaggaaccagctacgcagaaacctaacattaactgatctccagtcacccaagaagggcaatgcaatcccatatttccagatgactcccatctccaccagtctctgctggaacgatttgtcctggttttag

SEQ ID NO: 120306 - DNA, 2292 bp, synthetic construct
  misc_feature 1..2292: note = Description of Artificial Sequence: Synthetic coding sequence
  source 1..2292: mol_type = other DNA
atggtggcttgcagggcgataggcatcctgagccgattcagcgcctttagaattttacgctcccggggatatatctgtcgaaatttcaccggaagttccgcgctcctcacacggacacacatcaactacggtgtcaaaggagatgtggccgtggtacgcatcaacagccccaatagcaaagtcaacacactgtccaaagagttgcacagcgagttcagcgaagttatgaacgagatctgggcaagcgaccagataaggtcagctgtcctcatttcttccaaacctgggtgtttcatcgccggtgccgatattaatatgctggccgcttgcaaaaccttacaggaagtaacccagctgagtcaagaggctcagcggattgtcgaaaaactggaaaaatctactaaacccatcgtcgcagcaatcaatggcagctgtctgggaggcggtctagaggtcgctattagctgtcagtatcgaatcgcaacaaaagatcgcaaaactgtgctcggaacccctgaggtgttgctgggcgccctgccgggtgcaggagggacccagcggctgccaaaaatggttggggttccggccgccctggatatgatgctaacggggagaagcattcgcgcggatagagctaaaaagatgggactcgtggaccaacttgtggagccccttggccctggcttaaaacctccggaagagaggactattgagtatctcgaggaagttgcaattacattcgccaagggattggccgataagaaaatatcaccaaagagggacaagggactagtggagaaactcaccgcctatgcaatgactattccattcgtgaggcagcaagtttataagaaagttgaggaaaaagtgcgcaagcagactaaaggattatatcccgcccctctgaagatcattgacgtagtgaagactggaatagaacaaggatcagatgccggctacctgtgtgagtcacagaagttcggagagctggtcatgaccaaggaatccaaggccttgatgggactgtatcacggacaggtgttatgtaaaaagaacaaattcggcgcccctcagaaggacgtcaagcacttggctattctgggagccgggctaatgggggctgggatagctcaggtcagtgtggacaaagggctgaagacaatcctcaaagatgcaacattgacagccctcgacagaggtcagcagcaggtgtttaaagggcttaatgataaggtgaaaaaaaaggcacttactagctttgaaagagactctattttctcaaatttgacgggacagctagattatcaagggttcgaaaaggccgacatggtgatcgaggccgtgtttgaggacttgtcactgaagcatagagtcctcaaagaggtggaagctgtgattccagatcactgtatcttcgcctctaacacaagtgccctacccatttccgaaatcgccgcagtcagcaagagaccagaaaaggtaatcgggatgcattattttagtcctgtggataagatgcagctgctggagattattactaccgaaaagactagcaaggacactagtgcttccgccgtggccgtgggactgaaacaggggaaggtgataatcgtcgtgaaggacggtcccgggttctacactactagatgtcttgcacctatgatgagcgaggtcattagaattttgcaggagggtgtggaccctaagaaactcgacagcctgaccactagtttcggatttccggttggcgccgctaccctcgtggatgaggtcggagtggacgttgctaagcacgtagctgaagaccttggaaaggttttcggagagaggttcggaggcggaaaccccgaacttctgactcagatggtgagcaagggatttctggggcggaaatctgggaaaggcttctacatataccaggaaggtgtgaagaggaaagaccttaactcagacatggacagcatcctggcgtctcttaaactacctcctaagtccgaggtgtcctctgatgaggatatccagttccgcctggtaacccgcttcgtaaacgaagccgtgatgtgcctgcaggaagggatcctcgcaacccccgcggaaggtgacattggggcagtgttcggcctcggtttccccccatgtctcggaggcccctttaggtttgtcgacttatacggtgctcaaaagatagtagaccgactaaagaagtatgaggccgcctatggaaagcagttcaccccctgccagttactcgcggaccacgccaatagtcctaacaaaaagttttatcagtag

SEQ ID NO: 120307 - DNA, 783 bp, synthetic construct
  misc_feature 1..783: note = Description of Artificial Sequence: Synthetic coding sequence
  source 1..783: mol_type = other DNA
atggaaagtaaaggtatgtggcaattgtttgagctgaccctgccgatccaatcaatgcttgccgcctgcaaaaccctccaggaagttacgcagctctctcaagaggcgcagaggattgttgagaaactcgagaaatccactaagcccattgtggccgcaattaacgggagttgtctgggcggcgggctggaagttgccatctcctgtcagtatagaattgctaccaaggaccgaaaaaccgtgttggggacacccgaggttcttctgggcgctcttccaggagcagggggaacacaaagactgcctaagatggtaggcgtaccagccgctctcgacatgatgctgaccggacgttccatccgggctgaccgggctaaaaaaatgggactcgtggaccagctggttgaacccctaggacctgggctgaagcctcctgaggaacgtacaatcgaataccttgaagaagtcgccataacgtttgccaagggcttggccgataaaaagatttccccaaaacgggataaagggctggtggagaagctaacggcttacgccatgaccattccatttgtaaggcagcaagtctataagaaagtggaggagaaagtccgaaagcagacaaagggcttatatccagctcctctgaaaatcatagatgtcgtgaagacgggcatagagcagggatcagacgccggctacctctgtgaatctcaagtcaatttattccccttcaacgtgctcctgtccgtaaaaggcaagctcaaaattcagtctagtgtgtag

SEQ ID NO: 120308 - DNA, 1425 bp, synthetic construct
  misc_feature 1..1425: note = Description of Artificial Sequence: Synthetic coding sequence
  source 1..1425: mol_type = other DNA
atgacgattctaacctatccattcaaaaacttgccaaccgcatccaagtgggctctgcgtttttcgataaggccactgtcatgttctagccaattaagagctgctccggccgtccagacaaaaacgaagaaaactctcgccaagcccaacattcgtaatgtggtcgtagtggatggagtcaggaccccattcctgctgtctggaacctcctacaaggacctcatgccacacgacttggcccgcgctgcactgactgggttactgcaccggaccagcgtgcctaaggaggtggttgattacattatcttcgggacagtcatccaggaagttaagacctccaacgtggcaagggaagccgcactgggggccggtttctccgacaagacaccggcccacactgttacaatggcatgtatatccgcgaaccaggccatgactacgggagtgggcttaattgccagtggccagtgtgacgtcatagttgccgggggggtggaacttatgagcgacgttccaatccgccatagtagaaagatgcgaaagctgatgttggacctgaacaaggccaaatcaatgggacagcggctttccctaatttctaagtttcggtttaacttcctcgccccagagctcccagcagtgtctgaattctcaacgtctgaaacgatgggtcactccgcagatagactggccgctgctttcgcagtgtcaaggttagaacaggacgagtatgctttaagaagtcattctcttgccaagaaagcccaggacgagggcctgttgagcgacgttgtgccgtttaaggttccgggaaaagatactgtgactaaggacaacggcatcaggccatcttctttagagcagatggccaaactgaagccggcctttataaagccatatggtacagtgacagcggccaattcatctttcttgactgatggagcttcagccatgttaataatggccgaagagaaagcgctcgctatggggtataagcctaaggcatatttacgcgattttatgtatgtgagccaagatcccaaagaccagttattgctaggccccacctacgcaactcccaaagttctggagaaggccggactgacaatgaacgacattgatgcctttgaattccatgaggccttctccggacagattctggcgaatttcaaggccatggatagcgattggttcgctgaaaactatatgggaaggaagaccaaggtggggctgcctccactggagaaatttaataattggggtggctcactgtcattgggccacccatttggtgccactgggtgtagactcgtgatggccgcagcgaatcgactgaggaaggagggcggccagtacggactggttgccgcttgtgctgctggcggccagggccacgccatgattgtggaagcatacccaaagtag

SEQ ID NO: 120309 - DNA, 258 bp, synthetic construct
  misc_feature 1..258: note = Description of Artificial Sequence: Synthetic coding sequence
  source 1..258: mol_type = other DNA
atgaccatactcacctacccttttaaaaacttgcctaccgcttccaaatgggcattgaggttttcgatcaggccactctcctgctcctcccagttgcgagctgcacccgctgttcagacgaagaccaaaaagacgctcgccaaaccgaatataagaaacgttgtggtggtggacggcgttcgcactccgtttttacttagcggaacttcctataaggatctcatgcctcacgatctggcgagagcagccttaacttag

SEQ ID NO: 120310 - DNA, 531 bp, synthetic construct
  misc_feature 1..531: note = Description of Artificial Sequence: Synthetic coding sequence
  source 1..531: mol_type = other DNA
atgacaatcttgacatacccgttcaaaaacctgcctaccgcatcaaagtgggccttaagattttccattcgccctctgtcctgctcgagccagctccgtgcagctcccgcggtgcagacaaaaactaaaaaaacacttgcgaaaccgaacatcaggaacgtggtagtagtggatggcgtgagaacccctttcctgttatcaggaactagctataaggatttgatgccgcacgaccttgcgcgggccgctctgactggtcttttacaccgtaccagtgtgccaaaggaggtcgtggattatattatcttcggaacagtgatccaggaagttaaaacctcaaacgtcgcccgggaggcggctctcggggcagggttcagcgataagactcccgcgcacacggtcaccatggcgtgcatttctgccaatcaggctatgactactggcgtggggctgattgccagtggccagtgcgacgtcatcgttgctgggggggtcgaactgatgagtgacgttccaatccgacacagttag

SEQ ID NO: 120311 - DNA, 453 bp, synthetic construct
  misc_feature 1..453: note = Description of Artificial Sequence: Synthetic coding sequence
  source 1..453: mol_type = other DNA
atgacaatcttaacgtacccattcaagaaccttcccactgcctctaagtgggccctgaggttctcaatccgtcctctttcctgcagctctcagctccgcgctgccccggccgtgcaaaccaaaacaaagaagactctggccaaaccaaacatcaggaatgtggtagtggttgatggcgtgcgcactcctttcctcttaagtgggacctcctataaggacctcatgccgcacgatctggcaagagcggccttgactggacttttgcacaggacctccgtccccaaggaggttgtggactacatcatcttcggcactgtcatccaggaggtgaagacctccaatgttgcccgtgaagctgcgcttggtgcaggcttctccgacaagacccccgcacacacagtgaccatggcctgcatttcagccaatcaggctatgaccaccggggtgggttag

SEQ ID NO: 120312 - DNA, 1380 bp, synthetic construct
  misc_feature 1..1380: note = Description of Artificial Sequence: Synthetic coding sequence
  source 1..1380: mol_type = other DNA
atgactatcctcacataccctttcaagaacctgcccacagcctccaagtgggctctaaggttcagcattagacctctatcatgcagctcgcagctgcgagcagctccagcggttcagacgaaaactaagaaaactctggccaaaccaaatattcgaaacgtggtagtggtcgatggagtgaggactcctttcttactctctggcacaagcggcctattacaccgtacaagcgtgccaaaggaggtggtagattatatcattttcggtaccgttatccaggaagttaagacctccaatgtagcaagagaagctgccctcggggcaggattctctgacaaaacacctgcacacacagtgacgatggcctgtatttctgcaaatcaggccatgacaactggcgtcggattaatagccagcggccaatgcgacgtgatagtcgccggaggcgtggagttgatgtcagacgtgccaattaggcacagccgaaaaatgaggaagctgatgctagatctcaacaaggccaagtccatgggacagcggctgtccttgatatctaagttccgtttcaattttttggcgcccgagctgccggcggtgtctgagttttctacttctgagactatgggtcacagtgcggatcggctggcagcagcattcgccgtgtctaggcttgagcaggacgagtacgcgcttcgatcacattctttagccaagaaggcacaggatgaggggctgttatcagacgtggtccccttcaaagtcccagggaaagatacagtgacgaaggataatgggatcagaccatcttcccttgaacaaatggctaaactgaagccagcatttataaaaccgtatgggaccgtgactgcagccaactcgagtttcctcacggacggagcctctgctatgctgatcatggctgaggaaaaagccttagccatgggttacaaacccaaggcctatttgagagatttcatgtacgtaagccaggatccaaaggaccagcttttgctcggcccaacttatgccacacctaaagtgcttgaaaaggctggattgacaatgaatgacatagacgcctttgaatttcatgaggcatttagcggccaaatcctggcaaatttcaaagctatggatagcgactggtttgccgaaaattacatgggacgaaagactaaagtgggtctcccccccttggaaaaatttaataattggggcggcagcctaagcctaggccacccattcggcgctactgggtgtaggttggttatggctgcggccaatcgacttcgcaaagagggaggtcagtacggtcttgtggctgcttgcgcggccgggggccaggggcacgctatgattgtggaggcttaccctaaatag

SEQ ID NO: 120313 - DNA, 1359 bp, synthetic construct
  misc_feature 1..1359: note = Description of Artificial Sequence: Synthetic coding sequence
  source 1..1359: mol_type = other DNA
atgactttggtcagcggctggttactctacggatggatcatagcagttcagacaaagaccaagaagacactagccaagccaaacatccgcaacgttgtcgtggttgacggggttcgaacccctttccttctcagtggaacatcttacaaagacctaatgccgcacgatttggcccgtgctgcgttgacaggcctgctgcataggaccagcgtgcctaaagaggtggtggattatattatatttggaacagtcatccaggaggtgaagacatccaacgtggctagagaagccgccctgggagcagggttctctgataagacgccagcccacaccgtgacaatggcttgtatctctgcgaatcaggccatgacaacaggggtgggattgatagcgagcggacagtgcgatgtgatagttgccggaggagttgagctgatgtccgatgtccccattcgacactctagaaaaatgaggaagctgatgctggatttaaataaggccaaatccatgggacagaggctatccctgatttccaaatttaggtttaacttcttagctccagagctgcccgcggtgagtgagttcagcacctctgagactatgggtcactccgcagaccgcttagccgcagcatttgccgtctcacgactggaacaggacgagtatgcactccgttcccatagcctcgccaagaaggctcaggatgagggcctgctatctgatgtggtccccttcaaggttccagggaaggatactgtgacaaaggataacggtatccgcccctcctccctggaacaaatggctaaactgaaacctgcttttatcaaaccttatggaaccgtgaccgccgccaattccagctttttgactgacggggcctctgccatgttaatcatggcggaagaaaaggcattggcaatgggctataagcccaaggcgtatctgcgcgacttcatgtatgtgtctcaggacccgaaggaccagctcctgctcggcccgacatatgccaccccaaaagtactggaaaaggctgggctgactatgaacgatattgatgcatttgagttccacgaagctttttctggccaaattctggctaactttaaagcaatggatagcgattggttcgctgaaaattacatggggaggaaaacgaaggtgggactccctccgttggaaaagtttaataattggggaggcagcttgtcccttgggcatccgttcggtgctacggggtgccgccttgtgatggccgcagctaaccggctgaggaaggagggcggtcagtacggcctggtggcagcctgcgccgctgggggccaaggccatgccatgatcgtggaagcatacccaaagtag

SEQ ID NO: 120314 - DNA, 783 bp, synthetic construct
  misc_feature 1..783: note = Description of Artificial Sequence: Synthetic coding sequence
  source 1..783: mol_type = other DNA
atgaaggtggaagtgttgccagctctaaccgacaactacatgtatctggttattgatgacgagaccaaagaagccgccattgtggaccctgtgcagccccaaaaagtggtcgatgctgcgcgcaagcatggggtgaaactgacaaccgtgctgaccacacaccatcactgggaccacgctggcggtaatgaaaagctcgtgaagctcgagagtgggctgaaagtttacggcggcgacgatagaatcggcgccctcacccacaaaatcactcacctgagcaccctacaggtgggttccttgaatgttaaatgtttagcaacaccatgccacactagcggtcatatttgctactttgtcagtaagcctggcggcagcgaacctcctgcagtgtttaccggagatactttatttgttgccggttgtggcaagttttatgagggtactgccgacgaaatgtgcaaggcattgcttgaagtactggggaggcttccgccggatactcgggtgtactgcggacacgagtatactatcaacaacctgaagtttgcaagacacgtggaacctggcaatgccgccattcgcgaaaagctagcctgggccaaggaaaagtatagcataggcgagcctacagtcccctcaactttggctgaagagttcacctacaacccgtttatgcgggttagggaaaaaacagtacagcaacatgccggcgaaacggacccagtcactacgatgcgggcggtgcgtcgcgaaaaggatcagttcaagatgcctcgggattag

SEQ ID NO: 120315 - DNA, 927 bp, synthetic construct
  misc_feature 1..927: note = Description of Artificial Sequence: Synthetic coding sequence
  source 1..927: mol_type = other DNA
atggtggtgggccgggggttactgggcagacgctctcttgccgcgctgggtgctgcatgcgcgcggcgcggcttagggccggccctgcttggtgtgttttgccataccgatctgcgcaagaacctaacagtggacgagggcacgatgaaggtggaggtcttgcctgctcttacagataattatatgtatctggtcatcgatgacgaaaccaaggaagcagccattgttgacccagttcagccacagaaggtcgttgatgccgcccgtaagcatggcgtgaagctcaccaccgtgttgactacccatcaccactgggaccacgccggcgggaacgaaaagctggtgaaactcgagagtggcctcaaagtatacgggggggacgaccgcatcggggcgctgacccacaaaataactcatttgtcaacactgcaggtggggtcgttaaatgtcaaatgcctcgccaccccatgccacactagcggccacatctgctattttgtgtctaagcctggaggtagcgaaccaccagccgtgttcacaggcgacacactgttcgtggccgggtgcggcaagttctatgagggtacagctgacgagatgtgtaaggccttgctggaagtgctcggccggctccctccagacaccagggtgtattgcggacacgagtacactatcaacaacctgaaatttgcacgacatgtggaaccaggcaatgcggctattcgggaaaagttggcttgggccaaagagaagtattctataggcgagcccaccgtgccatccaccttggcagaggagtttacatacaacccttttatgcgggtcagagagaagaccgtgcagcagcacgcaggcgaaacggacccggtgacgactatgagggcggtgcgacgggagaaagatcaatttaagatgcctagagactag

SEQ ID NO: 120316 - DNA, 711 bp, synthetic construct
  misc_feature 1..711: note = Description of Artificial Sequence: Synthetic coding sequence
  source 1..711: mol_type = other DNA
atggtagtgggaaggggacttctgggccgccgttctttagcagccctgggggcagcttgcgcccggagagggctcgggcccgctctgctaggagtcttctgccataccgatctgagaaaaaatctgacagtcgacgaggggaccatgaaagtggaggttctgccagctctcaccgataactatatgtacttggtcattgatgatgagaccaaagaggccgcaattgtcgatcctgttcaaccccagaaagtggtggacgctgcaagaaagcacggagtgaaactcaccactgtgctaacaactcaccatcattgggaccacgctggagggaacgaaaaattagtaaaactcgagagcggattgaaggtctacgggggtgatgacaggattggagcgttaacccacaagataacacatctgtcaaccctccaagtcacgccatgcctttggctcgccgcaggctcatctatgaaggggctcaggatgaggtgtgtcaaactttgctggaggtcttgggccggcagtccccgaacacaagaatccacagtggcgacctctaccccatccactacctcttccctccacgctacatggtccccagcgatgcctcctagcgggaggtcttggccaggacccagacggtccaccgctagcggcagcccacagtgccatccaccgtggcaacgtagcttaccgaccaccccaagttag

SEQ ID NO: 120317 - DNA, 1128 bp, synthetic construct
  misc_feature 1..1128: note = Description of Artificial Sequence: Synthetic coding sequence
  source 1..1128: mol_type = other DNA
atggccatgacgggatggagctgtctcgttacaggtgcagggggctttctcggacagaggattattagactccttgtgaaggaaaaagagcttaaggagatacgtgtgttagacaaggcttttggccccgagctgagggaagagtttagtaaattgcagaacaagaccaaattaaccgtgttagagggcgacatcctggatgaaccctttttgaaacgggcctgtcaagatgtatccgtgattattcatacagcgtgcataatagatgtctttggggtgacccatcgggagtccattatgaacgtgaatgtgaagggaacccagctgctgctcgaggcatgtgtgcaggccagtgtgcctgtattcatttacacttctagtatagaagttgccggacctaattcctataaggagatcatccaaaatgggcacgaggaagagcctctagagaatacatggcccgcgccatatccacactcaaagaagcttgccgagaaggctgtcctggccgccaatgggtggaacctgaagaatggcggaacattgtacacttgcgccctgaggcccatgtacatatacggggagggtagtagatttctgagcgcatcaattaacgaagccttaaacaataatggaatactcagctccgtggggaaattcagcactgtcaatcctgtgtatgtggggaatgtggcatgggcacacatccttgctctgcgggccctacaggaccctaaaaaggctccctctatcagaggacagttttattacatttcagacgatacccctcaccaatcctacgataacctcaattataccctgtccaaagagtttggacttcggctggacagtcgctggtcctttcccctcagcttgatgtactggattggattcctgctggagatcgtctcgtttctgctgagaccaatttatacttatcggcctccctttaatcgtcatatcgttaccctgagtaacagcgtgtttacgttcagctacaagaaagctcagcgggatttggcctacaagcctctctacagttgggaagaagctaagcaaaagaccgtggaatgggtcggttcactggtggaccgccacaaagagacactgaaaagcaagacacagtag

SEQ ID NO: 120318 - DNA, 1122 bp, synthetic construct
  misc_feature 1..1122: note = Description of Artificial Sequence: Synthetic coding sequence
  source 1..1122: mol_type = other DNA
atgactggttggtcttgtctcgttactggagctggcggcttcctgggacagcggattatcagactgctggtgaaagagaaagagctgaaggagattcgcgtccttgacaaggcattcgggccggagctgagagaagagttctctaaactgcagaataagacaaagctgactgtgttggaaggggatattctggacgagccatttctgaaaagagcttgtcaggatgtgagcgtcatcattcatactgcatgtataatcgatgtgtttggcgtaacgcatagggaatccattatgaacgtcaatgtcaaaggcactcagctcctactcgaagcctgcgttcaagcgagcgtgcctgtcttcatctatacgtcatcgatagaagtggctggccctaactcctataaggaaatcatccagaacggccatgaggaagagccattggaaaatacctggccagcgccctaccctcacagcaaaaaactggccgaaaaggccgttctggctgcaaatggatggaaccttaaaaatggaggcacattgtacacatgtgccctcagacccatgtacatttacggggagggctcccgtttcctctcagcaagcattaatgaagcactcaacaacaatgggattctgtcttctgtgggcaaattctctacggtcaaccccgtgtacgttggcaatgtggcctgggcacacatcctcgccctcagggctttgcaggacccgaagaaggcaccctctatacgggggcagttctactatatatctgatgatacacctcatcagtcttacgataacctcaactacacactcagcaaggaatttggcctccggctcgacagccggtggagctttcctctgagcctgatgtattggatcggcttccttttagagatcgtgtccttcctgcttcgtccgatctatacgtataggcccccatttaacaggcacatcgtgacgctgagcaatagcgtgttcacattctcttacaagaaggcccagagggatctagcatataagcccctctacagttgggaggaggctaaacagaagacagtcgagtgggtcggaagtctggtggaccggcacaaagagacactgaagtcgaagacacagtag

SEQ ID NO: 120319 - DNA, 1122 bp, synthetic construct
  misc_feature 1..1122: note = Description of Artificial Sequence: Synthetic coding sequence
  source 1..1122: mol_type = other DNA
atgactggctggagctgcctggtgactggtgctggcgggtttctgggccagaggataataaggctcttggtgaaagagaaggagctgaaagagatccgcgtcctggacaaggcatttggtcccgagttacgggaagaatttagtaagctccagaacaagacgaagcttacagtgttggaaggtgacattcttgacgaacctttcctcaagcgcgcctgtcaagacgtcagcgttattatccatactgcctgcatcatcgacgtgttcggtgtcacccatcgcgagtcgataatgaacgtgaacgtgaaaggcacccagctgctactggaggcctgtgtgcaggcctcagtcccggtgtttatctacacatcctccatagaggtagcaggccctaactcatacaaggagattatccaaaacggacacgaggaagaaccgcttgagaatacctggccagccccctaccctcactcaaaaaagctcgcagagaaagccgtgttggctgcaaacggctggaatttgaaaaatggggggaccctctatacctgtgctctgagacctatgtacatttatggagagggctctagatttttgtctgctagcatcaacgaagccctgaacaataacggcatactgagctcggtgggcaaattttcaacggtcaaccccgtgtacgtggggaacgtggcctgggcgcacatcctagcactgagagccctccaggacccaaaaaaggccccctctattcggggtcagttttattacattagcgatgacactccccaccaatcatacgataatctcaactataccctttcaaaggagtttggcctgagactcgactcccgatggtcattccctctctcacttatgtactggatcggttttttgttagagattgtttcttttctgttgagacctatctacacctaccgcccaccgtttaaccggcacattgtgacactgtcaaattctgtgttcacattctcctacaaaaaagcacagagagaccttgcctataaacccctgtattcatgggaagaagctaagcagaagacggtagagtgggtaggcagcctggttgaccgccacaaggagactcttaaatcaaagacccagtag

SEQ ID NO: 120320 - DNA, 249 bp, synthetic construct
  misc_feature 1..249: note = Description of Artificial Sequence: Synthetic coding sequence
  source 1..249: mol_type = other DNA
atgacagggtggtcttgtctagtgactggagccggcggttttctgggtcagagaattatccgactgcttgtcaaggagaaggagcttaaggaaatccgcgtgctcgataaggcctttgggcccgagctacgcgaggaattttcaaaactacagaataagacaaagctaacagtgcttgagggcgacattctggacgaaccattcctgaaacgcgcctgtcaggatgtttccgttatcatccatacgtag

SEQ ID NO: 120321 - DNA, 1119 bp, synthetic construct
  misc_feature 1..1119: note = Description of Artificial Sequence: Synthetic coding sequence
  source 1..1119: mol_type = other DNA
atgggctggtcctgtctcgtcactggagcgggcggcctcctgggccagcgtattgtgcgcctactggtcgaagagaaggaactgaaggagattagggctctagacaaagccttcagaccagagctgcgcgaggaattctccaaattgcaaaatcgcacaaagctgaccgtccttgagggggatatactcgacgaaccattcctgaaaagggcctgtcaggacgtcagcgtggtgatacacaccgcttgtattatcgatgtattcggcgtcactcaccgtgagtcaatcatgaatgtcaacgtgaaaggcacgcagctgctgctggaggcctgcgtccaggctagcgtacccgttttcatctacaccagctctatcgaggtggctgggcctaatagctataaggagattatccagaacggtcacgaagaggaacccctggaaaacacctggcccacaccgtacccctactcgaagaagctagccgaaaaggctgtcctggccgctaacggatggaatcttaagaacggtgacaccctgtatacatgcgctctgcgcccaacctatatatacggagagggggggccatttctttctgcaagcatcaatgaagcactgaataacaatgggatcctgagtagtgttggcaaatttagtacagtgaatcctgtatacgttggaaatgtggcttgggcgcatattctggcactgagggcacttcgagatcccaagaaagccccaagcgtgcggggacaattctattatataagtgacgacacgccacatcagagctatgacaatctgaactatatcttgagtaaggagttcggtcttcgtttagattctcgttggtctttaccccttaccctgatgtattggatcggcttcctgttggaagtcgtaagcttcttgctgtcgccaatttacagttaccagccgcctttcaatagacataccgtgaccctatccaacagtgttttcacattttcctataagaaagcacagagagacttggcctacaaacccctctacagttgggaggaggccaaacagaagactgttgaatgggtgggctctctggtggaccggcacaaggagacactcaagagcaaaacacagtag

SEQ ID NO: 120322 - DNA, 588 bp, synthetic construct
  misc_feature 1..588: note = Description of Artificial Sequence: Synthetic coding sequence
  source 1..588: mol_type = other DNA
atggggtggagctgtctcgttacaggtgcaggcggtctattaggacagaggattgttcgcttattagtggaggagaaggaactgaaagagattcgggctctcgataaggccttccgacctgaattgagagaggagttctcgaaacttcagaaccgcactaaactcaccgtgctggagggggacatcttagacgagccatttttgaaacgcgcttgccaggacgtgtccgtggtgatccacacagcatgtatcatcgatgtttttggagtaacgcaccgggagtcaattatgaatgtcaacgtcaaaggaacgcagttattgctggaagcctgcgttcaagccagtgttccagtttttatctacacctcaagcatagaggtagctggtcccaatagctataaggagatcatccaaaacggccatgaagaggaacccctagaaaatacttggccaaccccatacccctacagtaagaaattggctgagaaagctgtcttggcggctaatgggtggaatttgaaaaatggagatactctctatacttgcgccctacggcccacatacatctacggggagggaggcccttag

SEQ ID NO: 120323 - DNA, 1119 bp, synthetic construct
  misc_feature 1..1119: note = Description of Artificial Sequence: Synthetic coding sequence
  source 1..1119: mol_type = other DNA
atgggatggtcttgccttgttaccggggccggcggcctgttagggcagaggattgtgcggctcctagtggaagagaaagagctaaaagaaatccgcgcactggataaggccttcaggcccgaattgcgagaggaattttctaagctacaaaatagaaccaagcttaccgtgttggaaggagatatcctggacgaaccattcctgaagagggcatgccaagacgtgtcagtagtgatccatacggcctgcatcattgatgtctttggagtgacgcatagggagtctatcatgaacgtcaatgttaaaggtacacagctgctcctcgaagcttgcgtgcaagcgtcagtgcctgtgttcatatatacctcatccattgaagtggccggtcccaactcttacaaagagatcatccagaacggccacgaggaagaacccttagagaatacctggccgaccccatacccttacagcaagaaactggctgagaaagcagtcctggccgcaaacgggtggaatctaaaaaacggggataccctttacacatgtgccctgcgtcctacgtatatctatggggaaggtggtccttttctatcagcctcaataaatgaagctcttaataacaatggcatcctgagcagcgtgggaaaattctctacggtaaatccagtgtatgtcggaaatgtggcatgggcccacatcctggccttgagggctttaagggacccaaagaaagcgccgagcgtgagggggcagttctactacatttctgatgatacccctcaccagtcctatgacaatctgaattatattctctctaaggaatttggtctcaggctggactcgagatggtcccttccactcacgcttatgtactggatcggattcctactggaggttgtgtcattcctgttgtctcccatctacagctaccagccacccttcaaccgccacaccgtgacactttccaatagcgttttcactttcagttacaagaaagctcagcgtgacctggcctataaacccctctattcctgggaggaagccaagcagaagaccgtcgaatgggttggatcattggtcgatcgccacaaggagactttgaaatctaaaacccaatag

SEQ ID NO: 120324 - DNA, 591 bp, synthetic construct
  misc_feature 1..591: note = Description of Artificial Sequence: Synthetic coding sequence
  source 1..591: mol_type = other DNA
atggcagattcagcacaggctcaaaagttagtctacttggtgactggaggctgcggctttcttggcgagcacgttgtccggatgctcctgcagcgcgagcctaggctgggggagctgcgggtcttcgaccaacacctgggcccatggctggaagagctgaagactggacctgtcagagttaccgctattcagggtgacgtgacgcaagctcacgaggtagctgccgccgttgcgggagcccatgtcgtgatacatacagccggcctggtggacgtgttcgggcgggcctcaccaaagaccattcacgaagtgaatgtccagggaacacgtaacgtgatcgaggcgtgtgtgcagaccggcacacgctttctggtgtacacctcgagtatggaggtcgtcggaccaaataccaaagggcaccctttctacagagggaatgaggacactccatacgaggcagtgcaccgacatccatatccctgttcaaaagctttggctgagtggttagtgctagaagccaacgggagaaaggctatgttgcccggctgtacctgttggcaaccaggctcctggtctagtggccagccctag

SEQ ID NO: 120325 - DNA, 1110 bp, synthetic construct
  misc_feature 1..1110: note = Description of Artificial Sequence: Synthetic coding sequence
  source 1..1110: mol_type = other DNA
atggcagattcggcacaggctcagaagctggtatacctcgtgaccggggggtgcggcttcctcggagaacacgtggtgaggatgctattgcagagagaaccacgacttggtgaactccgggtattcgaccagcacctcgggccctggttggaggaactgaagacagggcccgtgcgcgtgaccgccatacagggtgacgtgacacaggcccacgaggtagccgccgctgttgctggggctcatgtagtcatccacacagccggcctggtggacgtcttcgggcgagcaagccccaagacaattcatgaagtgaatgtccaaggcaccagaaatgttatcgaagcatgcgttcaaacgggcacgcgatttttagtatatacatcttccatggaagtagtgggaccaaatacaaagggacaccccttctacagagggaacgaagacacaccttatgaggcggtgcataggcacccttacccctgcagcaaagctctggctgaatggctggtgctggaagctaatggccgcaaagtgaggggaggcttgcctctggtcacctgtgcactgcgccctactggcatctatggcgagggccatcaaataatgcgggacttctaccgacaagggctacgtctgggtgggtggctctttcgcgctatccccgcttctgtcgagcacggaagggtgtatgtgggcaatgtcgcctggatgcacgtgttggccgcacgcgagctggaacagcgagctactctgatgggcggtcaggtgtacttttgttatgacggtagcccctaccggtcctacgaggacttcaacatggaatttctggggccatgtgggctgcggctcgtcggagctaggccattactgccttactggcttttagtgtttctggccgccctcaatgccctgttgcaatggttactgcggccactagttttgtacgcccctctgctcaacccttatacattagccgtggctaacactaccttcacggtgagcacggataaagctcagagacacttcgggtacgaacccctgttctcgtgggaggatagtcggactcgcaccatcctctgggtacaggccgccaccggatccgcccagtag

SEQ ID NO: 120326 - DNA, 591 bp, synthetic construct
  misc_feature 1..591: note = Description of Artificial Sequence: Synthetic coding sequence
  source 1..591: mol_type = other DNA
atggccgacagcgcccaggctcagaaactggtctacctcgtcacaggtgggtgcgggtttctgggcgaacatgtcgtgagaatgctgctccaacgcgaaccgcgtttgggcgagcttcgcgtctttgaccaacatttgggtccctggctcgaggagctcaaaacaggtcccgtgcgggtcacagctatccagggggacgtgacacaggctcacgaggtcgccgctgcagtcgccggtgcacacgtggtgatccatactgcaggtctcgtagacgtgtttggcagagcttccccgaagacgattcacgaggttaatgtccaaggcactcgcaatgtgatagaagcatgcgtgcagacaggaacaaggttcctggtttacacctctagcatggaagtagtcgggccaaacaccaaagggcacccgttctatcgcgggaacgaagacactccctacgaggccgtccatcgacacccttatccttgttcaaaggctctggccgagtggctggtgctggaagccaatgggagaaaagctatgttgcctgggtgtacctgctggcagcccggatcatggtccagtgggcagccctag

SEQ ID NO: 120327 - DNA, 1086 bp, synthetic construct
  misc_feature 1..1086: note = Description of Artificial Sequence: Synthetic coding sequence
  source 1..1086: mol_type = other DNA
atgagcggcaacggcaatgcagccgcgacggccgaagaaaactccccaaagatgcgcgtgatccgcgtggggacccgcaagagccaactggccagaatccagaccgactccgttgtagctacacttaaagcctcatatcctggcctgcagttcgaaatcatcgccatgtccaccaccggtgataaaatcctggacaccgcgctatccaagattggcgaaaaatcattgtttacgaaggaactggagcacgctctcgaaaagaatgaggtcgatttggtggtgcatagcctgaaagacctgcctaccgtgctgccaccaggttttaccattggcgcaatatgtaagcgcgagaaccctcacgacgccgtcgtgtttcatcccaagtttgtgggtaagacacttgagactctgcctgagaaaagtgtcgtggggactagcagcctgcgtcgcgcggcccaactgcagcgcaagtttccgcacttggaatttcgaagtatcagaggtaatctgaataccagactgcgcaaacttgatgaacagcaggagttctcagccattatcctggctactgccgggttgcagcggatgggctggcacaacagagtgggtcagattctgcatccggaagagtgcatgtatgcagttggacaaggggccctgggcgttgaggtcagagcaaaggaccaggatattctggatctggtcggagtacttcatgaccccgagactctgttgaggtgcatagcagaaagagcctttcttcgacatcttgagggtgggtgttccgtgcctgtggctgtgcataccgccatgaaggacgggcaactgtatctaacgggcggcgtctggagtctggacggatctgatagtattcaggagaccatgcaggccaccattcacgttcccgcccagcacgaggatggccccgaagatgacccccagctcgtgggtatcactgctcggaacattccccgtggcccgcagttggcagcccagaacctcggaatttccctggccaacctcctgctgagcaaaggcgccaaaaatatcttggacgtggctcggcagttaaacgacgctcattag

SEQ ID NO: 120328 - DNA, 1035 bp, synthetic construct
  misc_feature 1..1035: note = Description of Artificial Sequence: Synthetic coding sequence
  source 1..1035: mol_type = other DNA
atgcgggttattagagttggcacccgcaagtcgcagcttgccaggattcaaaccgattctgtggtggctaccctcaaagctagttaccccggcctgcagtttgagattatagcaatgtcaacaacaggggacaagatcctggacaccgctctttctaagattggggaaaagtcattgtttacaaaggaactggagcatgccttagagaagaatgaggtggatctcgtagtccatagcctcaaagacctgcctactgtgctgcctcccggcttcaccatcggcgctatttgcaaacgcgaaaacccacacgatgcagtcgtgtttcaccccaagtttgtggggaagacactcgagacattaccagaaaaaagcgtagtaggaacatcaagccttcgaagagccgcacagctgcagcggaagtttccccatcttgagtttcggagtattcgtgggaatcttaataccagactgcggaagctggacgaacagcaagagttctcagccatcatacttgccactgccgggcttcagagaatgggatggcacaatagagtgggccagattctgcaccctgaagagtgtatgtacgcagtcggtcagggagcccttggcgtggaagtccgggccaaggaccaagatattctggacctggtcggcgttctgcacgacccagagactttactgagatgtatcgctgaacgcgcttttctgagacacttagagggcggctgcagcgttccggtggccgttcataccgccatgaaagacggacagctgtaccttactgggggcgtgtggagtttagacgggagcgattcaatccaggagaccatgcaagcaacaatccatgtgcccgctcagcacgaagacggacctgaggacgatcctcagctagtgggtattaccgcacgcaatatcccaagaggcccccagctggccgctcagaatctgggaatttcgctcgccaacttgttattgtccaaaggtgccaaaaacatcttggacgtcgctagacagctcaacgatgcccactag

SEQ ID NO: 120329 - DNA, 1035 bp, synthetic construct
  misc_feature 1..1035: note = Description of Artificial Sequence: Synthetic coding sequence
  source 1..1035: mol_type = other DNA
atgcgtgtgatccgcgtcgggacgcgtaaatcacagttggcgcgcatacagaccgacagcgtggtggctacactgaaggctagttacccaggactccaatttgagattatcgccatgagtaccaccggagataaaatattggataccgccttgagcaagattggagaaaagagcctgttcactaaagaacttgagcacgctctggagaaaaatgaggtggatcttgtggttcattcgctcaaagaccttcccaccgtactgccgcctggatttacaattggagctatctgcaagcgcgaaaatccgcatgacgccgtggtttttcaccccaagttcgtaggtaaaaccctcgagacattaccagagaaatcagtggtgggaactagctcactgcggagagcagctcaactgcagcgaaagtttcctcacctcgaatttcgcagcatcagggggaatctgaacacacgcttgcgtaaactcgacgagcaacaggagttctccgcaatcattctggcaactgctgggctccaaaggatgggctggcacaacagggtgggacaaatattgcatcccgaggaatgcatgtatgcggttgggcagggagccctgggcgtggaggtgcgggctaaggaccaggacatattagatctggtaggagtcctccatgacccagagaccctcctgaggtgtattgcagaaagggcgtttctccgtcacctggagggaggatgcagcgtgcctgtggcggtgcacaccgcgatgaaagacggtcaactttacttaaccggcggggtgtggagcctggatggatctgatagtatccaggaaactatgcaagcaacgattcacgtcccggcgcaacatgaggatggacccgaagatgatccgcagcttgtgggcataacagcccgcaatatcccccgtggcccccagctggccgcccaaaatctgggcatcagcctcgcaaacttactgttgtctaaaggagccaagaatattctggacgtggctagacaactgaatgatgctcactag

SEQ ID NO: 120330 - DNA, 564 bp, synthetic construct
  misc_feature 1..564: note = Description of Artificial Sequence: Synthetic coding sequence
  source 1..564: mol_type = other DNA
atgcgtgtgatcagagtgggcacaaggaagagccaactcgcccgcattcaaactgattccgtggtggcaaccctgaaagcatcttatcctggtctgcagtttgagatcattgcgatgtccactacaggcgacaagatcctggacacagccctttcgaaaatcggcgagaaatccctcttcaccaaggaactcgaacacgccctggaaaaaaacgaagttgacctggtggttcactccctgaaggaccttcccactgtgctcccgcccgggtttactattggcgcaatttgcaagagagagaaccctcatgacgcggttgtattccatcctaagtttgtgggtaagacactagagactttgccagagaaaagcgtggtaggaacaagctccttgcgccgcgctgcccagctgcaacgcaaatttccacatctggagtttcgaagcatccgcggtaatctcaacacacggctcagaaagctcgacgagcagcaggagttctctgctatcatcctggccacagctggactccagaggatgggctggcataatagggtgggccagtag

SEQ ID NO: 120331 - DNA, 1035 bp, synthetic construct
  misc_feature 1..1035: note = Description of Artificial Sequence: Synthetic coding sequence
  source 1..1035: mol_type = other DNA
atgcgggtcatacgcgtcggaaccaggaaatctcaattggcccgaattcagaccgactctgttgttgctacactaaaggcgagttatcccgggctgcagttcgaaatcatcgccatgtcaactaccggcgataagattctggacactgcactgtccaagattggtgaaaagtcactgtttacaaaagagcttgaacacgcattggaaaaaaacgaagtggacctggtagttcactcactgaaggatctccctactgtgctaccgcccggtttcacaattggagccatttgcaagagggagaatccacacgacgccgtggtttttcaccctaagttcgttggcaagaccctggagacactgcctgaaaaatcagtggtgggaacctcgtctttgcgacgcgcggctcaactgcaacgaaaattcccccacctggaattccggagcatacgaggcaacctcaataccagactccgtaaactggacgagcagcaagaattctccgcgatcatcctcgcgacagctggcttacaacgtatggggtggcacaatagagtgggccaaatcctccaccccgaggagtgtatgtacgcagtgggccaaggggctctgggtgtggaggtacgagctaaggaccaggatattttggatctggtcggcgtgcttcacgatcccgaaaccctactccgctgcattgctgagagggctttccttaggcacctggaaggagggtgttccgttccagtggcagtgcacacagccatgaaggatggtcaattgtacctgactgggggagtgtggtcgttggacggatccgactcaatacaggagactatgcaggccactatccacgtgcccgcacagcatgaggacggtccagaggatgatcctcagttggtgggtatcacggcgcggaacatccctaggggccctcaactggccgctcagaacctggggatctctctggccaacctgctgttatccaagggggccaaaaatatcctcgacgtcgcccgtcagctgaatgacgctcattag

SEQ ID NO: 120332 - DNA, 564 bp, synthetic construct
  misc_feature 1..564: note = Description of Artificial Sequence: Synthetic coding sequence
  source 1..564: mol_type = other DNA
atgcgcgtcattcgagtcggcacccgtaaatcccagttggcacggatccagacagacagcgtcgtggctactctcaaagctagctaccccgggctgcagtttgagatcatcgcaatgtccacaacaggagataaaatattggataccgcgttgtcgaagatcggcgaaaagtccttgtttacaaaggaactagaacatgcccttgagaaaaatgaggttgatctcgtggtgcatagcttgaaagacctgcctaccgtcctgccccccgggtttacaatcggtgctatttgtaaaagggaaaatccacacgatgctgtcgtttttcatcctaaatttgtgggcaaaacactggaaacattgccagagaaatcggtggtgggcacatctagccttagaagggccgctcagttacaaaggaaattcccccatctggaattccgatctattcgcggtaacctgaacacccgactgcgaaaattggatgaacagcaggagttcagcgctattatactggccacagcaggactccagcgcatgggatggcacaaccgggttgggcagtag

SEQ ID NO: 120333 - DNA, 915 bp, synthetic construct
  misc_feature 1..915: note = Description of Artificial Sequence: Synthetic coding sequence
  source 1..915: mol_type = other DNA
atgagggtgatccgtgtcggcacccggaaaagccagctggcccgaattcaaaccgattctgtcgtcgcaacactcaaagctagttatcccggcctgcagttcgaaatcatcgctatgtcaacaaccggagataagatcttagatacagccctgagcaagattggtgagaagtctctattcaccaaggagttggaacatgcactcgagaagaacgaagttgacctagttgtgcactccctcaaagacctccccacagtgcttccccccgggtttaccataggcgcaatctgcaaaagggagaaccctcatgatgccgtggtgtttcatcctaaattcgtgggcaaaacactcgagaccttaccagaaaagtcagtcgtgggcaccagcagcctaagaagagcggcccaactacagcgcaagtttcctcacctggagttcagatctattcgggggaacttaaacacccgcctaagaaaactcgacgagcagcaggaatttagcgcgatcatcctggcaacagcaggattgcagagaatgggttggcacaatagggtcgggcagatcctgcatccagaggaatgcatgtacgctgttggacaggaagggggatgttcagtcccagtggccgtgcacactgcaatgaaggacggccagttgtacctgactggaggtgtgtggagtctggacgggtcagatagcatacaagagacaatgcaggcaacaatccatgttccagctcagcatgaggatggcccagaagacgatccccagcttgtgggcattactgccaggaatattcctcggggaccacagttggctgctcaaaacctgggtatcagcctggccaatctgcttctcagcaagggagccaagaacatcctggacgtggcccgacagctgaacgatgctcattag

SEQ ID NO: 120334 - DNA, 966 bp, synthetic construct
  misc_feature 1..966: note = Description of Artificial Sequence: Synthetic coding sequence
  source 1..966: mol_type = other DNA
atgtctggaaacggcaatgccgccgccactgcagaggagaatagtcctaaaatgcgggtgatccgagtggggacccggaaatcacaactagcccgcattcagaccgatagcgtggttgcaacgctgaaggcctcataccccggcctccaattcgagataatcgcaatgagcacaaccggggataagatcctggacacagccctaagtaagataggagaaaagtctctgtttacaaaggaactagaacatgccctggagaagaatgaggtcgacctggtggtccactccctgaaagatctccccactgttctgcctcccggcttcacgattggcgccatctgcaagcgggagaatccacacgatgccgtcgtattccaccctaaattcgtagggaagactcttgaaaccctgcctgagaaatcggttgttggaacttcttccttgagaagagctgcccaattacaaagaaagttcccgcacttggagtttcggtcaatccgggggaacctaaacacgaggctccgaaagcttgacgaacagcaggagttttccgctattatactcgccacggcagggctgcagcgtatgggatggcacaatagggtcggacagatactgcaccctgaagagtgcatgtatgccgtcggccaggagggtggatgcagcgtgcctgttgccgtgcataccgccatgaaagacggccagctgtacctgactggaggagtgtggagtctggacggttctgattcaatacaggagaccatgcaggcgactatccacgttccggctcagcatgaagatgggccagaagatgacccacagttggtgggtattactgctcgcaatattcccagaggaccacagctagcggctcagaacctggggatttccttggccaatttgttactgagtaaaggtgccaagaatattctggacgtggctcgacagttgaacgacgctcactag

SEQ ID NO: 120335 - DNA, 879 bp, synthetic construct
  misc_feature 1..879: note = Description of Artificial Sequence: Synthetic coding sequence
  source 1..879: mol_type = other DNA
atggcattcatgaaaaagtatctactccctattttagggctgtttatggcttactactattactccgccaacgaagaattcagaccagaaatgctgcagggaaaaaaggtgatcgtcaccggggctagcaagggaattgggagagaaatggcctaccatctggcaaagatgggtgcgcacgtcgttgtgaccgcacgcagcaaggagacccttcaaaaagtggtcagccattgcttggaactgggtgccgcaagtgcccactatatcgctggcacgatggaggacatgacattcgccgagcagttcgtcgcacaggccggaaaactcatgggcggacttgacatgctgatccttaaccatattacgaacactagccttaatctgttccacgatgacatccaccatgttcgaaaatctatggaggtgaatttcctttcttatgtagtgctgacggtcgcagcactgcccatgctaaagcagtccaacggtagcatcgtcgtggtctcctcccttgccggtaaggtggcatacccgatggtggcagcctatagcgcttccaagttcgccttggacggtttcttcagctccatccggaaggaatattccgtgtcaagagttaacgtctctattacattatgtgttctcggtctcattgacaccgagaccgcaatgaaagctgtgtcaggcattgtgcacatgcaggccgcccccaaggaggagtgcgcactggagataattaagggcggggccctgcgacaagaagaagtgtattacgactcatcgttatggacgaccttattgatacgtaatccctgcaggaagatacttgaattcctgtactcaacgtcttacaatatggatcgcttcataaataaatag

SEQ ID NO: 120336 - DNA, 879 bp, synthetic construct
  misc_feature 1..879: note = Description of Artificial Sequence: Synthetic coding sequence
  source 1..879: mol_type = other DNA
atggcattcatgaagaaatacctgctgccaatcctcggcttgttcatggcgtattactattacagtgccaatgaagaatttcggcccgagatgcttcagggcaaaaaggttatagtgacgggagctagtaaaggcattggccgtgagatggcctaccatttagcaaaaatgggagcacatgtcgtggtgaccgcgcggagcaaagaaacgctgcagaaagttgtcagccactgtctagagctcggggcagcttctgcccactatatcgctgggacaatggaggatatgacttttgccgaacagtttgtcgcccaggctgggaagctgatgggtggcctggacatgctcatactaaaccacatcaccaatacgtctctcaatctgttccatgacgacatccaccatgtgaggaagtccatggaagttaattttctgtcttatgtcgtcttgactgtggcagccctgcccatgctcaaacagagtaacggaagcatcgtcgtcgtgtcgtcactcgctggcaaagttgcctaccccatggtggcagcatattctgcgtccaagttcgctctggacggcttcttttcttcaatccggaaggagtacagcgtttctagagtgaacgtgtctatcacactgtgtgtcctgggactgatcgacaccgagactgcaatgaaagccgtgtccggtattgtgcatatgcaagccgcccccaaagaagaatgcgctctggagataataaagggcggagcattaagacaggaagaggtgtattatgattcaagcttatggactaccctattaatcaggaatccttgccggaagatcctcgaattcctgtatagcaccagttataacatggatcgtttcatcaacaaatag

SEQ ID NO: 120337 - DNA, 879 bp, synthetic construct
  misc_feature 1..879: note = Description of Artificial Sequence: Synthetic coding sequence
  source 1..879: mol_type = other DNA
atggcctttatgaaaaaatacctgctaccaatattggggctgtttatggcatattactattactctgcaaatgaagaatttcggccagaaatgctgcagggcaagaaagtcatcgtgaccggcgcaagcaaaggcatcggtagagagatggcctatcaccttgccaagatgggtgcacacgtggttgtgacagcaaggtccaaggaaactttgcagaaggtggtgtctcactgccttgagctcggcgccgcctccgcacactatattgccgggactatggaggacatgacttttgccgaacagttcgtagctcaagctgggaaactgatgggaggactcgatatgttgatcctgaaccacataactaacacctcactgaatctgtttcacgatgacattcaccatgtgagaaagagcatggaagtaaacttcctcagctacgtggtgttgacagtggccgccctgcccatgctcaagcagagcaatgggagtattgtggtagtaagctctctagctggcaaggttgcatatcccatggtagcagcctactcggcctctaaatttgccttagacggatttttctccagcatcagaaaagagtactcagtgtctcgtgttaacgtctccattaccctatgcgtacttggtcttatcgatacagagactgccatgaaggccgtgagcggcattgtgcatatgcaggccgcaccaaaggaagaatgtgccctggaaatcatcaaagggggcgcactaaggcaagaggaagtgtattatgattcctcgctctggaccaccttacttattcggaatccatgtcggaagattctggagttcctctacagcacctcatacaacatggatcgctttatcaacaagtag

SEQ ID NO: 120338 - DNA, 1218 bp, synthetic construct
  misc_feature 1..1218: note = Description of Artificial Sequence: Synthetic coding sequence
  source 1..1218: mol_type = other DNA
atggaaagatggccctggccctctgggggcgcatggctgctcgtcgctgccagggccctcctccagcttttaaggtcagatctaagattgggacgccccctcctggccgcgctggcactgctggctgctctggactggctgtgtcaacgtcttttgccacctccagccgctctcgccgtactcgctgccgcgggctggatagcactgtcacgactcgcgagaccccaaaggctccctgtggccacccgtgcagtgctgattacgggctgtgattcgggcttcgggaaagagaccgccaagaaactcgacagtatggggttcacagtgctcgctactgtgctggagcttaatagcccgggcgcgatagaactgaggacttgttgctccccaagactgcgcttgctccagatggacctcactaaacccggagacatctctcgggtcctcgaatttaccaaagcacacaccacgagcacaggtctctggggcttggttaataacgccgggcataacgaggtggtggccgacgcagagctgtccccagtggccacttttcggagttgtatggaagtgaatttcttcggggccctcgagctgacgaaggggttgttaccactgctcagaagtagtcgtggccgcatcgtcaccgtgggatccccagcaggcgacatgccttatccttgtttaggggcgtacgggactagtaaggccgccgtggccttgctgatggataccttctcttgcgagttgctgccgtggggtgttaaggtcagcattatccaacctggctgtttcaaaactgagtctgtgcggaacgtcggacagtgggagaagaggaagcaactgctactcgccaatctcccgcaggagctgttacaggcatatggaaaagactacattgaacacctgcacggtcagtttctccactcccttagactagcaatgtccgatctgactcccgtagtcgacgctatcactgacgctctcctcgctgcgcgtccacgaagaaggtactaccccggccagggcctgggactgatgtattttatccactactacctgcctgagggtcttagacgccgcttcctgcaggctttctttattagtcattgtctgccaagggctttgcagcccggccaacccggaaccaccccaccgcaggacgccgcgcaggatccaaatcttagcccaggcccttcccctgctgtggcgcgttag

SEQ ID NO: 120339 - DNA, 2232 bp, synthetic construct
  misc_feature 1..2232: note = Description of Artificial Sequence: Synthetic coding sequence
  source 1..2232: mol_type = other DNA
atggaggctgtggctgttgctgctgccgtcggtgtgttacttttggctggagccggtggagcagccggcgacgaggcaagggaagccgcggctgtgagggctctagtagctcggctgctagggcccgggcccgcagccgacttcagtgtctccgtcgagcgtgctttggccgctaagcccgggctggacacctactctctcggaggcggaggagcagctcgcgtgcgcgtccggggctcgactggggtagccgccgctgcagggttgcacaggtatctgcgcgatttttgtggatgccatgtagcttggagcggctcacagctccgactccctcggcccctgccagcagtgccaggtgagctgaccgaagcaacacctaatagatataggtactaccagaacgtatgcacacagtcttacagcttcgtctggtgggactgggcccgctgggaacgggaaattgattggatggcattgaacggtatcaacttggccttggcctggagcggccaggaagccatctggcagcgcgtctacctcgctctgggcttgacccaagccgagataaatgagttcttcaccggacctgcctttctggcttggggaaggatgggaaatttgcatacctgggatggtccacttcccccttcctggcatattaaacagctttacctacaacaccgggtgctggatcaaatgcggagcttcggtatgacgccggtattacccgctttcgccggccacgtacctgaggctgtaacacgagttttccctcaggtaaatgtgactaagatggggagctgggggcatttcaactgtagctacagctgtagcttccttttggcccctgaggatcccatttttccaattattgggtcactctttctgagagagctgattaaagagttcggtaccgaccatatatacggcgctgatactttcaatgaaatgcaacctcccagttcagagccttcctatctagccgctgcgaccacagcggtttacgaggctatgaccgcagtagataccgaggccgtctggctgctacagggatggttattccagcaccaaccgcagttttggggcccagcgcaaattcgcgcagtgctgggggcagttccccgtggcagactgctggtactggatctgttcgccgaatcacagccggtgtacacaagaacggccagctttcagggccagcccttcatctggtgcatgcttcacaacttcgggggcaaccacggtctgtttggagcactggaagccgtgaacggagggccagaggcggctagactctttcctaactcgacgatggtcgggaccggcatggcacctgagggcatatcgcagaatgaggtggtgtactccctcatggccgaactgggatggagaaaggaccccgtgcctgacctggctgcctgggtgactagctttgccgcgaggcggtatggcgtctctcaccctgacgctggagccgcttggaggttgctactaaggtccgtgtataattgcagcggcgaggcctgccggggccacaatcgaagccctcttgtgcgacgtccttcgttgcagatgaacacctctatctggtataacagatccgacgtattcgaggcctggaggcttctattgacctcagcgcctagtctggcgactagcccggcgtttcggtacgaccttttagatctgactagacaggccgtgcaagaacttgtctccctctattacgaagaggctcgttccgcttatttgtcaaaggaacttgctagtctactgcgagcaggtggcgttctggcttatgaactactgcccgcgctggacgaggtgctggcctctgattctagattcctattggggagctggctcgagcaggcccgggccgccgccgtctctgaggctgaggcagatttttatgaacagaattccagataccagttaaccctttgggggcccgaagggaatattctggattatgcaaacaaacagctggcaggcctagtggccaattattacacccctcgatggagactgttcctggaggccctcgtggactctgtggcacagggcattcccttccagcagcaccagtttgacaaaaatgttttccaacttgagcaggcattcgttctcagtaagcagaggtacccttcacagcctaggggcgacactgtggacctggcaaagaaaatttttctgaagtattaccccaggtgggtggctggaagctggtag

SEQ ID NO: 120340 - DNA, 450 bp, synthetic construct
  misc_feature 1..450: note = Description of Artificial Sequence: Synthetic coding sequence
  source 1..450: mol_type = other DNA
atggcccgaacagtggtgcttatcaccggctgtagttctggaattggcctccatctggcagttaggcttgcctcagatccatctcagagttttaaggtctacgccactttaagagacttaaaaactcaaggacgtttatgggaggcggcacgtgcgttggcctgtcccccagggtcactggaaacattgcaacttgacgtgcgcgatagtaaaagtgtcgctgcagctagggagagggtgactgaaggcagagttgacgtccttgtgtgtaacgcggggttaggccttctgggaccacttgaagcgctgggggaagacgccgtagcctccgtcctggacgttaacgtcgtggggaccgtcagaatgcttcaggcctttttgcccgacatgaaacgcaggggtagcggaagggtgcttgtcaccggctctgtagggggccttatggcttag

SEQ ID NO: 120341 - DNA, 987 bp, synthetic construct
  misc_feature 1..987: note = Description of Artificial Sequence: Synthetic coding sequence
  source 1..987: mol_type = other DNA
atggccagaaccgtagtactaataaccggatgctcctccggaatcgggctccacctggcagtacgtttagcctcggacccctcgcagagcttcaaggtgtacgcaaccttaagagatctgaagactcagggaagactctgggaagccgctcgtgcccttgcttgcccacctgggtccctagagacactacagctggacgtcagagactctaagagcgtggcagctgcacgcgaaagagttacggaaggccgagtagacgtgctcgtatgcaacgctggactgggtcttttaggtccgctggaggctctgggggaagatgccgtggccagtgtgctggacgtcaatgtggtcgggacggtccggatgctgcaggcgttcctgcctgacatgaagcgccgcggatcagggagggtgctggtgaccggtagcgtgggcgggttaatgggcctccctttcaatgacgtttattgcgcatctaagttcgcactggaagggttgtgcgaatcattggcagtgctccttttgccctttggcgtccacctttcccttattgaatgcgggcctgttcacaccgcatttatggaaaaagtgctcgggtcccccgaggaagtattagatagaacagacattcatacctttcataggttttaccagtacctggcacattctaagcaggtgttccgggaggcagcacagaaccctgaggaagtggcagaggtgtttttgaccgctcttcgagctccaaagccaacactccgttactttaccacagagaggttcctaccattacttcggatgcgcctggacgatccatccggcagcaattacgtgacagcaatgcatcgcgaagtgtttggcgatgtccccgcaaaggcagaggccggtgctgaggccggggggggggctgggcccggggccgaagatgaggctggccgcggcgccgtgggcgaccccgaacttggcgacccaccagctgcaccccagtag

SEQ ID NO: 120342 - DNA, 447 bp, synthetic construct
  misc_feature 1..447: note = Description of Artificial Sequence: Synthetic coding sequence
  source 1..447: mol_type = other DNA
atggcatgtacagtggtgctgattactggctgctcctccggaattggcctgcacctggctattcatctcgccctcgacccctctcaatcttttaaagtgtacgccactctacgcgatcttaaaactcagggccgactatgggaggccgcccgggccctggcatgtcctcagggcagtctggaacgactgcagctggatgttcggaatagtagcagtttggccgccgcccgggaacgtgtgacggagggacgggtcgatgtgctagtttgtgataccggactgggacttctcggaccattgggagaggacgccgtggcatccgtactggatgtgaacgtggttggcaccgtccgcgtgttgcaagactttctgcccgatatgaaacgcccaggcagcggacgtgtgttagtgacggggtccatggggggattgatgggggaatggtag

SEQ ID NO: 120343 - DNA, 786 bp, synthetic construct
  misc_feature 1..786: note = Description of Artificial Sequence: Synthetic coding sequence
  source 1..786: mol_type = other DNA
atggccgctgcctgccggagtgtgaaaggtcttgtcgcagtgattacaggaggtgccagtggcctggggttggcgacggccgaaagattggtcggtcaaggggcctctgcagtactcctggacttgcctaatagcggcggagaggcccaagccaaaaaactgggcaataactgtgtcttcgcccccgccgacgtcacctcagaaaaggacgtccaaactgctctggcactggccaaggggaagtttgggagggtggatgtggccgtgaactgtgccggcatcgccgtcgcctctaaaacctacaacctcaagaaaggtcaaacccacaccctggaagattttcagagagttctcgacgtgaacttgatggggaccttcaatgtgatccggctggtggctggcgaaatggggcaaaacgagccggaccagggaggccagcgtggtgttattatcaacacggccagtgtcgccgcattcgagggacaggtggggcaggccgcctacagcgccagcaagggcgggattgtcgggatgacgctgcctatcgccagagacctggcccccattggtattcgtgtgatgacaattgctccagggctgtttggcactcctttgctgactagcctacccgagaaggtgtgcaatttcctggcctcccaggtccctttccccagccgtctaggtgaccccgccgagtatgcccacctggtgcaggccataattgagaatccattcctcaatggggaggtcattaggctagacggcgccattcgaatgcagccctag

SEQ ID NO: 120344 - DNA, 510 bp, synthetic construct
  misc_feature 1..510: note = Description of Artificial Sequence: Synthetic coding sequence
  source 1..510: mol_type = other DNA
atggcagctgcctgtcgctccgtgaaaggactggtggcggtcatcacaggaggagccagcggtttgggccttgctacagccgagcgattagtggggcagggcgccagcgccgtactcttggacctgcccaatagcgggggggaggcccaggccaagaaactgggaaacaattgtgtttttgccccagcggatgtgacatcagaaaaggatgttcagaccgccctggctcttgccaagggtaaattcggaagagtggacgtggctgtcaactgtgcgggaatcgcagtggcttctaaaacatacaacttgaagaaggggcaaacccacacactcgaagactttcagcgagtcctcgacgtgaatttgatggggacattcaacgtgattcggttagtggccggcgaaatgggccagaacgagcccgaccagggcggtcagcgcggagtgatcatcaacactgcttctgtggccgcttttgagggccaggtgtgtctcgctccccattgctag

SEQ ID NO: 120345 - DNA, 759 bp, synthetic construct
  misc_feature 1..759: note = Description of Artificial Sequence: Synthetic coding sequence
  source 1..759: mol_type = other DNA
atggccgccgcctgcagatctgtgaaggggctggtcgccgtgatcactgggggggcaagtggcctaggcctcgcaaccgcagagaggctggtcggacagggggctagtgctgtgcttctggatttgccgaacagcggtggcgaggcccaggccaaaaagcttgggaataactgtgtcttcgctccagcagatgtcacatcggagaaggacgtgcagacagccctggccctagccaaaggcaaatttggtagggtggatgttgcagtgaattgtgccgggatagccgtggcgagcaagacctacaacctcaaaaaggggcagacgcacacactcgaagactttcaaagagttctggacgtgaatttaatgggaactttcaatgttatccggcttgtcgccggtgagatgggccagaacgaacccgaccaaggtggccagcgcggggtgataattaacaccgcttccgtggccgccttcgaaggccaggtcggccaagcagcttattcagcttcgaaaggggggatagttggcatgaccctgcccatagcacgcgacctggcacccattggactcttcgggactcccctcttgacctcgcttcccgagaaggtatgcaattttctggcctcacaggttccattccctagccgactgggcgaccctgctgagtacgcccacctggtgcaggctatcatcgaaaacccctttctgaatggggaagtcattagattagatggcgctatccgcatgcagccttag

SEQ ID NO: 120346 - DNA, 903 bp, synthetic construct
  misc_feature 1..903: note = Description of Artificial Sequence: Synthetic coding sequence
  source 1..903: mol_type = other DNA
atgaaattcttacttgacatcctgctgcttctgcctttgctcatcgtatgttcacttgagtccttcgtgaagctttttattccgaagcgccgaaagtccgtgacaggtgagatagttcttattacaggggctgggcatggaataggccggctgacggcttacgagtttgccaagctgaaaagtaagctcgtgctctgggacattaataagcacggcttagaggagaccgctgcaaagtgcaaaggcctcggagccaaggtgcacaccttcgtggtcgactgtagtaacagggaggacatctacagctccgcgaagaaggtgaaggcggagatcggggacgtttcgatcctcgtaaataacgccggggtggtttacacttctgatctcttcgctacccaagacccccagatagagaagacattcgaagtaaacgtacttgcacatttttggacaactaaggcattcctgccagccatgaccaagaacaaccatgggcatatagtgactgtcgcaagcgcggccgggcacgtttcagtcccttttctgctggcctactgtagcagcaagtttgcagcagtgggattccacaagaccctgacagatgagctggctgcactacaaatcacaggcgtgaaaactacttgtctgtgtccgaattttgttaacaccggttttatcaagaatccgtccacttccctcggacccaccctggagccagaggaggtcgttaaccggttaatgcacggtattctgactgaacagaagatgattttcatcccttcatctattgccttcttgaccactctggagaggatcctgcctgagaggtttctcgcggtgttgaagcagaagatctcggtgaagtttgacgccgtgattggatacaaaatgaaggcccaatag

SEQ ID NO: 120347 - DNA, 795 bp, synthetic construct
  misc_feature 1..795: note = Description of Artificial Sequence: Synthetic coding sequence
  source 1..795: mol_type = other DNA
atgaacatcatcttggagatattactcctgctgattacaatcatctacagttatctggagtccctggtgaaattcttcataccacagaggagaaagagtgtagctggggagatcgttctcattacaggcgctggacacggaatcggtcgtcagaccacgtacgagttcgcaaagcgccaaagcatccttgtgctctgggacataaacaaggtaaagaaagaagtcggcgatgttaccattgtcgtcaacaatgctgggaccgtttaccccgccgacctactgagcactaaggacgaagaaattaccaagacgtttgaagtcaatattctcggacatttttggatcacaaaggctctgctgccctcaatgatggagagaaaccacggtcacatagtgacggtggcctcagtttgtggccacgagggtatcccttatctgatcccatactgctcgagtaaatttgctgctgtgggctttcacaggggactgacttcagaactgcaggccctcggcaagaccggaattaaaacatcatgcctctgtccagtgttcgtgaacaccggttttacaaaaaatcccagcaccaggctctggccagtgctcgagacggatgaggtggtccgatctctgatagatggcatcctgacgaataaaaagatgatctttgtgcccagctacatcaacatttttctgaggttacagaaattcctgcccgagcgggcctcggcaatactcaatcggatgcagaacatacagttcgaggcagtggtaggacacaaaatcaaaatgaagtag

SEQ ID NO: 120348 - DNA, 903 bp, synthetic construct
  misc_feature 1..903: note = Description of Artificial Sequence: Synthetic coding sequence
  source 1..903: mol_type = other DNA
atgaacatcattttggaaattcttctcctgttaatcactataatctacagttatctggaatccttggttaaattcttcatacctcagcgaagaaaatctgtcgcaggggagatcgtgctgataaccggggcaggccacggtattggccgtcaaaccacatatgagtttgccaagcgacagagtattcttgttctctgggacatcaataaacggggtgtggaagagactgccgctgagtgcaggaagctgggagttaccgctcatgcttatgtggttgactgcagtaatcgcgaagagatataccgcagtctcaaccaagtgaagaaggaggtgggcgacgttaccattgtggtcaacaacgccggaacagtgtaccctgcagaccttctgtctacaaaggacgaggaaatcacaaaaacatttgaagtgaacatactggggcacttctggattactaaggcactgctgccaagcatgatggagaggaatcatggccacattgttaccgtcgcaagcgtatgtggccacgaaggcattccttacctaataccttattgctcctccaaatttgccgcagtgggattccatcgtggcctcacttccgaactgcaggctctgggcaagaccggcatcaaaacatcctgcctgtgtcctgtgttcgtgaacactggctttaccaaaaatccctcaacacggctgtggcccgtactggagacggatgaagtggttcggtcactcattgacggaatactcacgaacaagaaaatgatctttgttccttcctacatcaacatttttttgagactccagaagtttctgccagagcgagccagcgccatcttaaatcgcatgcagaatatccagttcgaggcggtcgtgggacacaagattaagatgaagtag

SEQ ID NO: 120349 - DNA, 813 bp, synthetic construct
  misc_feature 1..813: note = Description of Artificial Sequence: Synthetic coding sequence
  source 1..813: mol_type = other DNA
atggcgacgggaacccgatatgcgggaaaggtcgtcgtggttacagggggagggaggggaatcggagctgggatcgttcgcgcatttgtcaatagcggtgcaagagtggtgatctgcgataaagatgagagcggggggcgagctctggagcaggagttaccaggagccgtgtttatcctctgcgatgttacccaggaggacgacgtcaaaaccctagtctcagaaacaatcaggagatttggacgtctcgactgtgtggttaataatgccggccaccacccgcctccccaacgcccggaggagacgagcgcccagggattccggcagctccttgaactcaatcttctcggcacgtatactctgactaaactggcgttgccctatctgagaaaatcccagggaaatgtgatcaatattagtagtctagtgggggccataggacaagcccaagcggtcccttacgtggccaccaagggcgctgtgactgctatgactaaagctctggccttagacgaaagcccgtatggtgtacgggtaaattgcatcagccccggtaatatttggacacccctgtgggaagagttggccgcacttatgccagatccaagagcaaccatccgagaaggtatgctggcgcagccgctggggaggatgggacaaccagcggaagtgggagcggctgccgtgttcctggcctccgaagcaaacttttgcacgggaatagaactccttgtcactggcggtgccgagttaggatatggatgcaaagctagccgaagcaccccagtggacgccccggacatcccttcttag

SEQ ID NO: 120350 - DNA, 1164 bp, synthetic construct
  misc_feature 1..1164: note = Description of Artificial Sequence: Synthetic coding sequence
  source 1..1164: mol_type = other DNA
atgtccacattcttttccgatacagcctggatttgtctcgcagtgcctactgtgctatgtgggaccgtattctgcaagtacaagaagtccagtggacagctttggagttggatggtttgcttggccggactctgtgcagtgtgtctgttgatcctgtcaccgttttggggcctaattctttttagcgtctcgtgcttcttgatgtatacctacctctcaggacaagagctcctcccggtggatcaaaaggcagtgttagttacaggaggcgactgcggactcggacatgcactgtgcaagtacctcgatgagcttggattcaccgtgtttgccggcgtattgaatgaaaatggtccgggggcagaagaactcaggagaacatgcagtcccagattgtccgtcctgcagatggacattacaaagcccgtccagatcaaagatgcatactcaaaagtggctgccatgctccaagatcgcggtctgtgggcagtgattaataacgccggcgtgctgggctttccgactgacggagagctgctcctgatgacagactacaagcagtgcatggcggtgaattttttcgggaccgtcgaggttactaagacgttcctgccgctactgcggaagagtaaaggtagactcgtaaatgtgtcatctatgggaggcggcgctcccatggaacgcctggcaagttacggctcgtccaaggcagccgtaacgatgttctcctctgtaatgcgactggaactgtccaagtggggaattaaggttgccagcattcagcccggcggttttcttacaaacattgccggaacatccgacaagtgggagaagcttgagaaagatatcttagaccatcttcccgccgaagtccaggaggactacggtcaggattacattctggcgcagcgaaacttcctgcttttgattaacagcctcgccagcaaggacttcagcccagtgttgagagatattcagcatgccattcttgcaaaatcaccgttcgcctactataccccagggaaaggggcatacctctggatatgtcttgcccactatctcccaataggaatctacgattattttgccaaacgccactttgggcaggataagcccatgccacgggctttgcgcatgccgaattataagaaaaaggctacgtag

SEQ ID NO: 120351 - DNA, 783 bp, synthetic construct
  misc_feature 1..783: note = Description of Artificial Sequence: Synthetic coding sequence
  source 1..783: mol_type = other DNA
atgggagatgtcctggagcagttttttatccttacagggcttctggtctgcctggcgtgtttggctaagtgcgtacgatttagccggtgcgtgctgcttaattactggaaagtcctgcctaaatccttcctccgttccatggggcagtgggccgtgatcacaggggcaggggatgggataggcaaagcctacagtttcgagctagccaaacgtggcctcaatgtcgtgctgatttcgcggacccttgagaagctcgaggccatcgcgacagagatagagcggacaactgggaggtccgtcaaaataatccaggcagatttcactaaggatgacatttacgagcatataaaggagaaacttgctggcctggaaatcggtatacttgtcaataatgtgggaatgttgccaaacctgcttccctctcattttttaaatgcacccgacgaaatccagtcactcatccactgcaatatcacttcggtggtgaaaatgacacaactcatcttgaagcatatggagagtaggcaaaagggccttattctcaacatctcgagtgggatagcccttttcccatggcccctctacagtatgtacagcgcctcaaaagcttttgtctgtgcctttagcaaagctcttcaggaggagtacaaagcgaaggaggtgatcatccaggccggcttcttgtccctgatccctgcgtgggccttctattcgggtgcatttcagcgcctcctgttgactcactacgtggcctacttaaagctgaataccaaggtaagatag

SEQ ID NO: 120352 - DNA, 933 bp, synthetic construct
  misc_feature 1..933: note = Description of Artificial Sequence: Synthetic coding sequence
  source 1..933: mol_type = other DNA
atgggtgacgtcctcgaacagttctttatacttaccggcctcctcgtgtgcttagcttgtttggccaaatgcgtccgtttctctaggtgcgtccttcttaactactggaaagtcctccctaagtccttcctacgatcaatgggccagtgggctgtcatcaccggcgccggcgatgggatcggcaaggcatacagctttgagttagccaagcgaggcctgaacgtggtcctgattagtcgtaccctcgaaaaattagaggccattgcaacagaaatcgaacgcacgacaggccggagcgttaagattatccaggctgactttacaaaggatgacatatatgagcacattaaggagaaactggcaggcttggagatcgggattttagtcaacaatgtcggcatgctccccaacctgcttccaagccacttcctaaacgctcctgacgagatccaaagcctcatacactgtaacataacctctgttgtgaagatgacccagctgatcttaaagcatatggaatctcgacagaaggggttgatcctgaatattagcagtggcatcgctttgttcccatggcccctatattccatgtatagcgcctccaaagcgttcgtttgcgccttttccaaggcactgcaggaggagtacaaggctaaggaggtgatcatccaggtgctgactccatatgctgtgtctactgctatgacaaagtaccttaacacaaacgttatcacaaaaactgctgacgaattcgtcaaggaaagcttgaactacgtcactatcggcggcgagacttgtggatgcctcgcccacgaaatcctggcgggtttcctgtcccttatccctgcttgggccttttacagcggggctttccagcgcctcttactgactcactacgtggcttatctcaaactgaacacgaaggtccgctag

SEQ ID NO: 120353 - DNA, 2211 bp, synthetic construct
  misc_feature 1..2211: note = Description of Artificial Sequence: Synthetic coding sequence
  source 1..2211: mol_type = other DNA
atggggtcacctcttcggtttgatggacgagtcgttctagtgacaggtgccggtgccgggctgggtagggcgtatgcattagccttcgcagagaggggtgccctcgtggtggtaaacgacctggggggtgattttaagggtgtggggaagggatccttggcagctgataaagttgttgaagagattagacgacggggagggaaggcagttgctaattatgactccgtcgaggagggtgaaaaggtcgtgaaaactgctctggacgcctttggacgaatcgatgtggttgttaacaacgccgggattctccgtgatagatccttcgctagaatctccgatgaggattgggatatcatccatagagtacatttacggggttcattccaggttaccagggccgcatgggaacacatgaaaaaacaaaaatacggacggatcattatgacgtcctccgctagcggcatctatgggaatttcggacaagccaattattctgctgctaaactaggcttactcggcttggcgaactctctggcaattgaaggccggaagagcaacatccactgcaatacaatcgcacctaatgcaggatcaaggatgacccagactgtcatgcctgaagatttggtggaagctctcaagcctgagtatgtcgctcccctggtcctgtggctgtgtcatgagagctgtgaggagaacgggggcctgtttgaggtcggagcggggtggattggaaagctgcgctgggagcggaccttgggtgccatcgtcaggcagaagaatcatcctatgaccccggaagctgtgaaggcaaattggaagaaaatttgcgacttcgagaacgccagcaaaccacagagtatccaggaatctacagggtccattatcgaggttctttctaagatcgattccgagggaggcgtctccgcaaaccatacttcccgagcgacatcaactgctacttcaggctttgctggcgccatcggacaaaaactaccgccattctcgtacgcttataccgagctggaagctattatgtatgctcttggggtgggcgcatcaattaaagatcccaaagacttgaagtttatatatgagggatcctcggatttctcttgtctgcctactttcggagttatcatcggccagaaatctatgatgggcggtggcctggccgaaattcccgggctctcaatcaattttgccaaggttctgcacggcgaacagtatttagaactgtacaagcctcttccaagggcaggcaagttgaaatgtgaagctgtcgtggctgacgtgctggataaagggtctggagtggtgattattatggacgtctacagctattccgagaaggagctgatctgccataaccagtttagcctgttcctcgttgggagtgggggatttggcgggaaacgtacttctgataaagtgaaagttgcagtggccattcccaaccgtccgccggatgctgtccttaccgacactacatctcttaaccaggccgctctgtaccgattatccggtgattggaatcctttgcatatcgaccctaactttgcatctcttgccggcttcgataaacccattctgcacggtctatgtactttcggattcagtgctagaagagtgctgcaacagttcgctgacaatgatgtctcacgttttaaggcaatcaaagccagatttgcaaagcccgtgtatccaggacagaccctgcagaccgagatgtggaaagagggcaaccgcatccactttcaaactaaagtgcaagaaaccggcgacattgtcatatctaacgcctatgtggatctggctccaacttcaggcactagcgcgaaaacgccgagcgaaggaggcaagctacagagcacattcgtgtttgaggagattggcaggaggttaaaggacatcgggcccgaggttgtcaagaaggttaacgcagtatttgagtggcacattactaaagggggaaacataggtgccaaatggactattgatctgaaatcggggtccggaaaggtgtatcagggacccgcaaagggagccgcagatacgacgatcatcttgtcagacgaggatttcatggaagtggtgctcggcaaactcgaccctcaaaaggccttcttctcaggccgccttaaggctaggggcaacatcatgctgtctcagaagctccagatgatcctgaaggattacgctaagttgtag

SEQ ID NO: 120354 - DNA, 2286 bp, synthetic construct
  misc_feature 1..2286: note = Description of Artificial Sequence: Synthetic coding sequence
  source 1..2286: mol_type = other DNA
atggtcatcctcgaagctccccatctcctgcgaaggaaagaaccagagacccccgggctgtcctcgaggatcggcccctctctatgtcccggattttgcaggaagcggtccgtctcctgctgttttcagaacctgtgcaataacccgatggaaaagataattagtcaatgtaggttctttgtgagcatgaacgaccttgggggggattttaagggggttggcaagggtagcctggcggcagacaaggtggtggaagagattcgccgcaggggaggcaaagcagtcgccaattacgactcggtcgaggaaggcgaaaaggtcgtcaaaaccgcattggacgctttcggccggatcgacgtcgtggtgaacaacgctggcatcctccgcgaccgcagtttcgcaagaataagcgacgaggattgggacataattcatagagtgcatttgagaggctcctttcaggtcacccgggccgcgtgggagcacatgaaaaagcagaaatatggtaggatcattatgacctcctctgcttccgggatttatggcaactttgggcaggctaactattctgccgctaagctgggactgctcgggctggctaactctttagccatagaagggaggaagtccaatatccactgcaatactatcgctcctaacgctggcagcaggatgactcagacagtgatgcccgaggatctggttgaggcactcaaaccagagtacgtcgccccccttgtgctgtggttgtgccacgagagctgcgaggaaaatggagggttgttcgaggtaggcgccgggtggatcggtaagctgcgctgggagagaaccctcggggctatcgtaagacagaagaaccatccaatgaccccggaggctgtaaaagccaactggaagaaaatctgtgactttgagaacgcctccaagccacagtccattcaggagagcaccgggagcattatcgaagtcttatccaagattgattccgaggggggagttagtgcaaatcatacttctagagccaccagcacagctacctccggcttcgccggggcaatcgggcagaagttgcctcctttcagctacgcctatacagagctggaggcaatcatgtacgctctgggagtgggcgccagtatcaaggatcctaaggacctcaaattcatctacgaagggtccagtgactttagctgtctgccaacgtttggcgtaataatcggacaaaagagtatgatggggggggggctcgcagaaattcctggcctctctatcaactttgctaaggtcttgcatggggagcaatatcttgaactgtacaagcctctccctcgcgcagggaaactgaaatgcgaggcggttgtggcggatgtgcttgataagggctcgggtgtggtgatcatcatggacgtgtacagttacagcgaaaaggagttgatttgtcataatcagttcagcctgtttcttgttggctccgggggcttcggaggtaagagaacctctgacaaggttaaagtggcagttgccatacctaacaggcccccagatgctgtgctgaccgacacaacttcccttaatcaagctgccctctatcgcctgagcggcgattggaatcccctgcacattgacccaaattttgcctccctggctggatttgataaacctatccttcacggactttgcacgttcggcttttcagcacggagggtgctccaacagtttgccgacaacgacgtcagtcgattcaaagctattaaggctagatttgcaaaacctgtttatcctggccagaccttgcagactgagatgtggaaggaaggtaatcggatccactttcagaccaaagtgcaggagacaggagatattgttatctctaatgcctacgttgacctcgctcctacaagtggtactagtgcgaagacacccagcgaaggggggaagctgcagagtacgttcgtcttcgaggaaattggcagaagactcaaagacattgggccagaggtggtgaagaaggtcaatgctgtgttcgaatggcacattaccaaaggggggaacataggggccaaatggactattgatctcaagtccgggagcgggaaggtgtatcaaggacctgccaagggcgcggcggacacaactattatactgagcgatgaagacttcatggaggtggtattaggaaaattggaccctcagaaggcattcttttcggggcggcttaaagcccgcggtaacatcatgctcagccagaaattacagatgattctgaaggattacgctaaactatag

SEQ ID NO: 120355 - DNA, 2139 bp, synthetic construct
  misc_feature 1..2139: note = Description of Artificial Sequence: Synthetic coding sequence
  source 1..2139: mol_type = other DNA
atggaaaagattattagccagtgcaggttttttgttagcatgaatgacctgggtggtgatttcaaaggcgtcgggaaagggagcctggcagctgacaaggtcgttgaagaaatcaggagaaggggcggcaaagcagtagctaattatgactccgttgaggagggcgagaaggtcgtgaaaaccgctctggatgctttcggcaggatcgacgtggtagtgaataatgccggcatactgagagatagaagcttcgcacgcatcagtgacgaggactgggacattatacatcgtgtgcatttacgagggtcttttcaggtcaccagggcggcatgggagcacatgaagaagcagaagtatggaagaatcatcatgacctcgagcgcatcaggtatttacggcaacttcgggcaggcgaactactcagcggctaagctgggcttattaggattagcaaactcccttgcaatcgaggggagaaaatccaatattcactgcaacacaatcgcccctaatgcgggctcacgcatgactcagactgtgatgcctgaagacttagtggaagcgctgaaacctgaatacgttgctcccttggttttgtggctctgccatgagtcctgcgaagagaatgggggcctgttcgaagtgggagccgggtggattggaaaactgaggtgggagaggaccttgggggcaatagtgcggcagaagaatcatccgatgaccccggaggccgtgaaggctaattggaagaaaatatgtgattttgagaatgcttccaagccccagtcgatccaagagtctaccggctcgattattgaggtcctgagcaagatcgattcagagggaggagtgtcagccaaccacacaagcagagcgacctccactgctacctccgggtttgcgggtgctatcgggcagaagcttcctcccttctcctatgcctacacagagctcgaggctatcatgtacgctttgggagtgggtgcctcgattaaggatcctaaggatctcaaatttatctacgaggggtcttcggatttctcttgcctgcccaccttcggtgtgattattggacagaaaagcatgatggggggcgggctggccgaaatccctgggctaagtatcaactttgcaaaggttcttcacggcgagcagtaccttgaattatataagcctttgcctcgcgccgggaagttaaagtgtgaggccgtggtcgccgacgtactggacaaaggatccggggtcgtgatcataatggatgtgtatagctacagcgaaaaggagcttatctgccacaatcagttcagcctgttccttgtagggtccggaggttttggggggaagcgcacgagcgacaaagttaaagttgctgtggctatccctaaccgcccacctgatgccgttctcactgacacgacctcgcttaaccaggccgcgttatatcggctctccggcgactggaacccattgcacattgaccccaactttgctagcctggcaggattcgataagcccatcctccatggtctatgcacttttggttttagcgcacgccgggtcttacagcagtttgccgacaacgacgtgtcccgctttaaggccatcaaggctagattcgccaaaccggtgtacccaggtcagacactgcagactgagatgtggaaagaagggaaccggatccacttccagacgaaggtacaggaaacaggggacatagttatatctaacgcatacgtagacctggcccctaccagtggcaccagcgccaagactccatccgagggcggtaagctgcagagcacattcgtatttgaagagattgggcggagactcaaggacatcggcccagaggtggtgaagaaggtgaacgctgtgttcgagtggcatatcactaagggggggaacatcggggccaaatggactattgatctgaagtcgggtagtggtaaggtctaccagggacccgcaaaaggggctgcggacacaactataattctaagtgacgaagacttcatggaggtcgttctcggtaaattggatccccaaaaggcattcttttctggtcgactgaaggcccgggggaacattatgcttagtcaaaagctgcagatgattcttaaagattatgcaaaattgtag

SEQ ID NO: 120356 - DNA, 1800 bp, synthetic construct
  misc_feature 1..1800: note = Description of Artificial Sequence: Synthetic coding sequence
  source 1..1800: mol_type = other DNA
atgaagaagcagaagtatgggcggatcataatgacttcctccgccagcggcatctatggcaatttcggtcaggctaattactctgctgcaaagcttggcctcctgggattagctaacagcctagcaatcgaggggaggaaatcgaatatacactgtaataccatagcccccaatgcaggatcacgaatgactcagacagtcatgccagaggacctggtggaagcgctgaagcctgagtatgttgctccattggtgctgtggctctgccatgagtcttgcgaagagaatggaggcctgttcgaggtgggtgccggatggatcggcaagctaaggtgggagaggacgctgggtgctattgtccgccagaagaaccaccccatgaccccggaggcggtgaaggccaactggaagaagatttgtgatttcgagaatgcctctaagccacaatccattcaggaatctacgggcagtatcatagaggtcctctccaagatcgattcagaaggaggagtgagtgctaatcatacgagccgggctacaagcacagctaccagcggatttgctggcgcgattggtcagaagctcccaccatttagctacgcctacacagagcttgaagccatcatgtacgccttgggtgtcggcgcatccattaaggacccaaaggacttgaagtttatctacgagggatcatccgatttttcatgcttacccacctttggagtgattatcggccagaagtcgatgatgggtggcggcttagccgaaatccctggcctgagcataaacttcgcaaaagtgctgcacggcgagcagtaccttgagctctataagcccctgccacgcgcggggaaattgaagtgcgaggcagtggtagcagacgttcttgataagggatctggcgtggtgatcatcatggatgtgtactcttattcggagaaggagctgatttgtcataatcagttctctctgtttctggtggggagtggggggtttggcggcaagcgaacgtccgacaaggtcaaggttgcagtggctattccgaataggcccccggatgccgtgctgaccgataccaccagtctgaatcaagcagcactgtatcggctgtctggagactggaacccgttgcacatcgacccaaacttcgcgagtttggccgggttcgacaagcccattttgcacgggttatgtacctttgggttttcagcaaggcgggtgttacagcaattcgccgataacgatgtgagccgatttaaagctattaaggccaggtttgccaagccagtctacccagggcagaccctccagaccgaaatgtggaaggagggtaaccggattcacttccaaaccaaagtccaggaaacaggcgacatcgtcatctccaacgcatacgtggacctggctcccactagtggcacctccgccaaaacacctagtgagggtgggaagttacaatcgacattcgtatttgaagagattggccggcgcctgaaggacatcggtcctgaggtcgttaagaaagtgaatgctgtattcgaatggcacatcactaagggcggcaacatcggcgcaaagtggactattgaccttaagtccggctccggtaaggtgtaccaggggccagccaagggggccgccgatacaaccattattctcagtgatgaggacttcatggaagtagtattaggaaaactcgacccccagaaagctttttttagcggccggcttaaggcccgcggaaatattatgctgtcccaaaaactccagatgatcctgaaggattacgccaagttgtag

SEQ ID NO: 120357 - DNA, 2157 bp, synthetic construct
  misc_feature 1..2157: note = Description of Artificial Sequence: Synthetic coding sequence
  source 1..2157: mol_type = other DNA
atgggttccccactccggttcgatggcagggtcgtcctcgtcaccggcgccggtgcggttaacgatctggggggcgatttcaaaggcgtgggaaaggggagcttagctgctgataaggtggttgaggagatacgccggcgcggcggcaaggctgttgccaactatgacagcgtggaggagggagaaaaagtcgtcaagaccgcactcgacgcctttggcaggatcgatgttgttgtgaataacgccgggatcttgcgggatcggtctttcgcccggatctcagacgaggattgggatatcatccaccgagtgcatctgagagggtctttccaggtgacccgtgcagcctgggagcacatgaagaagcagaaatatggacgaattattatgacatcatccgccagcggaatatatgggaactttgggcaggccaattatagtgcggcgaagctggggttgctaggtcttgcaaatagtctggccattgaggggcggaagtccaatattcactgcaacaccatcgcccctaacgctggctcccgtatgacccagacagttatgccggaggacctggttgaagcactcaagccggagtacgtggcccctctggtgctctggctgtgtcatgagtcttgcgaggagaacgggggtctgtttgaagtaggcgcgggatggatcggcaagcttcgatgggagcggacgttgggagccatcgtgcgccagaaaaaccatccaatgacccctgaggctgttaaagccaattggaagaaaatctgtgattttgagaatgcatctaaaccacagagcattcaagaaagcactgggagcatcatagaggtgctgtcgaaaatcgatagcgagggcggtgtaagtgctaatcacacaagtcgtgccacttccaccgccacaagcggatttgctggggccattgggcaaaagcttcctccattttcttacgcttataccgagcttgaggctattatgtacgccctgggagtgggcgcgagcataaaagacccaaaagatctgaagttcatttatgaagggtcgtcagacttcagctgcctgcccacatttggtgtcataatcggtcaaaagagtatgatgggtggcgggctagctgagataccaggcctgtctataaactttgcgaaagtgcttcatggggagcaatatctggagctgtacaagcccctgccacgggcaggtaagcttaaatgcgaggctgtggtagcagatgtgcttgacaagggttccggcgtagtcattatcatggatgtatatagttacagtgagaaagaactcatttgtcacaaccagttttcactgtttctcgttggttccggcggctttggaggtaagaggaccagcgataaggtaaaggtcgcggtggctatcccaaatcgccctccagacgctgtcctgacagacaccacctccttgaaccaagctgccttgtatcggttgtcaggagactggaacccccttcacatagacccaaacttcgcatctttggcaggttttgacaagccaatcctgcatgggttatgtacatttggctttagtgcgagacgcgtcctgcagcagtttgccgacaacgacgtgtcaaggttcaaagccataaaagctcgatttgcaaaaccagtgtaccccgggcagaccctgcagacggagatgtggaaggagggaaaccgcatccacttccaaaccaaggtccaggaaaccggcgacattgtaatctccaacgcgtatgtggatctggctccgacctcgggtacttccgctaagaccccctctgagggaggaaagttgcagtccactttcgttttcgaggaaatcggcaggcgcctaaaggacattggccccgaagttgtaaaaaaggttaacgctgtctttgagtggcacattactaaggggggcaacattggtgccaagtggaccatcgaccttaaatctggttcagggaaggtctaccagggccctgccaaaggcgcagcagacacgaccatcatcctaagcgacgaagactttatggaggttgtacttgggaaactggacccccagaaggctttcttttctgggcgcctcaaagcccgcgggaacatcatgctatcacagaagcttcagatgatactgaaggactatgctaagctttag

SEQ ID NO: 120358 - DNA, 1026 bp, synthetic construct
  misc_feature 1..1026: note = Description of Artificial Sequence: Synthetic coding sequence
  source 1..1026: mol_type = other DNA
atgcgaaaagtggtcctgattacgggcgcaagcagcggcataggtctggctctgtgcaagcggcttcttgctgaagacgatgaactgcatctttgcctagcgtgtcgcaatatgtcaaaggccgaggccgtttgtgcggccctgctggccagtcaccctactgccgaagtgactattgtgcaggtggacgttagtaatctgcaaagtgtgttccgcgcctcaaaggagctgaagcagcgcttccaacgacttgattgtatttacctcaatgccggcatcatgccgaacccacaactgaacatcaaggcactgttcttcggactgttttctcgcaaagtgatccacatgtttagtacagccgaaggtctgcttacacaaggagacaaaattactgccgacggcttgcaagaggtgttcgaaacgaacgtgttcggtcattttattcttatccgggagctggaaccactgttgtgccacagtgataatccttcccagctgatctggacttcatccaggagcgcacgaaagtcgaatttcagtttagaagactttcagcactccaagggaaaggagccttacagcagcagcaagtacgcaacagatctgttatctgtggctttaaacagaaactttaaccagcagggcctgtactccaatgttgcctgtccaggaacagcactcacaaatctgacctacggtatactgccaccctttatctggacactgctcatgcctgctatcctgctactccgcttctttgcaaatgcgttcaccctcacaccctataacgggacagaagctttagtctggctctttcatcagaaacctgagagccttaatcctctgattaaatacctgtctgccactactggtttcggccggaattacatcatgacccagaagatggatctggacgaagacactgcagaaaagttttatcagaagctcttagaactcgagaaacacataagagtcaccattcagaagaccgataaccaggccagactctcagggagctgtctttag

SEQ ID NO: 120359 - DNA, 336 bp, synthetic construct
  misc_feature 1..336: note = Description of Artificial Sequence: Synthetic coding sequence
  source 1..336: mol_type = other DNA
atgagaaaagtggtgcttattactggcgcttcttcgggaattggccttgcgctgtgtaagcgcctgctcgcagaagatgacgaactccacttgtgtttggcttgccgcaacatgtctaaggccgaggccgtctgtgcagccttactcgcttcacatccaaccgcagaggttacaatcgtccaggttgacgtgagcaacctgcagagcgtgtttagagcctctaaggagcttaagcagcggtttcaaagactcgactgcatctacctcaatgctgggattatgccaaacccccagctgaatattaaggcccttttcttcggtctgttcagctcttag

SEQ ID NO: 120360 - DNA, 255 bp, synthetic construct
  misc_feature 1..255: note = Description of Artificial Sequence: Synthetic coding sequence
  source 1..255: mol_type = other DNA
atgaggaaagtcgtcctgatcacaggggcaagtagtgggattggccttgctctctgtaaacgtcttctagctgaggacgatgagcttcacctgtgcttggcgtgtaggaacatgagcaaggctgaggcagtttgcgccgcacttcttgcatcgcatcctaccgctgaggttacaatcgtccaagtggacgtgtctaacctccagtcagttttcagagcaagcaaggaactcaaacagcggtatataagctgttag

SEQ ID NO: 120361 - DNA, 921 bp, synthetic construct
  misc_feature 1..921: note = Description of Artificial Sequence: Synthetic coding sequence
  source 1..921: mol_type = other DNA
atgcgtaaagtggtcctgatcaccggcgcttcatcaggaatcggcttggcactgtgtaagagactacttgccgaggacgacgagctgcatttgtgcctcgcctgtcggaacatgtccaaggcggaagcggtgtgtgctgctctgctggcatcgcaccccacagcggaagtgacaatcgtgcaggtggatgttagtaatctccaatctgtgttccgtgctagcaaggagctgaagcagcggttccagaggctggactgcatctacctcaacgcgggcatcatgcctaatccccagctcaacattaaagctctgttcttcggactgtttagtaggaaggtcattcacatgttctcaacagcggaaggactgctcacccagggtgacaaaattactgctgatgggctccaggaggtgtttgagaccaacgtttttgggcactttatcctgatacgggaactggaacccctactgtgccattcagataatccctcccagctgatctggacatcttccagatcagcccgcaaatctaatttctccctcgaggatttccagcactcaaaggggaaagagccttacagttcttccaagtacgccacagatcttctatccgtcgccttaaaccgtaactttaaccagcaactgcggttttttgcaaacgcatttaccttgacaccctacaatgggacagaggccctggtgtggctctttcatcagaaacccgagtctctgaaccctctcattaagtacctctctgccaccacaggattcgggagaaattatatcatgacacagaagatggatctggatgaggatacggccgagaaattttaccagaagctcctcgagcttgagaaacatatccgggtaactatccaaaagactgataatcaagcacggctgtcaggctcctgtctttag

SEQ ID NO: 120362 - DNA, 360 bp, synthetic construct
  misc_feature 1..360: note = Description of Artificial Sequence: Synthetic coding sequence
  source 1..360: mol_type = other DNA
gttgttattcgcgaactggagccattgctgtgccattccgataacccttctcagttgatctggacttcctcaagatctgctcgcaaatcaaacttttcactcgaagattttcagcactccaaagggaaggaaccgtacagctccagtaagtacgccactgatctactgtctgtggcactgaatagaaactttaaccagcagctgaggttcttcgccaacgctttcaccctcacaccatataatggtaccgaagccctggtgtggctatttcaccaaaagccagagtccctgaaccctctaatcaagtacctttcggccaccacggggttcggacgaaactacatcatgacgcaaaagtag

SEQ ID NO: 120363 - DNA, 966 bp, synthetic construct
  misc_feature 1..966: note = Description of Artificial Sequence: Synthetic coding sequence
  source 1..966: mol_type = other DNA
atggaacggaaaaaccaaacggctattacggagtttatcattcttggcttctctaacttaaatgagtggcagtttttactgttcacgatctttttcctgacatacttttgcacccttggaggaaacattcttataatcctcaccactgtcacggaccctcacctacacacgcctatgtactactttctcggcaatctcgcgtttatagacatatgctacaccacatctaacgtcccccagatgatggtgcaccttctgtccaaaaagaagagcatttcctatgtggggtgcgttgtgcagctgtttgcctttgtattctttgtgggttcagaatgtcttctactcgctgctatggcctatgataggtatatcgcgatttgcaacccgcttagatacagcgttatcctgtcaaaggtgctctgtaatcagctggccgccagctgttgggctgccgggttccttaattcagtcgtccataccgtactcaccttctgcctcccgttctgtgggaataaccagatcaattatttcttttgcgacattccgcccctcctgatcctgtcttgcgggaacacctcggtcaacgagctggctctgctttcaactggggtttttatcggttggactcctttcctctgtatcgtcttgtcctacatctgcatcatctcaaccatcttgcggatacagagtagtgaggggaggcggaaggcgttctccacttgcgcctcccacctcgccatcgtgttcctattctacggctccgccatattcacctatgtccgtcctatctccacatactcactgaaaaaggacagacttgtgagcgttctgtactcggtggtgacgccaatgctgaaccctataatatacaccctgaggaataaggacatcaaggaggccgtaaagacgataggatctaaatggcagcctccaatatcgtctctggacagcaaactgacatactag

SEQ ID NO: 120364 - DNA, 786 bp, synthetic construct
  misc_feature 1..786: note = Description of Artificial Sequence: Synthetic coding sequence
  source 1..786: mol_type = other DNA
atggcaagtcagctccagaatagacttagatccgccttggcactggtcaccggcgccggctcaggcataggcagggccgtgtcagtccgcctggcgggagagggcgccaccgtggcagcttgcgaccttgaccgcgccgcagctcaggagactgttaggcttctgggcggccctggttctaaggaaggtccgccacggggaaatcatgcggccttccaggccgatgtcagcgaggcgcgcgccgccagatgcctgctggagcaggtgcaggcctgcttcagtcgccctccttcagttgtggtgtcatgcgccgggatcactcaggacgaattcctgctgcacatgtcagaagatgattgggataaagtgatcgcagtgaatttgaaaggaacttttctggttactcaagctgccgcccaggccctagtctctaacgggtgtagaggttcgattatcaacatctctagtattgtcgggaaggtgggcaacgtcggacagacgaactatgccgcgagcaaagccggcgtcatagggctgactcagacggccgcccgggaactcggaaggcatggtattcgatgtaacagtgtgctgccagggttcatcgcaacccccatgactcagaaggtgccgcaaaaagtggtggacaaaatcactgagatgattcctatgggacatctgggcgaccctgaagacgtggcggatgttgtcgcttttttggcctcagaggacagcggttatataacaggtacctctgtagaagtgacagggggacttttcatgtag

SEQ ID NO: 120365 - DNA, 786 bp, synthetic construct
  misc_feature 1..786: note = Description of Artificial Sequence: Synthetic coding sequence
  source 1..786: mol_type = other DNA
atggctagccagttgcaaaatcgcttgcggagtgcattagcccttgtaaccggggcagggtccgggattggccgtgcggtgtccgtgagattggccggagaaggtgcaactgtggccgcttgtgatctggatagagccgccgcccaggagaccgtgagactcctggggggtcctggcagcaaggagggaccaccccgggggaaccatgcggctttccaggcagatgtgtctgaggcccgagctgctcgatgtctactggagcaggtccaggcttgtttctccagaccaccctcagtcgttgtgtcttgcgctggcatcactcaagacgagtttctgctccacatgagcgaggacgattgggacaaagtcattgctgtcaatctcaaggggacattcctggtcacccaagccgctgcccaagcattggtgtctaacggctgcaggggctcaatcatcaacatatcaagtatagtgggaaaagtggggaatgtcgggcagacaaactacgccgcatctaaagcaggcgtcattggtctcacacagacagctgccagggagttaggcagacatggcatcagatgtaactccgtgcttcccggattcattgctactccaatgacacaaaaggtcccccaaaaggtggtcgataagattacggagatgataccaatgggtcatcttggggacccagaggacgtggctgatgtggtggcttttctcgctagtgaggactctggttacatcaccggcacctcggtggaggttactggtggtctctttatgtag

SEQ ID NO: 120366 - DNA, 786 bp, synthetic construct
  misc_feature 1..786: note = Description of Artificial Sequence: Synthetic coding sequence
  source 1..786: mol_type = other DNA
atggcctcgcagctgcagaatcgacttcgttccgcacttgcccttgtgaccggcgccggcagtggaattggccgggctgtgagcgtccgcctggcaggggaaggagctacggtcgccgcctgtgacctggatcgcgcagccgcccaggagaccgtgaggctcctagggggtcccggatccaaagagggcccacccagaggtaatcatgccgcgttccaagccgacgtttctgaagctcgcgcagcacggtgtctgctagagcaagtgcaggcctgtttttcccgccctccatctgttgtggtgagctgtgccggtatcacacaggatgagttcctcctgcatatgtctgaagacgattgggataaggttatcgcggtcaatctgaaaggtaccttcctggtaacccaagcagcagcccaggctctggtgtccaacgggtgtcgcgggagcataatcaacattagttcaatcgtgggcaaggttggcaatgttggccagactaactatgcggccagcaaagccggagtcatcggtcttacccagacagctgctcgggagttgggccgccatggtatccgatgtaactccgtgctgcccggattcatcgccacaccaatgacccaaaaggtacctcagaaggttgttgataagataaccgagatgatccctatgggccacctaggcgaccccgaggacgtcgccgatgttgtggcctttctcgcttctgaagactcagggtatataaccgggacttctgtggaagtgactggaggactattcatgtag

SEQ ID NO: 120367 - DNA, 786 bp, synthetic construct
  misc_feature 1..786: note = Description of Artificial Sequence: Synthetic coding sequence
  source 1..786: mol_type = other DNA
atggccagccagttacagaatcgactgcgaagcgccctggcactcgtcacaggcgccggatccggtattgggagggccgtgtccgtacgcttagccggggaaggcgccacagtggccgcgtgtgacttggaccgggccgccgcacaagagacagtgagactcctggggggccctggaagtaaggagggccccccaaggggcaaccacgctgcctttcaagcagacgtctcggaggcccgcgcggcgagatgcttgcttgaacaggttcaggcctgtttttcccgcccacccagcgtagtcgtgtcttgcgccggcattacccaggatgaatttctcctccacatgagtgaggacgactgggataaggttattgctgtgaacctgaaaggaactttcctggttacccaggccgcggctcaagcacttgtgtctaatggctgcagaggtagcattattaatatttcatcgatcgtggggaaggtgggaaacgtggggcaaactaattacgctgcatcaaaggctggagtcatcggcctgacccagaccgctgcccgggagctggggagacacgggatcaggtgcaacagcgtgctgccagggttcattgctactcccatgacccagaaggttcctcagaaggtcgtcgacaagattacggagatgatcccaatgggccacctgggcgatcccgaggacgttgccgacgtggtagcctttctggcctccgaggatagcggatacatcactggcacctctgtggaagttaccggtggactgttcatgtag

SEQ ID NO: 120368 - DNA, 786 bp, synthetic construct
  misc_feature 1..786: note = Description of Artificial Sequence: Synthetic coding sequence
  source 1..786: mol_type = other DNA
atggccagccagctccagaatagactgaggagcgctctcgcgttggtcactggcgcaggcagcgggattgggagggccgtgagtgtccgccttgcaggtgaaggagcgaccgtcgctgcctgcgatctcgatcgggctgccgcgcaggaaaccgtgcggctcctgggaggccctggttccaaagaagggccgccccgtgggaatcatgccgcctttcaagctgacgtgtcagaggctcgcgcagctaggtgcttgctcgaacaggtgcaggcctgtttttctcggccaccttctgtagtcgtttcctgcgcaggcattacacaggacgagttccttctgcatatgtcagaggacgattgggataaggtaattgcagtcaacttaaaaggcacctttctggtgacccaggccgccgcgcaagcccttgtgagtaacggctgccgaggctcaattattaatatttcttccatcgtcggcaaggtcgggaatgtcgggcagactaactacgctgcttcaaaggcgggggtcattggcttaacccagacagcagcccgggagttaggaagacacggtattagatgcaattcggtgctacccggcttcatagccacaccaatgacccagaaggttccacagaaggtcgtggacaagatcactgagatgatcccaatgggtcacctgggggaccctgaggatgtcgcagatgtagtggcatttcttgcatccgaagactcagggtatattactgggacttccgtggaagttacaggaggcttgttcatgtag

SEQ ID NO: 120369 - DNA, 1848 bp, synthetic construct
  misc_feature 1..1848: note = Description of Artificial Sequence: Synthetic coding sequence
  source 1..1848: mol_type = other DNA
atggtgtccggaccacttgccctgaggtggtgcgcttgggctggacgcggcgacatgggaccagatatggagctgccgtcgcactcaaagcaattgctgctgcagttgaatcagcaaaggacaaaaggtttcctgtgcgatgttattatcatggttgagaatagcatctttagggcacacaagaatgtgctggccgcatccagcatttactttaaatctttagtgttgcatgataacctgattaatctggataccgatatggtatcttctacagtgtttcagcagattctagatttcatctacactggcaaattgctccctagtgatcaacccgcggagccgaacttttctaccctgctgaccgccgcgtcatatctccagcttcccgaattggccgcactgtgtaggagaaagctgaagagagcgggcaaaccattcggcagcggtagggccggttccaccggtatgggccgtccacctaggagtcagcgtctctccaccgctagtgtgattcaggcgagataccaggggctggtggatgggcgcaaaggcgcccatgcaccccaggaactcccacaggccaaagggtccgacgatgagctatttttgggtggatccaaccaagactcagtgcaagggcttggtcgtgcagtctgccccgccggaggtgaggctggactgggagggtgctccagctcaaccaatggctcttccggaggctgtgagcaggagctcgggctcgacctgtctaaaaagtcgcccccactgcctccggccactcccgggccgcacctcactcctgatgatgcagctcagctgagtgattctcaacacggctctcctccagccgcttcagcccctcctgtcgctaatagcgcgtcttactcagaactcggtggcacccccgatgaaccgatggatttagaaggcgccgaggacaaccatctgtctctgctcgaagccccagggggccaaccacggaagagtttaaggcacagcacaagaaagaaggaatgggggaaaaaggagccagtggctggttcaccctttgagagacgggaagccggccctaaaggcccttgcccgggagaagagggtgagggcgtcggtgaccgagtaccgaatggtattctggctagcggtgccggcccatcagggccatatggcgaacccccgtacccgtgcaaggaggaggaagagaacggaaaggatgcctcagaagactcagctcaatctggttcagaaggcggctctgggcacgcctcagcgcactacatgtatagacaggaagggtacgagactgtgtcttatggagataacttatatgtgtgtattccatgcgcgaaaggcttcccatcaagtgaacagcttaacgctcatgtagaaacacacacggaggaagaactgttcattaaggaagagggtgcttacgagaccggatccggaggggcagaagaggaggctgaggacttgagcgcgccttctgcagcctatactgccgagccacgccctttcaagtgctcagtgtgtgaaaaaacttataaggaccctgcaaccctgcggcagcacgagaaaacgcattggctaaccaggccgtttccttgcaatatttgtggtaagatgtttactcagcgcggaacaatgacccgacacatgagatctcacctggggctgaaacccttcgcctgcgatgaatgtgggatgcggtttacccgtcaatacagattgaccgaacatatgcgagtccactctggagagaaaccctatgagtgtcagctctgtggaggtaagttcacccagcaacggaacttaatctcccacttgagaatgcatacaagccctagctag

SEQ ID NO: 120370 - DNA, 1848 bp, synthetic construct
  misc_feature 1..1848: note = Description of Artificial Sequence: Synthetic coding sequence
  source 1..1848: mol_type = other DNA
atggtgagcggcccgcttgctctgcgatggtgcgcttgggcaggacggggagatatgggccctgatatggagctcccatctcattctaaacagctcctactgcagttgaatcagcagaggactaagggattcctgtgtgacgtgatcattatggtcgagaacagtatattccgggcccacaaaaacgtgttagctgcctcaagcatctacttcaagtccctcgtgttgcacgataatcttatcaatctggacacagatatggtgtcatccaccgtgttccagcagatactggacttcatctatacaggtaaactgctccctagcgatcagcccgcagagccaaattttagtacccttttaaccgcagcctcatacctccaactcccagaactggcagccctttgccgacgcaagctgaaacgcgccgggaaaccttttggatccggccgcgctggcagtaccggcatgggccgccccccacgaagtcaacggctctctacggcaagcgtcatccaggccaggtaccagggcctcgtcgatggccgaaaaggggcacacgcaccccaggaactgcctcaggccaaggggtcggacgacgagctgtttctcgggggctctaaccaggattccgtgcagggcctgggaagagctgtttgtcccgccggaggcgaagcaggcttgggggggtgcagctcctcgacaaacggaagtagcgggggttgtgaacaagagttgggcctggatctgtctaagaagtctccccccctccctccagcgacacctgggcctcacctgacccctgacgatgccgcgcaactgtccgatagtcagcacggcagtccccctgccgcttccgcgccacccgttgccaactctgcatcatatagcgagctcggggggacaccagacgaacccatggatttggagggagctgaggacaatcatctgtcactgctcgaagcgccaggtggccagcctcgtaagtctctacgccactcaacccggaagaaggaatggggcaaaaaggaacctgttgccggttctccgtttgagaggagggaggccggacctaaaggcccatgtccaggggaagagggagaaggtgtcggcgaccgggtgccgaacggtattctggctagcggagctgggccttccggaccatacggggagccaccctacccctgcaaagaggaagaagagaatggcaaggacgcctcagaggattccgcacagtctggaagtgagggcggctccgggcacgctagcgcacattacatgtaccggcaagaaggatacgaaaccgtatcctatggagacaacctgtatgtgtgtatcccgtgtgcaaaaggctttccaagttcagagcagctgaacgcacacgtggagactcataccgaagaggagttgttcatcaaagaggagggagcctatgagaccggtagtggaggcgcagaagaagaagcagaagacctctccgcaccgtcggctgcttatactgccgagccgcggcccttcaaatgcagcgtatgtgaaaagacatacaaggatccagccacactccggcagcatgagaaaactcactggctcacacgtccattcccctgtaacatttgcggcaaaatgttcacccagcggggcaccatgacaaggcatatgaggtcccacttgggactgaagccttttgcctgcgatgaatgcggcatgcggttcacgaggcagtatagactgacggaacatatgagagtgcactccggggagaagccttatgaatgccagctttgtgggggcaaattcactcagcaacgtaacctgataagtcatcttaggatgcacacatccccgtcctag

SEQ ID NO: 120371 - DNA, 1848 bp, synthetic construct
  misc_feature 1..1848: note = Description of Artificial Sequence: Synthetic coding sequence
  source 1..1848: mol_type = other DNA
atggtgtccggacccctggctctccgctggtgtgcctgggccggaaggggagacatgggccccgacatggagcttccatcccactcgaagcaactcctgctccaattaaaccaacaaagaacaaaaggtttcttgtgcgacgtcattattatggtggaaaacagtatcttcagagcccataaaaacgtgctggccgcatccagtatctatttcaagagtctggttttgcatgataaccttatcaacttggatacggatatggtctcttcaactgtgttccagcagattcttgacttcatctatactggcaagttactgcctagcgatcagccagcagagcctaattttagcacattactgaccgcggcgtcatatttacagctccccgaattagcagctctctgtcgtcgcaaactgaaaagggccggcaagcctttcggaagtggtagggccgggagtaccggcatgggccggccgccccgcagccagagactcagcaccgcaagtgtgatccaagctagataccagggtttggtggacggtaggaagggggcacacgctcctcaggaactgccccaggcaaagggctccgatgatgagctcttcttgggcggttccaaccaggattctgtccaggggctaggccgggctgtgtgcccagcgggtggtgaagccggactcgggggctgtagcagttcaacaaatggcagctccggcgggtgcgaacaggaattgggtcttgatctttccaagaagagtccaccattaccgccagctacccccggacctcacctcacaccagatgatgccgctcagctttctgattctcaacacgggagccccccggcggcttctgctccccctgtcgcaaatagtgcaagttacagcgagttgggggggactcctgatgaacccatggacttggaaggtgcagaagataatcatttgtcccttctcgaggctcccgggggacagccccgaaagtccctgcgccactccacacggaagaaggaatggggaaagaaggaacctgtggccggtagtcccttcgagaggcgtgaggccggtcccaaaggaccttgtcccggcgaggaaggggagggggtgggcgatagagtccccaatggcattctagcatcaggcgcaggcccgagcgggccatatggcgaacctccatatccttgtaaggaagaagaagagaacggcaaagacgcatcagaggactccgcccagtcaggctcagagggaggctcaggtcacgcttctgcacactatatgtatagacaggaaggctatgagaccgtgtcttatggagacaatctgtacgtctgcatcccttgcgctaagggcttccccagtagcgagcagctcaacgcccacgtcgaaacccatacagaggaggagctcttcattaaagaagaaggggcatacgagacgggatccggaggagctgaagaagaggccgaagacctgagtgctccttctgccgcctacacagccgaaccccgcccctttaagtgctccgtctgtgaaaaaacatataaagaccccgccacactgcgccagcacgagaagacacactggctgacgaggccatttccatgcaatatttgtgggaaaatgttcacccagaggggcactatgacccgacatatgcgcagccatttgggacttaagccattcgcctgcgatgagtgtgggatgcgcttcacccgccagtatagacttacagaacatatgcgggtgcattctggtgaaaaaccttatgaatgccagctctgtggagggaagtttacacagcaaaggaatttgatctcccacctccgcatgcatacatctccctcttag

SEQ ID NO: 120372 - DNA, 2670 bp, synthetic construct
  misc_feature 1..2670: note = Description of Artificial Sequence: Synthetic coding sequence
  source 1..2670: mol_type = other DNA
atggacgcccgcggcggtggaggacgcccgggcgaatcccccggcgctacccccgccccgggtccccctccaccacccccccccgctccccctcaacagcagcctcctcctcctcctccacccgctccccctcctggccctggccccgctcctccccagcaccctccccgagccgaagccctgcccccagaagctgctgatgaaggcggtcctcgcggcaggcttaggtctagagactcaagctgcgggcgacccgggacccctggggccgccagtaccgcaaaaggctcacctaatggggagtgtgggcggggtgagccacaatgctccccggcagggcctgaagggccagccagaggacctaaggtctctttctcatgccggggcgcagcatccggaccagcccccggcccagggccagcagaggaggctggctcagaggaggctggaccggccggggagcccaggggctcccaggcctctttcatgcagcgccaatttggcgctctgttacagcccggtgtcaacaagttctcacttcgaatgttcggaagccagaaagcagtagagagggagcaggaaagggtgaagtcagcaggcgcatggataattcacccttactctgatttccgcttctactgggattttactatgcttctgttcatggttggcaatctgattataatacctgtgggtataaccttcttcaaggacgaaacaacggcgccatggatcgttttcaatgtggtgtcagatacgttcttcttaatggatctcgtactgaactttcgcaccgggatcgttattgaagacaataccgagattatactcgaccccgagaaaataaagaagaagtacctaaggacatggtttgtggtcgatttcgtctctagcattccagtggactacatcttcctgattgtggagaaaggaatagattccgaggtctacaaaacagccagagccctacggatcgtacgattcactaagattctgtccctgctgagattattgcgactcagcaggctgatcaggtatatccaccagtgggaagagatctttcacatgacctatgatttggcgtctgcggtgatgcggatttgcaatctcatctctatgatgctccttctctgtcactgggatggatgcctacaattcctcgtgcccatgttacaagatttccctcgtaattgctgggtaagcatcaacggcatggtgaaccactcctggtctgagctgtactcttttgccctattcaaggctatgtcacatatgttatgtatcggatacggccgtcaggctccggagtcaatgactgatatctggctgaccatgctcagtatgattgtcggtgcaacatgctatgccatgttcattggtcatgctacggcgctaattcaatctctggacagcagtagaaggcagtaccaagaaaaatataagcaggtggaacagtatatgtccttccataagctgccagccgatttcagacagaaaattcatgactattatgagcaccggtaccaagggaagatgtttgacgaggactcaatcctgggcgaactcaacggtcccctgagagaagagattgtcaatttcaattgcagaaagcttgtggcctccatgcccttgtttgcaaatgctgatccaaacttcgtgacagccatgctgactaagctgaagttcgaagtttttcagcctggcgactacatcatacgggagggtacaataggcaagaaaatgtacttcatacaacacggtgtggtctccgtcctaactaaaggtaataaagaaatgaagctgtctgatgggagctactttggtgaaatatgtcttctgactagaggtcggcggactgcctcagttcgggcagatacctattgcaggctgtactctctctcagtcgacaactttaacgaagtgctggaggagtaccccatgatgaggagagcgttcgagactgtggccattgataggttggacaggatcgggaaaaagaacagcatcctcttgcataaggttcagcatgacctgaacagtggagtctttaataatcaggagaacgccatcatccaggagatcgtgaagtacgatcgggagatggtgcagcaggcagagctgggccaacgtgtgggattgttcccacctcctcctccccctcctcaggtgacttctgctattgccaccctgcagcaagctgccgccatgtccttctgtccacaggtcgctcgccctcttgttggcccacttgctctgggctctcctcgattagttcgaagacctcccccaggccctgctcctgccgccgctagtccagggccccctccacccgccagcccccccggcgcgcccgcttcccccagggctccacgcacatcaccctacggcggcctcccggctgcacctttagccggacccgcactacccgctcgcagactgagccgggctagtcgacctttaagcgcctcacaacccagcttaccgcacggagcacctggtcccgctgcatcgacccggcctgcatcatcatcaacccctcgattagggcccaccccggccgcaagggcggccgccccttcccctgacaggcgtgattcggcgtctcctggcgcagctggcggcctggaccctcaagacagcgcacgctctcgcctttcaagcaatttatag

SEQ ID NO: 120373 - DNA, 2325 bp, synthetic construct
  misc_feature 1..2325: note = Description of Artificial Sequence: Synthetic coding sequence
  source 1..2325: mol_type = other DNA
atggaagccgaacaacgcccggccgccggcgccagcgagggtgcgactcctggtctcgaggccgttccacctgttgcacctccaccagccacagccgctagcggccctatcccaaagtccggaccggaacccaagcgacgccatctggggaccctgttacaacctacagtgaataaattcagcctgcgggtctttggttcccataaggcagtcgagatagaacaagagcgagtcaaatcagcgggagcctggattatccacccctatagcgactttcgcttttattgggacctgatcatgctgctactaatggtgggcaatctgatcgtactgccagtgggaattaccttttttaaggaagagaattcccctccgtggattgtgttcaacgtgctgtccgataccttcttcctgctggacctggtgctgaactttcgcaccggtatcgtggtggaggaaggcgctgagatactgcttgctccccgcgccatccgaacccgctacctcagaacttggtttttggttgatttgataagcagcatcccggttgattacatcttccttgtggtggagctggagcctcgtttggatgcggaggtctataaaactgcacgcgccctgcggattgtaagatttaccaaaattctgagtctcttgagactgctgcggctatccagacttattagatacatccatcaatgggaggagatcttccatatgacctatgacttggccagtgccgtcgtgcgcatctttaaccttataggaatgatgctcttgctgtgtcactgggacgggtgcttgcagtttcttgtaccgatgctgcaagatttcccaccagattgctgggtgagtatcaatcacatggtcaaccactcctggggacggcagtatagccatgcgctgtttaaggccatgtcacatatgctatgtatcggatacggacagcaagcaccagtgggcatgcccgacgtatggctgactatgctgtctatgattgtcggagccacatgttacgcgatgttcatcggccatgccaccgccctcatccaaagcctggatagttcacggcgccagtaccaggaaaagtataagcaggttgagcagtatatgagcttccacaaactgcccgccgatacccggcagcggatccacgagtactacgaacatcgctaccaggggaagatgtttgacgaagagagtatcctgggagagctgagcgagcccctaagagaggaaattattaatttcacttgccggggcctggtcgctcacatgccattgtttgcccacgctgaccctagttttgtgacagccgttctgactaagctgagattcgaagtcttccagcctggcgatctggtggttcgcgaggggtccgttggacggaaaatgtattttattcaacatggcctgttgtcagttctcgcgcggggagcccgcgataccaggctcaccgatgggagttacttcggtgaaatctgtctgctgaccaggggtagacgtacagcttccgtgcgggcggacacctattgtcgcctgtactcgctttctgtcgatcacttcaacgcggtgctcgaagaattcccgatgatgcgacgggcctttgagaccgtagcgatggaccggcttcttcgcatcggcaagaagaatagcatactccagagaaaaagatcagagccttctcctggcagcagtgggggcattatggagcagcacctggtgcagcatgacagggatatggccaggggggttaggggaagggccccgagtaccggggctcagctgtctggtaagccagtcctgtgggaacccttggtgcatgccccactgcaggccgctgcagtgacctccaacgtcgccatagcgttaactcatcagcgaggccccctgccactttccccagattcgcctgcaaccctcctagcaagaagcgcttggcggagcgcaggatcacctgcatccccactagtgcctgtgcgtgccggcccatgggcttccacgagcagattacctgcccctcctgctaggacattacatgcctcactgagcagggcaggaagaagtcaagttagcctgctgggcccgcctcccggagggggcggcaggagactcgggcctcgcggccgccctttaagtgcctcccagccttccttaccccagcgagctactggggatggctctcccggtagaaagggttcaggcagcgagcggcttccgcctagcggactgctcgcaaaaccccctcgaaccgcccaacctcctaggccccctgtaccagaaccagccacccctcggggcctccaactcagcgccaatatgtag

SEQ ID NO: 120374 - DNA, 3612 bp, synthetic construct
  misc_feature 1..3612: note = Description of Artificial Sequence: Synthetic coding sequence
  source 1..3612: mol_type = other DNA
atggataagctgcccccctcaatgaggaaacgactctacagccttccccagcaagtaggagcgaaggcctggatcatggacgaagaagaggacgccgaagaagagggcgcaggcggtaggcaggatccttccaggcggtccattcgccttcgacctctgccgagtccctctccaagcgcagctgccggagggacagaaagcaggtcttcagcccttggagctgcagactcggaaggtccagctcggggggccgggaaatctagcacgaacggggattgtaggaggttcagaggcagcctggcatccctcggctcccgcggaggcggttcaggcgggacgggcagtggaagctcccatggtcacctgcacgattcagccgaggaacgtcgcctgatagccgagggcgacgcctctccgggagaggatcgaacccctcctggtctcgctgctgagccagagaggcccggagcatccgctcagccggctgcctcacccccaccaccccagcagcctccccagccagccagtgccagttgtgagcagccgtcagtcgacacagccatcaaggtcgaagggggggcagcagctggtgatcaaatcctgcctgaagctgaagtccgactgggacaagcgggcttcatgcagagacaattcggggccatgctacaacctggagtcaacaagttcagcctccgcatgtttgggagccaaaaagccgtggagcgggagcaggaaagggtcaagtctgcagggttctggatcattcatccatactctgactttcggttctattgggatctgacaatgctgctgttaatggttggtaaccttattatcatacccgtgggcatcacgttcttcaaagacgaaaatacaaccccctggatcgtatttaacgtagttagcgatacgttcttcctgatcgatttagttctgaatttcagaacaggaatcgtggtggaggacaataccgagattattctggatccacagagaatcaagatgaagtatctgaaatcttggttcatggtcgatttcatcagctccatacctgtggattacatcttccttatagtcgagacacgcattgattcggaagtctacaaaactgcaagggctctgcgaatcgtgcgattcactaagattctttcgcttctccggctgctccgtttgtcacgcttgatccggtatattcatcagtgggaagaaatatttcacatgacatacgatttggcctctgctgtggtgaggatagtgaatttgatcggcatgatgctgctactgtgtcattgggatgggtgcttacagttcctcgttccaatgctccaggatttccccgacgattgctgggtctccataaataacatggtgaacaatagctggggtaaacagtattcctacgctctcttcaaggccatgagccatatgctatgcatcggctatggccggcaggccccagtgggaatgagcgacgtgtggctgactatgctgtctatgattgtgggagcaacatgctacgctatgtttattggtcacgcaacagccttgatacagagtttggactcttcccgcagacagtatcaggagaagtacaagcaagtagaacagtacatgagcttccacaaactcccacccgatacacgccaacgaatccatgactactatgaacacagataccagggaaagatgtttgacgaagagtctatcctcggagaactatcggagcctcttcgggaggagatcattaattttaattgcagaaagctcgtcgcctcaatgcccctctttgctaacgccgatcccaactttgtcacaagcatgttaactaaactccgattcgaagtcttccagccaggtgactacattatccgggagggcaccattggaaagaagatgtatttcatccagcacggcgtcgtctctgtcctaacgaagggtaacaaggagactaaattggcagacggctcctactttggtgagatatgtctattgacgcggggacgacggacagcgtccgtgcgtgctgacacatactgtcgcttgtacagcctgtcagtggacaacttcaacgaggtgctcgaggagtacccgatgatgaggagagcgttcgagacagttgctctggaccgactggatcgcattggaaaaaagaactccatcctgttacataaagtgcaacatgatctgaactccggcgtttttaattatcaggagaacgagatcatacagcagattgtgcagcacgatcgagaaatggcccactgcgcacaccgcgttcaggctgcagcctcggctactccaacaccaacaccagttatttggaccccactgatccaagccccactgcaggcagcggctgccacaacatctgtagcaattgctttaacccaccacccgaggcttcccgccgccatatttcggcccccccccggatcgggcctgggcaacttgggggccggccagaccccccggcatctgaaaagactccagagtctgattccgtctgctttggggagtgcatctccagcgtcctctccctcccaggttgacacccctagctcttcctcattccatatccagcagctcgccggctttagtgcccctgccggtctctccccactgcttccctccagtagcagctcacctccccccggtgcctgtggtagcccatctgcccctacgcctagcgccggcgtcgcggctacaactatagctggatttgggcactttcataaagctctgggtggcagcttgtctagcagcgactcccccctcctgacccctctccagcccggggcccgaagccctcaggcagcgcagccaagccctgccccccccggtgccaggggcggattaggcctaccagagcactttctgcctccacctccaagtagcaggagcccctcgtcatcaccgggtcaactgggtcagcctcccggggagctgtcactgggccttgccaccggtcccttgagcacgccggagaccccccctcgccagcctgaaccgccgtctctggtggcaggtgcgagcgggggtgcatcccctgtggggtttacaccgagaggtggtttaagcccccccggccacagcccaggcccacccagaacatttcccagtgcgccacccagagccagcggaagccacggtagtctcttgctgccaccggcatcatccccgcctcccccgcaggtgccacagagacgtggcacgccaccactaactcctggacgccttacccaggatttgaaactaatcagcgccagccagccagcattgccacaggatggggctcagactctgagaagagcctccccccacagctcaggggagtcgatggcggccttccccctgttccctagggcagggggagggagcggcgggtccggatcttctggcggtctggggcctcctggaaggccttatggcgccattccaggccagcacgtgacactgcctaggaagacttccagcggctccctccctccccccttgtctctgttcggcgcccgggcaacatcaagcggcgggccgccgttaacagcaggcccccagcgggaaccaggggcaaggcccgagccggtgaggagtaagctgccgagtaatctgtag

SEQ ID NO: 120375 - DNA, 396 bp, synthetic construct
  misc_feature 1..396: note = Description of Artificial Sequence: Synthetic coding sequence
  source 1..396: mol_type = other DNA
atgaacctaccatcaacaaaggtatcttgggccgctgttacccttctgctactcctcctgctcctgcctccagcgttactcagtagcggagctgctgctcaacctttgcctgactgttgccggcagaaaacatgctcatgcagattatacgagcttttgcacggcgcaggcaatcacgccgcaggaatcctgaccttaggcaagagacggtcaggcccgcccggtcttcaggggcggcttcaacggctgctacaggcgtctggcaaccatgctgccggcattctgaccatgggcagacgggccggagccgagcccgctcctaggccttgtttaggcaggcggtgtagcgctccggcggcagcgagcgtcgcgccggggggacagagtggaatctag

SEQ ID NO: 120376 - DNA, 1050 bp, synthetic construct
  misc_feature 1..1050: note = Description of Artificial Sequence: Synthetic coding sequence
  source 1..1050: mol_type = other DNA
atggcggcgacagcagctgaggccgtggccagcggcagcggcgaacccagagaggaggcaggggcactgggccccgcctgggacgaaagtcaactgcggagttatagctttccgacccgccccatacctaggctttcgcagtccgacccaagagctgaggagctgatcgagaatgaagagccagtcgtcctgactgacaccaacctggtctaccctgcactgaagtgggatctggagtatctgcaggagaacatcggcaacggggatttcagcgtatactccgcgtcgacgcacaagttcctctactatgacgaaaagaaaatggcaaacttccagaactttaaaccgaggtctaacagagaggagatgaaattccatgagtttgtggagaagctgcaggacattcagcagcgaggtggagaagaacgactgtacctgcagcagaccctgaacgacacggtggggagaaaaatcgtgatggattttctgggcttcaactggaattggataaataaacaacagggcaagcggggttggggtcagctcacctccaatctgctcctgatcggaatggagggcaatgtgactccggctcattatgatgagcagcagaattttttcgcgcagattaagggatataagagatgcatcctgtttccccccgatcagtttgaatgcctgtacccctatcccgttcaccatccatgcgaccggcagtctcaggtggactttgataatcccgattacgaaaggtttcctaacttccagaacgtggtgggctacgaaacagtagtcggcccaggggacgtgctctacatcccgatgtattggtggcaccacatagaaagcctgctcaacggaggtattaccattactgtaaacttttggtataagggcgccccgacccctaaaaggatcgagtaccccctgaaggcccaccaaaaggtagccattatgagaaatatagagaagatgctcggggaagccttgggaaatccacaggaggttggccccctgttgaacaccatgattaaagggcggtacaattag

SEQ ID NO: 120377 - DNA, 1149 bp, synthetic construct
  misc_feature 1..1149: note = Description of Artificial Sequence: Synthetic coding sequence
  source 1..1149: mol_type = other DNA
atggtctctgtgggatgtgttgtctttctttttttcttcttcggagtccgaaatagaaggtccttccgcttccgatggggcccatcccttgcagcagaaatggctgctactgctgctgaggctgtagctagtggatcaggcgagcctcgcgaggaggccggcgccctaggacctgcttgggatgagagccagttgaggagctacagctttcccacccgcccaatccctcgcctgagtcaaagcgatcccagggctgaggagctgattgagaacgaggagccagttgtgctgaccgacaccaatcttgtatacccagcactaaaatgggaccttgagtacctgcaagaaaacattggaaatggggacttctcggtgtatagcgcttccacccacaagttcctatactatgacgagaagaagatggcgaatttccagaactttaagccccgttctaatcgtgaagaaatgaaatttcacgagtttgttgagaaactgcaggacattcaacagaggggtggggaagagcggttatacctgcagcaaacattgaacgatactgtgggacgcaagattgtgatggacttcctcggattcaactggaattggatcaataagcagcaggggaagcgaggatggggccagctcacaagcaatctcctcctgattggaatggagggcaacgtcacacctgctcactacgacgaacagcagaacttcttcgctcagattaagggctacaagagatgtatcttgttccctcctgatcagtttgaatgtctctatccgtatcctgtacaccacccgtgtgatcgacagagccaggtggatttcgataaccctgactacgagagatttccaaactttcagaacgttgtggggtatgagacagtggtgggccctggtgacgtgctgtatattccaatgtattggtggcaccatatcgagtctctcctgaatggggggattaccattacagtcaatttttggtacaagggggcccccaccccaaaacggatcgaatacccactgaaagcccatcagaaagtggcgattatgcgcaatatcgagaaaatgctgggggaggcgctgggaaacccccaggaggtgggtcctttacttaacactatgataaaaggcaggtataactag

SEQ ID NO: 120378 - DNA, 579 bp, synthetic construct
  misc_feature 1..579: note = Description of Artificial Sequence: Synthetic coding sequence
  source 1..579: mol_type = other DNA
atggcaaatttccagaacttcaaaccgaggtctaaccgcgaggagatgaagttccacgaattcgtcgagaagctgcaggacattcagcagcgcggtggggaagaacggctgtatctccaacagaccttgaacgatactgttggtagaaaaatcgtgatggactttctgggatttaactggaactggatcaacaaacagcagggaaagcgcggttggggtcagctgacctctaacctgctgctaatcggtatggaagggaatgtgactccggctcactacgatgagcagcagaatttctttgcccagattaaaggttacaaaaggtgtattctcttcccacccgatcagtttgaatgcctctacccgtatccggtccaccatccgtgtgatcgacagtcacaagtggatttcgacaaccctgactacgaacggttcccaaactttcagaatgtggtgggctacgaaacagtcgtcgggcccggagacgtgctgtatatcccaatgtattggtggcatcatattgaatccctgctcaacggcggcattaccatcactgtgaatttctggtacaaggggtag

SEQ ID NO: 120379 - DNA, 1803 bp, synthetic construct
  misc_feature 1..1803: note = Description of Artificial Sequence: Synthetic coding sequence
  source 1..1803: mol_type = other DNA
atgcgtcccgcagctggagccgcacgcagaccgcggtgctgcaccagttggttaacaaggtgcccaagtccagccgcttcagctcctacgtggacccgaccactgagctgcgcctccccgtccgcgacctgtgcctgtaccgccagtgccccccagttggagctcattggtcacagcatctttgatttcattcatccctgtgatcaggaggagctgcaggacgcactgacaccgcagcagaccctgtccaggcgcaaggtcgaggctcctactgagcgctgcttttccctgcgtatgaagagcactttgacttctcgtggcagaacccttaacttgaaggccgccacatggaaggtgcttaattgttcaggccatatgagagcctacaaacctccggctcaaacatcacctgcaggcagtccagattccgaacccccgcttcaatgtttggtccttatctgtgaagcaatccctcaccccggctccctcgagcctcccctaggccggggggcatttctttcaagacacagcctggacatgaagttcacatattgcgacgaccggatcgccgaggtggccggttattcacccgacgatctcattggatgtagcgcctatgaatatatacacgcccttgattccgacgccgtaagcaaatcaatccacacactgttgagcaaaggtcaagccgttactggccagtacagattcctggcacggtcaggtggctacctctggacccagacacaggccacagttgtcagcggtggacgtggccctcagtcagagtctatagtgtgtgtccactttctgatctcccaagtagaggagaccggggttgttttatctctggaacagactgaacagcactctagaagaccaattcaacgcggtgctccatcacagaaagataccccgaatcccggcgactctttggatacaccaggcccccgaattttagcctttcttcacccacccagcctgtccgaagcagccctggcggctgacccccggagattctgttctcctgacttgcgccgcctccttgggcctatcctcgacggagctagtgtggctgcgacgccttcaacccctctcgccaccaggcacccacagtcgccattgagcgcagaccttcccgatgaactgcccgtaggcacagaaaatgtgcacaggctgtttacgagcggtaaagacacggaagccgtggagaccgacctagacatcgctcaggatgccgatgccctggacctggagatgcttgccccctacatttctatggatgatgatttccagctcaatgcgtcggaacagttgccacgggcctatcaccgccctctgggcgcagttcctcgccctcgtgccaggtcttttcacgggctgagtccccctgcattggaaccctccctcctgcctcgttgggggtcagacccacgactctcttgttcctccccctccagaggcgacccctccgccagctcccctatggccggggccagaaagcgtacattggcccagtccagtgaggacgaggatgagggggttgagttgctcggcgtgcgaccgcccaaacgctctccctcgcccgaacatgagaacttcctgctgtttcctcttagcctttcatttctgttgactgggggaccggccccgggtagtctccaggatccttctacaccactgcttaaccttaacgagccgctaggacttggcccttctcttctgtcaccgtacagcgatgaggatacaacccagcctggtgggcccttccaaccaagagccggctccgcccaggccgattag

SEQ ID NO: 120380 - DNA, 1353 bp, synthetic construct
  misc_feature 1..1353: note = Description of Artificial Sequence: Synthetic coding sequence
  source 1..1353: mol_type = other DNA
atgagacctgccgccggggctgctcggcggccccgctgttgtaccagctggctgaccagatgcccttctccagcagcctccgccccaacctggacccgtccacttagttgcgcctcacctagtgccacctgcgcatgcaccgcttccgccccccagttggagctgatcggccatagcattttcgacttcatccatccatgcgatcaagaagagcttcaagacgcacttacaccccagcaaacactgtctagacgtaaggttgaagcgcccacggagaggtgcttttccctcaggatgaagagcaccctgacgagtcgcgggcgaactctgaacctgaaggctgccacatggaaggttctcaactgctctggacacatgcgggcatataagccacctgcccagaccagtcccgccggttcgcccgattctgagcctcccttacagtgtctggtgctgatttgtgaggcgatcccacacccaggcagtctggagccacccttgggcagaggcgcattcctttcccggcatagtcttgacatgaagttcacgtattgtgacgatcgcatcgctgaagtggccggctacagtccggatgatctaatcggttgcagtgcctatgaatatattcacgcactggactcagatgctgtgtctaaatccattcacacactgctgtctaagggacaggccgtaacaggccaataccggttcctggctcgttctggagggtatctctggacccaaacccaggcaactgtggtctcaggaggcagagggccacagtctgagagcatcgtctgtgtgcattttctcatctcccaggtggaggagaccggtgtagtgctgtccctcgagcagaccgagcaacatagccggcggcctattcagcggggggccccaagtcagaaagatacacctaaccccggtgattcattagatacacctgggccaaggatcctggcttttcttcacccgccgagcctcagtgaggccgctttagcagccgaccctcgaaggttttgcagccccgacctccggcgtctgctggggccgatcctggacggagcgtcagtagccgctaccccgagtactccacttgcgacaaggcacccgcaaagcccactgagtgccgacctacctgacgagcttccggttggtactgagaatgtgcatcgtttgttcacatccggtaaggacaccgaagcagtggaaaccgacctggacatcgctcaggacccttcaacccccctgctgaatttaaatgagcctttaggttttcacttcgttacacagtccggagtgcaatggcacaagcacagctcacctcagccacgcccgcccggcctcaagtag

SEQ ID NO: 120381 - DNA, 1899 bp, synthetic construct
  misc_feature 1..1899: note = Description of Artificial Sequence: Synthetic coding sequence
  source 1..1899: mol_type = other DNA
atggccctcggcttacaacgggccagatccaccaccgaactacgcaaggagaaatcccgtgacgctgctcgctcacgtcgctctcaggagacagaggtactttatcaactggcgcacacactgcctttcgcccgcggcgtgtctgcacacctggacaaggcctcgattatgagattaactatctcgtaccttcgcatgcatcgcttgtgcgccgccggcgaatggaaccaagtaggggccggcggggagcctttggacgcctgctacctgaaagcactcgagggcttcgtgatggttctaacagccgagggggacatggcttatctttctgaaaacgtgagtaagcacctcggattgagtcagcttgagctgatcggtcactcaatctttgattttattcacccatgtgaccaggaggagctgcaggacgctcttacccctcagcagacactgtcccgtagaaaggtcgaggccccaaccgagcggtgcttttcactgagaatgaaatccaccctgacttctcggggacgcaccctcaacctaaaagcagccacgtggaaggtcctgaactgctcaggacatatgagggcatacaaacccccggcccagacttcgcctgcaggctccccggactctgagcccccacttcagtgcctagttcttatctgtgaagccattcctcaccccggttctttggaaccgccactcggcagaggtgcgttcctctcccggcactccctggacatgaagtttacctattgcgatgaccgtattgcagaagtggccggttacagccccgatgacctaatcgggtgttcagcctatgagtatatccacgccctggatagtgatgccgtgtcaaaatctattcacactctcctatctaagggtcaggccgttaccggccagtaccggttcttggccagatctgggggctatctttggacacagacacaggcaacagtggtgagcggggggcgagggccgcagtcagagagcattgtttgcgtgcacttcctcatctcacaagtggaggaaacgggggtcgtcctctccctcgagcagacagagcagcatagtcggagaccaattcagagaggagcaccaagccagaaagatactcctaaccctggcgattcacttgacaccccagggccgcgcattcttgcctttttacatcctccgagcctaagtgaggctgcattggccgcagaccctcgcagattttgttccccggacttgagaagattactgggaccgattctcgacggcgcttccgtggctgcgaccccatcaaccccactggcaacacggcacccacagagcccactcagtgctgacctcccggatgaactcccggtgggcaccgaaaacgtccaccggttatttacgagtggaaaggatactgaagccgtagagactgatcttgatatcgcccaagatgcagatgcccttgacttggaaatgctggccccctacatttctatggacgacgacttccagctcaacgcctccgagcagctgccccgagcctatcataggccccttggggccgtccctcgaccgcgggccagaagctttcacggcctttcgccccccgccctggagccctccctcttgcctcgatggggctccgacccaaggctgtcgtgttcatctccatctagaggtgaccctagcgcttcatctcccatggcgggagctaggaaacgaactctcgctcaatcctctgaagacgaggatgaaggggtggaactgctcggggtccgtcccccgaagaggtcaccatccccggaacacgagaactttctattgttccctctgtcccttgtttgctgggggatcaatgggatactttggcctagtctcccgtcctggttgaaaccaaccgtgctgtag

SEQ ID NO: 120382 - DNA, 1731 bp, synthetic construct
  misc_feature 1..1731: note = Description of Artificial Sequence: Synthetic coding sequence
  source 1..1731: mol_type = other DNA
atgcggctcactattagctatctgaggatgcatagactttgcgccgccggagagtggaatcaggtaggagcaggaggcgagccactggacgcttgctaccttaaagctctggaaggcttcgtcatggtcttaacagcagaaggtgatatggcttatctctctgaaaatgtttctaagcacctcgggctgagccaactggagctcatcggtcactccatctttgatttcatccatccctgcgatcaggaagagctccaggatgcactcaccccacagcagacgctctctcggcggaaagtggaagcgcccacagagaggtgtttctccctgcggatgaaatctacactcacgtcccgcggccgcactctgaacctgaaggccgcgacgtggaaagtgctgaactgtagcggacatatgagggcttataaacctccggctcagactagcccagccggctctccagacagcgagcccccgcttcagtgtctcgtacttatctgtgaggctattccacacccaggctcgctggaaccacctctgggcagaggcgcttttctgagtcgccatagcttggatatgaagttcacttattgtgacgaccggatcgctgaagttgcgggttatagcccggacgacttaatcgggtgctcagcctatgaatatattcatgcactggattcagatgcagtgtccaagtctatacataccctgctatcaaagggccaggccgtgacaggccagtaccgctttctcgcgcgcagcggaggatacctctggacccagacccaagcaaccgtggtgagcggaggacggggaccacagtcagaaagcatcgtgtgtgtccatttcttaatcagccaggtggaggagaccggagtagttctgtccttagagcagactgagcagcacagtaggcgtcctatacagagaggcgccccctcacaaaaggacacacctaaccccggcgattcattggacacgccaggtccccggatcttggcctttctgcacccaccctcactgtccgaggcagctctggcagctgacccacggcgtttttgctcccctgacctaagacggctgttgggccccattctcgatggggcctctgtggctgccacaccgagtacccctctagccacccgccacccacagagtcccctgtctgccgacctaccagatgaactgccagtcgggacagaaaatgtgcacaggcttttcacaagcgggaaggataccgaagcagtcgagactgacttggatatagctcaggacgccgatgcactggatttagaaatgttggctccttatatctccatggatgatgatttccaactcaatgccagcgaacagctgccccgagcctatcatagacccctcggggcagtccccagacctagagcccggagcttccacggactgtctccacccgctctggagccgagcctcctgccgagatggggaagcgacccccggctgtcttgttccagcccatcaagaggcgacccctcagcctctagtcctatggctggggccaggaagagaacacttgcgcagtccagcgaagacgaagacgaaggagtggagcttttgggcgtcaggccacctaagaggtctcctagccctgaacatgaaaattttcttctttttcccctaagtctggtatgctggggaattaatgggattctgtggccatctctaccatcttggttgaagcctaccgtactgtag

SEQ ID NO: 120383 - DNA, 2004 bp, synthetic construct
  misc_feature 1..2004: note = Description of Artificial Sequence: Synthetic coding sequence
  source 1..2004: mol_type = other DNA
atggattggcaggatcacaggtcgacgacggagttgcggaaagagaaaagtagagatgcagcgagaagcagacgatcacaggaaaccgaggttctataccagttggctcacaccctgcctttcgcccggggggtgtcagcccacttggacaaggcgagcattatgcgactcactatcagctacctgcggatgcaccgattatgcgctgcaggggagtggaatcaagtaggagcaggaggggaacccctggacgcttgctacctgaaggccctagaaggctttgtcatggtgctgactgctgaaggggacatggcttatctctctgagaacgtcagcaaacatctggggttgtcccagctagagctgatcggccacagcattttcgacttcattcatccttgcgatcaggaggagctgcaggacgccctcacccctcagcagacactgagcaggcggaaagttgaagcgccgacggagagatgcttctccttaaggatgaaaagtacgttgacgtcaaggggacgcacactgaatctcaaagcagcaacgtggaaggtgctgaactgctcagggcacatgcgggcctataagccccccgcccaaacctcccccgccggctcgcccgactctgagcctcctcttcagtgtttggtccttatctgcgaagcaattcctcacccaggcagtctggagcctcctctcgggaggggtgccttcctgtcccgacactccctggatatgaaatttacctattgcgacgatcgcattgctgaggtggccggctatagccccgacgacctcattggttgtagcgcttacgagtatattcacgccctcgactccgacgcagtgagtaagagcattcatactttactctccaagggccaggccgttactggccagtatcgctttctggctcggtcggggggctatctctggacccagacgcaggctaccgtagttagcggcggcagagggcctcagtccgaatcaatagtttgcgtacatttcctcatttctcaggtggaggaaacgggggtggtgctgtctctggaacaaacggagcagcactccaggcggcctatccagagaggtgcgccatcccaaaaggacacccccaaccctggagactctttggacacaccaggcccccgtatcctggcttttctccacccccccagcctgtcagaagctgccctcgccgcagacccccgcagattttgctctccagacctcaggcggctcctcggccctatacttgacggcgctagtgtagcggccactccctctacacccctggcaactagacatcctcaaagccccctcagcgccgacctgccggacgagcttccagtaggcaccgaaaatgtgcacagactcttcacaagtggcaaagatacagaggccgttgaaaccgacctggatatcgcccaggatgcggatgccttggacttggaaatgctggctccctatatcagcatggatgacgatttccagcttaatgcctcagagcagttgcccagggcctaccatagacctctgggtgcggtcccgaggccacgtgcacgttcgttccatggtctatctccgcccgccttagaaccaagtttactgccccgctgggggtcagacccgagactctcttgttcatcacccagccggggggatcctagtgcgtctagccccatggccggggcccgcaagagaactttagctcagagttctgaggatgaagatgaaggtgtcgagttactgggcgtaagacccccaaaacgcagtccctcgcctgagcacgagaacttcctcctctttcccctttcactaagttttctcctcaccggaggtcctgcaccggggagcctccaggatccatccacgccgctgctcaacctaaatgaacctctgggcctagggccctcactcttaagtccatactccgatgaggatactactcaaccagggggcccattccagcccagggctggttcagcgcaggcagactag

SEQ ID NO: 120384 - DNA, 1842 bp, synthetic construct
  misc_feature 1..1842: note = Description of Artificial Sequence: Synthetic coding sequence
  source 1..1842: mol_type = other DNA
atgcgtttaacaatttcttacctgaggatgcacaggttatgtgccgctggggagtggaatcaagtcggggccggcggcgaacctttggacgcttgttatcttaaggcactcgaggggttcgtcatggtccttaccgccgaaggagatatggcatacctgtccgagaacgtgtccaagcatctcggcctgagtcagctcgagctgataggccattccatcttcgacttcatccacccttgtgaccaggaggagttgcaggacgccctcaccccacagcagacactgagtaggcgaaaggtggaggctcctacagagcggtgctttagccttagaatgaagtctactctcacttcacgagggcgcaccctgaatttgaaggctgctacatggaaggttttgaactgctcaggccacatgcgagcctataagcctccagcacaaacatctcccgccgggagcccagattctgagccccccctgcagtgtctggtgctcatttgtgaggcgattccacaccctggtagcctggagccccccttgggccgcggtgcctttctcagtcggcatagtcttgacatgaagttcacatactgcgatgaccgtattgcggaggttgccgggtacagcccagatgacctgatcggatgctcagcctacgaatacattcacgcccttgactcagatgctgtgtcgaagagcatacacacactactttcgaaaggacaggccgttacgggacagtataggtttctggctaggtcaggcgggtatctgtggacccagactcaagctaccgtcgtgtctggcgggcgcggaccacagtccgagtctattgtctgcgtgcatttccttattagccaggtcgaggagactggtgtggttctctccctagagcaaaccgagcagcacagcaggcggcccatccagcggggcgcaccctcccagaaagacactccaaaccccggtgactccctcgacacgcccggcccaaggatactggcgttcctgcatccgccctcactctccgaagctgcactggcagcggacccaaggagattctgctccccggacttacggcgcctgcttgggcccattctcgatggagctagtgtcgccgcaacccctagcaccccactcgccacacggcacccgcagagccctctctccgcagatctgcctgatgaattacccgtgggcaccgaaaatgtacatagattgtttactagtggaaaggacacggaggctgtggagactgaccttgatattgcacaggatgctgacgccctcgacctggaaatgctggccccttacatttcaatggacgacgactttcaactcaatgcctctgagcagcttccacgcgcctaccacaggcccctcggcgctgtgccacgaccccgcgcccgcagctttcacggactgagcccaccagctctggagcctagtctgttgccacgctggggttcagatcctagattatcatgcagtagcccctcccgaggggacccatccgctagctcccccatggcgggcgcccgcaagcggacccttgcccagtcaagtgaggatgaagatgagggcgtggaactgctcggggtgcgaccccccaagagaagccctagcccagagcacgagaatttcttgcttttcccccttagtttgagcttcctgctcaccggtggcccggcccccggctctttgcaagatcctagcacgcccctcttgaacttgaatgagccactcggcttggggcccagccttctgtcgccttacagcgacgaggatacaacccagccgggtggcccttttcagccaagggccggatcggctcaagcggactag

SEQ ID NO: 120385 - DNA, 2010 bp, synthetic construct
  misc_feature 1..2010: note = Description of Artificial Sequence: Synthetic coding sequence
  source 1..2010: mol_type = other DNA
atggccttagggctgcagagagccagatccaccactgaactacgaaaggagaagtcgagggatgcagcacgaagccgccgcagccaagagactgaagtcctctaccagctggcccacactctgcccttcgcgcgaggcgtttctgcccacctggataaggcgtccatcatgagattaaccataagctacttaagaatgcaccggctgtgtgccgctggagaatggaatcaggtcggcgcgggaggcgaaccccttgatgcctgttacctaaaggccctggaagggtttgtgatggtgctcacagcagagggcgacatggcatatctgtcagaaaatgtgtctaagcacctgggcctgtcacagctggaactgatcggtcacagtatatttgacttcatccacccctgcgaccaagaggaattacaggacgcactgacaccacagcagacgctgtcaagacgaaaggtggaggcacctaccgagcggtgctttagtctgcggatgaaaagcactttgacatcgaggggaagaactctgaacctgaaggcagcgacatggaaggtgctgaactgtagtggccacatgagggcatacaaaccacccgcccagaccagtccagccggctcacccgatagtgagcctccattacagtgcctggtgttgatctgtgaagccatcccacatccgggtagtcttgaacctccccttggccggggtgcatttttaagtagacacagcctggacatgaagttcacgtattgcgatgaccggattgccgaggtggccggatatagccctgatgatttgatcggctgttccgcctacgagtatatccatgcactggactcagacgccgtctcaaagagtattcataccttgctaagtaagggacaggccgtgaccggccagtaccgattcttagcccgcagcggcggatacctctggacccagacgcaagccacggtcgtgagtggcggccgaggcccacaaagtgagagcatcgtctgtgtccacttccttatcagccaggttgaggaaacaggcgtcgttctctctctggaacagactgagcaacactcaaggcgcccaattcagagaggcgctccttcacaaaaggacacacctaatcccggggactccctggatactcccgggcctagaatcctggccttccttcatcctccctctttatccgaagcggctctggcggcggatcccaggcggttttgcagcccagacctgaggagactcctcgggcccatcctggacggcgcatcagttgccgcaaccccgtctaccccattagcaacacggcatccacagagtcctctgagcgcagacctgccagacgagctgcctgtgggcaccgaaaacgtgcataggcttttcacgtccggaaaagataccgaggccgtggagactgatctcgacatagctcaggatgcagacgcactagacctggagatgctggccccctacatctctatggacgatgattttcagctgaacgcctccgaacagctgcctcgggcataccacaggcctctgggtgccgtcccacgacctagggccaggagcttccatggactgtcacctcccgccctggaacccagcttgctacccaggtgggggtccgacccccggctgagctgtagcagcccgtcaagaggggatccgtccgcgagcagtcctatggctggcgcccgaaagcgaacactggcgcagtccagtgaagatgaggacgagggagttgagcttttaggagtgaggccaccaaaacggagcccttcgccagaacacgaaaacttcctactcttccccctctccctctcatttctgttgacaggaggcccggcccctggttctctgcaggacccgtcaactcccttactgaatctgaacgaacccctcggactgggccccagtcttctctctccatactccgacgaagacactactcagcctggggggccttttcaaccgcgagccggatctgctcaggctgactag

SEQ ID NO: 120386 - DNA, 1092 bp, synthetic construct
  misc_feature 1..1092: note = Description of Artificial Sequence: Synthetic coding sequence
  source 1..1092: mol_type = other DNA
atggctctgggactgcagcgggcccgctccactactgagctccgaaaggaaaaatcaagggatgctgcaagaagtaggcgctcccaggagaccgaggttctttaccagcttgctcacaccctgccatttgctaggggcgtttctgcccatctggacaaggctagcataatgagactgacaatttcatacctccgcatgcatcgattgtgcgctgccggagagtggaaccaggtgggcgccggcggagagccactggatgcctgttacttaaaagccctggagggcttcgttatggtgttgaccgccgaaggcgatatggcatatctgtccgagaacgtgtcaaagcacctgggcttgtctcagctggagctcatcgggcattcaatctttgatttcatacacccctgcgaccaggaggaactgcaggatgcactgaccccccaacagacactgagccgccgcaaggttgaggcccccactgagaggtgcttcagcttgcgcatgaaaagcaccctgacaagcagaggccggaccctgaacctgaaggctgctacctggaaagtgctgaattgcagtggacacatgagggcgtataagccccccgcacagaccagccctgcaggaagcccagacagcgagccccccctgcagtgcctggtgcttatttgcgaagcaattccacatcccggatctctggaacctccgctcggtcggggcgccttcctttcccggcattctctggacatgaagtttacgtactgcgacgacaggattgcagaggtcgctgggtacagtcctgatgatttgattggatgttcagcttacgagtatatccatgccctggactctgacgctgtgtctaaatctatccacacctgtatgtatcctatatcccccggcgctaaacccgcagcaacttggcccccagctgacaccaggactcctcaactgcccataccccaagacgcccttccgccccacctaaacacatcatcactgctaccaaagccgcagggaactgtgagcttcctggccccctcctatccggttccaagatacttttcacctcacttgccaccttggtggccttag

SEQ ID NO: 120387 - DNA, 1839 bp, synthetic construct
  misc_feature 1..1839: note = Description of Artificial Sequence: Synthetic coding sequence
  source 1..1839: mol_type = other DNA
atgctgccaatgccttccggacgccccagatcttgcgccagaaagagtcccggtatgcgccctgctgcaggcgcagccaggagaccacgctgctgtactagctggctgaccaggtgtccgtcaccggccgcatcggctccaacttggactcgacctctgagctgtgctagtcctagcgcaacctgcgcctgcactgcgtctgctccacaactggagcttattggacactctatttttgacttcatccacccctgtgatcaggaagaactgcaggatgctctcactccacaacagaccctctccaggagaaaagtggaggctccgactgagagatgcttcagcctgaggatgaaaagcactttgacctccaggggaagaactctaaacttgaaggcagcaacatggaaagtgctgaactgcagcgggcatatgcgggcttacaagccccctgcccaaaccagtccagccggaagccccgactctgaaccgccactgcagtgcctggtcctgatctgcgaggccatcccacatccgggtagtctagaacccccactgggaagaggggccttcctctcacggcacagccttgacatgaaattcacttactgtgacgataggatcgccgaagtggctggatatagccctgatgacctcattggatgcagcgcctacgaatatatccatgcgttggactccgacgctgtgtcaaagtctatccacactctcctgtccaaagggcaggctgtgaccggccagtacaggttccttgctcgctctggtggctacctctggacacaaactcaggccaccgtggtatcagggggcagggggccacaatcagaaagcatcgtctgcgtacactttctgattagtcaggtggaggagacgggtgttgtcctgagcttggaacagactgaacagcatagccgtagaccaatccagcgcggggctccttctcaaaaagatactcccaaccctggagatagcctggacactcccggacctaggatattggccttcctgcatcctcccagtctatcggaggcagctctggctgccgatccccgccgtttctgttcccccgacttacgaaggcttctgggaccaattcttgatggagcttcagtggccgctaccccatctactcccctggctacacggcatccccagtcccctctgtccgctgatctgcccgacgaactaccggttggtaccgaaaacgtgcacaggctatttacctcagggaaagacaccgaagctgtcgaaacagacctcgatattgcgcaggatgccgatgcactcgacctggagatgctggccccctatatcagcatggacgacgatttccagttgaacgcaagcgaacagttacccagagcgtaccacagacccctgggcgccgtgcctcgccctcgtgcccgctctttccacggactttcacctccggcattagagccctccctgttgccacggtggggcagtgatccccggctgagctgctccagtccctcaaggggagacccttctgcctcatcccccatggccggggcaaggaagcgcacactggctcaaagcagtgaggatgaggacgagggcgtagagttattgggagtgcgccccccaaaaagaagcccctcacctgagcacgagaacttcctactgtttcccctttcgctgtcatttctgctcacgggcggtccagcaccggggtcacttcaagacccaagcacccccctcttgaatttaaacgaaccactggggtttcacttcgtcacccagagtggcgtacagtggcataagcacagctccccacagccaaggccaccaggcctcaaatag

SEQ ID NO: 120388 - DNA, 600 bp, synthetic construct
  misc_feature 1..600: note = Description of Artificial Sequence: Synthetic coding sequence
  source 1..600: mol_type = other DNA
atgcgcccggcggccggagcggctcgcaggccaaggtgttgcacatcttggctcactcgctgcccctcgcccgcagcgtccgcccctacgtggactcggcccttgagctgtgctagcccctcagcgacatgtgcatgcacagccagcgctccgcagttggaactgattggccatagcatctttgattttatacatccctgcgatcaggaagaactccaagacgccctgaccccccagcaaactttgtcccgcagaaaggtggaagcacctacagagaggtgttttagcctccgaatgaagtcgacattaacgagccgtggaaggaccctcaatttgaaggctgcgacatggaaagtattgaattgttccgggcacatgagggcttacaaacctcccgcccagaccagtcccgcgggctcccctgactctgaacctcctctgcagtgtctggtactgatctgtgaagctatcccccacccgggttctttggaaccgccactgggcagaggcgcttttcttagcagacacagccttgatatgaagtttacctattgtgacgataggatcgctgaggtggccggctatagtccaatgacttag

SEQ ID NO: 120389 - DNA, 714 bp, synthetic construct
  misc_feature 1..714: note = Description of Artificial Sequence: Synthetic coding sequence
  source 1..714: mol_type = other DNA
atgagacccgctgcaggcgctgcacgcagacctcggtgttgtacaagttggcttacgcgatgtccaagtccagcagcatcagctcccacatggacccggcctttaagctgtgcaagtccatccgccacttgcgcatgcaccgcgagtgcaccacaagaggagctacaggacgctctcacaccccaacaaactctctctcgtcgtaaggtagaggctcccaccgagcgatgtttcagtctaagaatgaagtctacattgacctcaaggggacgcacactgaatctcaaagcagcgacctggaaggttctcaattgttcaggacacatgagagcgtacaaaccccctgcgcaaaccagccccgcaggctctccagattccgaacccccattacagtgcttagtactgatctgtgaggccatcccacatcccggtagcctggagagattcgtgccagtgagcagtgccgccacttctctctgcctgccctcactttccccatctaaggtggccgggtactcacctgatgacctgatcgggtgcagcgcttatgagtatatccacgctttggatagcgatgccccccaggacgcattaccccctcatctgaacaccagcagcctactgcccaagccacagggcacagtctcttttctcgccccctcgtacccagtcccaagatacttctccccacatctacccccttggtggccttag

SEQ ID NO: 120390 - DNA, 1092 bp, synthetic construct
  misc_feature 1..1092: note = Description of Artificial Sequence: Synthetic coding sequence
  source 1..1092: mol_type = other DNA
atggcactgggcttgcaacgggcacgctctacaactgagttacgcaaggaaaaaagcagggatgctgccagaagccgccgttcccaagagaccgaagtcctgtaccagttggctcacactctgccgttcgcgcgcggcgttagcgctcacctggacaaggcctccatcatgcggctgacaatctcctacctgcgcatgcatagactgtgtgccgccggtgagtggaaccaagtgggcgcaggtggtgagccactggacgcttgttacttgaaggcactggagggtttcgtcatggtgctgaccgctgaaggtgacatggcttatctgtctgagaatgtttctaagcatctcgggctgagtcagctcgaacttatcggccatagtatcttcgattttattcatccttgcgaccaggaagaactgcaggatgccctgacgccacaacagacactgtctcggcgaaaggtcgaagcccctaccgaacggtgcttctctctgaggatgaagagcaccctgaccagtcgtgggagaacattgaacttgaaagccgctacatggaaggtgctcaactgtagcggacacatgcgagcctataaaccccccgctcaaacctctcccgctggctccccagattccgaaccgccactgcaatgtcttgtactcatctgcgaggcgatcccacacccgggcagccttgaaccacctctcggtagaggcgccttcttatcccggcacagcttagacatgaaatttacgtactgtgacgaccgcattgctgaagtggccggatacagcccagacgacctcatcggctgttccgcctacgaatatatccacgcactggattccgatgccgtctccaagtccatccatacttgtatgtatccgatctcgcccggagcaaagccagccgccacttggccaccggctgatacacggacacctcagctgcccatccctcaggacgcacttcccccccacctgaatacatcatcattgcttccgaagccacagggtacagtaagttttttggctccctcctacccggttcccagatacttctctccacacctgcccccatggtggccgtag

SEQ ID NO: 120391 - DNA, 2976 bp, synthetic construct
  misc_feature 1..2976: note = Description of Artificial Sequence: Synthetic coding sequence
  source 1..2976: mol_type = other DNA
atggcagacaaggttagaaggcagcgcccacgccggcgagtttgttgggcactagtcgctgtcctcctggcagacctgctggcattgtccgatactctcgccgttatgtcagtcgacttaggaagtgagagcatgaaggtggctatcgtgcttaataaagaatccagacggaagacgcccgtcattgtgaccctgaaagaaaatgaacggttcttcggggattccgccgcgagcatggctatcaagaacccaaaggctacccttcgttactttcaacacctgctgggaaagcaagccgacaaccctcacgtcgctctgtaccaggccaggttccctgagcatgagttgacgttcgaccctcagagacagacggttcacttccagatcagttcccagctgcagttcagtcctgaggaagtgttgggcatggtgcttaactattctcgcagcctcgcagaagatttcgcggagcaacctattaaggatgcggtgataaccgtcccagtcttttttaatcaggctgagcggcgggctgttctgcaagctgccagaatggcgggactgaaggtgcttcagttaataaacgataataccgccaccgccctgtcatacggcgtgttccgacgcaaggatatcaacacgactgcgcagaacatcatgttctacgatatgggttcaggtagcacagtgtgtaccatcgtgacatatcagatggtgaaaaccaaagaggctggcatgcaaccccaactgcagatccgcggcgtggggttcgatcgcacacttggcgggctagagatggagttgcgcttgcgcgagcgtcttgccggcttattcaatgaacagcgtaaaggccagcgcgccaaagacgtgcgtgaaaatcccagagctatggccaagttgcttagagaagccaaccgacttaagaccgtactgagtgctaacgcggatcacatggcccagatagaaggactgatggacgacgtggactttaaggccaaagtcacacgagtggagttcgaggagctctgtgcagacctctttgagagagtccccggccccgtccagcaggccttgcagtccgcagagatgtcacttgatgagatcgaacaagtcatactggttgggggagctactcgagtccctcgggtgcaggaagtgctgctcaaagcggtgggtaaagaggagctgggcaagaacattaacgccgatgaagctgccgcaatgggagcagtctaccaagcagccgccctttctaaggcattcaaggtaaagccttttgtagtgagggacgcagtggtgtatcccatactggtagaatttacaagagaggttgaagaggagcccggaattcatagcctcaaacataataaacgcgtgctcttttcaagaatgggcccttatccgcaaaggaaagtgatcaccttcaatcgctactcacacgacttcaatttccatattaactatggtgatctcggcttcttgggtccagaggacttacgggtgtttggtagtcagaacctcaccaccgtcaaacttaaaggtgtgggggactcttttaaaaagtatcctgattacgaatctaagggcataaaggcccattttaatttggacgaatcaggcgtgcttagcctagatcgcgttgaatcggtgttcgagacgctggtcgaagattccgcggaagaagaatctacacttaccaagctgggaaatacaatatcaagtctctttggcggcggcaccacacccgacgctaaggagaatgggacagataccgtccaggaagaggaagaatctcccgctgagggcagcaaagatgagccaggggaacaggtggaactgaaggaggaagcggaagctcccgtggaagacggtagccagccgcctcctcctgagccaaagggagatgccacccccgagggcgagaaggcaaccgaaaaggagaatggtgacaaatctgaggcgcagaagccttcagaaaaggcagaagcaggccctgagggagtggcccctgctccagagggggagaagaagcagaagcccgcacgcaagcggcgcatggttgaagagattggcgtcgagctggtggtgttggatcttcctgatttgcccgaggataagctggcccaaagcgtgcagaagctccaggatttaaccctgcgggatctcgaaaaacaagaacgggaaaaggcagctaacagtctggaagcattcattttcgaaacccaggacaagctttatcaaccagagtatcaggaggtgagcactgaagaacagcgagaggagatttccggaaagctttctgctgctagcacctggctagaggatgagggggtcggagccacgacggtgatgctgaaggagaaactggcggaattacggaagctctgtcaggggctcttcttccgagtcgaggagagaaagaaatggccagagcggctttccgcgctggataacctgttgaatcactcttccatgttcttaaagggcgctaggctgatcccagagatggatcagatctttacagaggttgagatgactactctcgagaaagtcattaacgagacctgggcctggaagaacgccaccctcgccgaacaggccaagctgccggctaccgaaaagcctgtcctgttgtcaaaagatatcgaagccaaaatgatggcattagacagggaggtgcaatacctgctgaacaaagccaagttcaccaagccccgtcctcgacctaaggacaagaacgggaccagagccgagccacctctaaatgcgtccgctagtgaccaaggagagaaggtaatccctccagcagggcagacagaggatgcagagccaatctcagaacctgaaaaggtagagacggcgggctccgaaccaggcgacactgagcccctcgagctgggaggtccaggggcagaaccagagcagaaggagcagtctactggacagaagaggccactgaagaatgacgagctgtag

SEQ ID NO: 120392 - DNA, 3000 bp, synthetic construct
  misc_feature 1..3000: note = Description of Artificial Sequence: Synthetic coding sequence
  source 1..3000: mol_type = other DNA
atggctgataaggtccgcagacaacgtcctaggcgtcgggtgtgttgggcactggtagcggtccttcttgctgacctgctcgccttgtcagacactctcgcagttatgtccgtcgatctcggcagcgaatccatgaaggtggctattgtgaagccaggcgtgcccatggagatagtcctgaacaaggagagccgaaggaaaacgcctgtaatcgtgactctcaaagagaacgagaggttcttcggagactccgccgcgtcaatggcaatcaagaatcccaaggccacactgagatacttccagcacctactcgggaaacaggctgacaatccacatgtcgccctgtaccaagccagattcccagagcacgagctgacctttgacccacagcgccagacagtccatttccagatcagctcacaactgcagttcagccccgaagaggtgttgggaatggtcctgaactattcgagatctttggccgaggacttcgcggaacaaccgataaaagacgccgtgatcactgtgccagtattttttaaccaggctgaaaggagagccgtcctgcaggcagcccggatggctggtttgaaggtcttgcaactgattaatgacaacaccgcaacggctctctcatacggggtgttccgcaggaaagatatcaacacaactgcccaaaacataatgttctacgatatggggtccggctctaccgtgtgcaccattgtcacctaccagatggtcaagaccaaagaagccggcatgcagccacagctccaaatacgaggggtcggttttgatcgcactctgggtggcctcgagatggaactcaggctcagggagagactggcaggcctcttcaatgaacagagaaagggtcagcgcgctaaagacgtcagagaaaatccccgggccatggccaagcttctcagagaggccaataggctgaaaacggtgctaagcgcaaatgcggatcatatggcccagattgaagggctgatggacgatgtcgactttaaggccaaagtgacccgggtggagttcgaggaactctgcgctgaccttttcgagcgggtgcctgggcccgttcagcaggcacttcagtcagctgaaatgtcgctagacgaaatcgagcaggttatcctagtgggaggcgctacaagagttcctcgggtgcaggaggtgctgttaaaggccgtgggaaaggaggagctggggaaaaacattaacgctgacgaagccgccgcaatgggggctgtctatcaagccgccgcactgtccaaagccttcaaagtcaagccatttgtcgttcgcgatgctgtggtgtacccgatcctggtggagttcacacgggaagtggaagaagagcccgggatccactccctgaagcataacaaacgggttctgtttagcagaatggggccttacccccaacgaaaggtgattaccttcaataggtactctcacgactttaattttcacataaattatggagacctggggttcctgggacctgaggacctccgtgtgtttggctcccagaacttgactaccgtcaagctgaagggggttggggactccttcaagaagtatccagactacgaaagcaaaggaattaaggctcattttaacttagatgaaagtggagtgctgagtctcgacagagtggaaagtgtgttcgaaaccctggtggaggatagcgccgaagaggaatctactctcacaaaactaggaaatactattagctctctcttcggcggaggcactaccccagatgccaaagagaatggcaccgataccgtgcaagaggaggaggaatcgcctgcagaaggatccaaagacgagccaggagagcaggtcgagttgaaagaagaggccgaggcgccagtggaagatgggtcacagcctccgcctcctgaacctaaaggcgacgcgactcccgaaggcgagaaagctaccgaaaaagagaatggtgacaaaagcgaggctcagaagcccagtgagaaagcggaggccggacccgaaggagttgcacccgcccctgaaggagagaaaaagcagaagccggctcgcaagcgcaggatggtggaggagattggggtggagctggtggttctggacctgcccgaccttccagaggacaagctggcgcagagcgttcagaaattgcaagatctgacattgcgagatctggagaagcaagagagggaaaaggctgctaattctcttgaagcctttatcttcgagacccaggataagctgtaccagccagaatatcaggaggtgtccacagaggagcagagagaggaaatatctgggaagctgtcagctgcctccacgtggctagaggatgagggggttggagctacgaccgtaatgctgaaggaaaagctggctgaactcagaaagttatgtcaaggccttttcttccgagtggaggagcgcaagaagtggcctgagcggctttcagccctggacaacctcctgaatcacagttctatgttcctgaaaggagcaaggctgatccccgaaatggaccagatcttcacagaagtggagatgacaacgctcgaaaaggtgatcaatgaaacttgggcctggaaaaacgcaactcttgcagagcaggccaaactgccagcaacggaaaagcctgtgttattgagcaaggacatagaggctaaaatgatggcccttgaccgggaagttcagtacctactgaataaagctaagtttaccaaacctcgccccaggcctaaagataagaatggtactcgtgcggagccacctcttaatgcttcagcgagtgatcagggtgagaaggtgatcccacctgccggccagaccgaggatgccgagcctatatccgaacccgagaaggtggaaactggctctgagcccggagataccgaaccactggagctcggagggcccggggcggagcctgagcagaaagaacagtccactggccagaagcgtcctctgaagaatgacgagttatag

SEQ ID NO: 120393 - DNA, 2547 bp, synthetic construct
  misc_feature 1..2547: note = Description of Artificial Sequence: Synthetic coding sequence
  source 1..2547: mol_type = other DNA
atggttctaaattactcaagatcgctcgctgaagatttcgccgaacaacccatcaaggatgcggtcatcaccgtgcccgtatttttcaaccaggcggaacggcgcgccgtgctgcaggccgcccggatggctggcctgaaagttctccagctaataaacgacaatacagctacagcgctctcttatggggtgtttaggagaaaggatatcaatacaacagcccagaacattatgttttatgatatgggctccggctcaaccgtgtgtaccatcgtgacctaccagatggtgaaaactaaggaggcggggatgcaaccgcagctgcagatcagaggcgtcggcttcgataggactcttggtggtctggaaatggaattgcgcctgcgcgaaaggctcgctggattattcaatgagcagcgtaaggggcagcgggcgaaagacgtacgtgaaaatcctagagcaatggcgaagctgctgagagaggccaaccgccttaagactgtcctgagcgccaacgccgaccatatggctcagatagaagggttaatggacgatgtggactttaaggctaaggtcacccgcgtggaatttgaggagctgtgtgcggacttgttcgagagggttcctggccctgtacagcaggcacttcaaagcgcggaaatgtctctcgatgagatcgaacaggtgatattagttgggggagctaccagggtcccaagggtacaagaggttttgctcaaggccgtcggcaaggaggaattgggcaagaatatcaacgccgacgaggccgcggccatgggcgcggtgtaccaggcggccgctttgagcaaagcttttaaggtcaagcctttcgtggtaagggacgcagtggtgtatccaattctggtcgagtttacaagagaggtggaagaggaacctggcatccattcactcaagcacaataagcgagttctcttctcccggatgggcccctacccccagcgcaaagtaatcacattcaataggtattctcatgacttcaactttcatatcaactacggggacctgggtttcctcggacccgaagatcttcgcgtgttcggttcacagaatctgactaccgttaagctcaagggggttggagacagtttcaagaaataccctgactacgagtcgaagggaatcaaagcccatttcaatctggatgaatccggggtgttatcattggatcgggtggaatccgtatttgaaaccctggtagaagatagcgccgaggaggaaagcaccctgaccaagctgggcaacacaatttcttctctcttcggggggggcaccactcccgacgcaaaagaaaatggaactgacaccgtccaagaggaagaggaatctccggccgaagggagcaaagatgaaccgggagagcaagtggaactgaaagaggaagcagaggcccctgtcgaggatggatcgcaacctcccccgcccgaacccaagggcgacgccaccccggagggggaaaaggccacagaaaaggagaacggggacaaatcagaagctcaaaagccgtcagaaaaagctgaggcgggacctgaaggagttgcccccgcccccgagggagagaaaaaacagaagcccgcacgaaagaggcgaatggttgaggaaatcggtgtggaactggtcgtgctggacttgccagatcttcccgaggacaagctggcacagtcagtgcagaaactgcaagatctcaccttacgtgacctcgagaagcaggagcgggaaaaggccgcgaattctctggaagcttttattttcgaaacacaggacaagctgtatcaaccagaataccaggaagttagcaccgaagagcagcgcgaggagataagcggcaaattaagtgctgcctccacatggctggaagacgaaggggtaggagccaccaccgttatgttaaaggagaagctcgctgagctccgcaaactctgtcagggactatttttcagggttgaggagcggaaaaagtggccagagcgactgagcgccttagataatctgctgaaccactcttcgatgttcttaaagggtgccaggctgatcccagaaatggatcagatttttactgaggtcgaaatgaccactctcgagaaggtgatcaacgaaacctgggcctggaagaatgcaaccctcgcagagcaggcaaagcttcccgccaccgagaagcctgttttgctctcaaaggatatcgaagcaaaaatgatggcgctggatagggaagttcaatacctgctgaataaggccaaattcacaaagccaaggccgcggccgaaagacaaaaatgggacgcgcgcggagcccccgctgaacgccagcgcctccgaccagggtgaaaaggtgattccacctgctggacaaacagaagacgccgagcccatctctgaacctgagaaggtggaaacgggatcagaacccggcgatacagagccccttgagttggggggccctggcgccgagccagaacagaaggaacagtccactgggcagaagcgtcccctgaaaaacgatgaactgtag

SEQ ID NO: 120394 - DNA, 2040 bp, synthetic construct
  misc_feature 1..2040: note = Description of Artificial Sequence: Synthetic coding sequence
  source 1..2040: mol_type = other DNA
atggcagacaaagtacgacgccagcgcccaaggcgacgcgtgtgctgggccctggtcgcagtcctgctggctgatctgctcgccctttccgacactttagcagtgatgagtgtcgacctggggagcgaaagcatgaaggtggccattgtaaagccaggtgtgcccatggagatcgtgttgaataaggagagcagacgaaaaacgcctgtgatcgtgaccttaaaagagaacgaaaggtttttcggagactccgcagcctccatggcgattaagaacccgaaagcaaccctgcggtattttcagcacctgctgggcaaacaggcagacaatcctcatgttgccctgtaccaagcacgcttccctgagcatgagctaacattcgacccccaacgccagactgtacacttccaaatcagtagccagctgcagttcagtcctgaggaggtgctcgggatggtgttaaactattcccgcagcctggccgaagacttcgctgagcagccaattaaggatgctgtgattacagtgcctgtgttctttaatcaggctgagcggcgcgcagttttgcaagccgctcgaatggctggcttaaaggttctccagctgatcaatgataacacagccaccgcgttgagttacggcgtgttcagacgaaaagacatcaacaccaccgcccagaacatcatgttctacgatatgggtagcggctccacagtgtgcaccatagtgacgtaccagatggtgaaaacaaaagaggccgggatgcagcctcagcttcaaatccggggggtgggattcgataggactcttggaggcttggagatggagctgagactgcgagagagactggccgggttattcaacgaacagagaaagggacaaagagccaaagacgttcgagaaaatccccgcgcaatggcgaagctgttacgtgaggctaatcgacttaagacagtcctctcagctaacgcagatcacatggcccagatcgaggggctgatggatgacgtggacttcaaggccaaggtgactcgggtggaatttgaagaactgtgcgctgacttgtttgagcgggttcctgggccagtgcagcaggcccttcaaagcgcagagatgtcgctcgatgagattgagcaggtgatactcgtgggtggcgccactcgtgtgcctagagttcaggaggtactgctgaaggccgtagggaaagaagagctgggtaagaatattaacgccgatgaagccgccgcgatgggcgctgtgtaccaggccgccgcgttatccaaagcttttaaggtaaagccctttgtggtgcgggacgctgtcgtgtatcccattctggttgagtttactcgcgaggtggaggaagagcctggtatccactcactgaagcataataagagagtactgttttcccgaatggggccatacccccagcgtaaggtgatcacctttaaccggtattcgcatgattttaattttcacatcaattacggagatctggggttccttggcccagaggatctgcgtgtgttcgggagtcaaaatctgacaactgttaagctgaaaggtgtgggcgattcctttaagaagtacccggactacgaatccaaaggaatcaaggctcacttcaacctagacgaaagcggggtgctgtctctggaccgggtagagagtgttttcgagacccttgtggaggactcagccgaggaggaaagtaccctgaccaaactcggtaacacaatatcatctctttttggagggggaaccacccctgatgcgaaagagaatggcactgatacggtgcaagaagaggaagaatccccggcggagggcagcaaagacgagcccggtgaacaggtggagttgaaggaagaggccgaagcacccgtggaggatggcagtcaacccccccctcccgaacccaagggtgatgccacccctgaaggggaaaaggccactgagaaggaaaatggcgacaagagtgaagcacagaagcctacttccgtctgccgagctagcgtgactaggtttgggttttag

SEQ ID NO: 120395 - DNA, 444 bp, synthetic construct
  misc_feature 1..444: note = Description of Artificial Sequence: Synthetic coding sequence
  source 1..444: mol_type = other DNA
atggccgataaagttcgtcggcagaggcctagacgtagagtgtgttgggctctggtggccgtcctgctggccgacctgcttgccctgtccgacactctcgccgtgatgtccgttgaccttggcagcgaatcaatgaaggtcgcgatcgtaaagccgggagtcccaatggagatagtgcttaataaggagagccggcgaaagacgccagtgatagttacactgaaagaaaatgagcggttttttggagacagcgcggcttctatggcgatcaagaaccccaaggcaactttgaggtacttccagcacctcttgggcaagcaagctgataatccccacgttgctctgtatcaggctagattccccgagcatgagctcacattcgatccccagcgccagacagtgcactttcagatcagttcacagctgcagttttcgcccctctag

SEQ ID NO: 120396 - DNA, 1680 bp, synthetic construct
  misc_feature 1..1680: note = Description of Artificial Sequence: Synthetic coding sequence
  source 1..1680: mol_type = other DNA
atggcgataaagaatccgaaagccacactaagatatttccaacatctgctcggcaagcaggccgataatccacatgttgccctgtatcaggccagattccctgaacacgagctgacattcgacccacagcggcagaccgtccatttccagataagtagccaacttcagttttcgcctgaggaagtgctggggatggtgcttaactactccagatctttggccgaagacttcgctgaacaacctattaaggacgctgtgatcactgtgccagtgttctttaaccaggcggagagaagggctgtgcttcaggctgcccggatggcaggcctgaaagtgttacagttaattaatgacaacacagcgacggctctctcttatggcgtcttcagaagaaaagacataaacactactgcgcagaatatcatgttttacgacatgggctcaggatctaccgtatgtaccatagttacctatcagatggtcaagacaaaggaagctggtatgcagcctcagctccagatacggggagtggggtttgacaggactttggggggtcttgagatggagctgcgactgcgagaaaggctagctggactgtttaacgagcagcgtaagggccagcgtgccaaagacgtgcgtgaaaaccccagggccatggcgaaactactccgggaagcaaaccggctcaaaactgttttatcagccaacgctgaccatatggcccaaatcgaagggttgatggatgatgttgactttaaggcgaaggtaacaagagtggagtttgaagaactgtgcgccgacctgttcgagcgggtccctgggccggtgcagcaggctctgcaatcggccgagatgtccttggacgagattgagcaggtaattctggtgggaggagcaacacgcgtcccccgggtccaggaagtcctgctgaaagctgttgggaaagaggaactcggaaaaaacattaacgcagatgaagccgctgccatgggtgctgtgtaccaggcagccgctctgagtaaagccttcaaggtgaagccgtttgttgtgagggacgcagtggtgtatcctattttggtcgaattcacccgagaggttgaggaggagccaggtattcatagtttgaaacataacaaacgcgtgctgttttcccgcatgggcccttatccccaacggaaggtgatcacttttaatagatatagtcacgatttcaacttccacatcaactatggcgatctggggttcctcgggccagaggacctgagggtatttggaagccagaatttgaccacagtgaagttgaaaggagtgggagattcgttcaagaagtatcccgattatgagtcaaaggggattaaggcccacttcaatctcgacgaatcaggcgtgcttagcctggacagagtcgagtcagtttttgaaacactggtggaagactcagctgaggaggagagcacactaacaaaactgggcaataccatttcatcactttttggtggggggacgacaccagatgctaaagaaaacggcaccgataccgtccaaatgctattcctctgccccgcaaggctaccgcaatccaagcaggccatagaccgattccacaccgcggtaacatgcatggagcctccatggggaaggcgttgtcgcgctaggccagcctggcgattgtgttcttag

SEQ ID NO: 120397 - DNA, 2943 bp, synthetic construct
  misc_feature 1..2943: note = Description of Artificial Sequence: Synthetic coding sequence
  source 1..2943: mol_type = other DNA
atgtggcagtcccggggccccatgctattccacctcggactctgcgtgggcgctgcgggtatgatccgggaatggtttgtgccaattaggagggagaagggcagtcgactcatttgccccggcggtaccatggcggacaaggttagacgccagcgcccacgccgcagagtttgctgggctctggtagcagttcttctcgcggacctcctggctcttagcgacactctagccgtaatgtcagtcgacctcggaagcgaatcaatgaaagtggccatcgttaaacccggggtccccatggaaatcgtgctgaacaaagagagtagacgaaagacgcccgtgatcgttactctgaaagagaatgaaagattcttcggcgatagcgctgcttctatggccataaaaaatccgaaggccacacttcggtattttcagcatctgctgggcaaacaggcggataacccccatgtagccctgtaccaagcaagatttcccgaacacgagctgacctttgatccccagcgccagaccgtgcacttccagatttcatcccagctgcaattttctccagaggaggtgctcgggatggtgctgaattattccaggtccctggctgaggactttgccgaacagccgatcaaggatgcggtcataaccgttcccgttttctttaatcaggcggagcgaagagccgttctgcaggcggctaggatggccggattgaaagtcttgcagttgatcaacgacaataccgcaaccgccctttcctatggggtgtttcgtcggaaggacattaatactaccgcacaaaatattatgttttacgatatgggcagcggttcaaccgtctgcacaattgtgacttatcagatggtaaagaccaaggaggcaggcatgcaacctcagttacagatacggggcgtgggctttgatcgcactctcggtggactggaaatggaattgagactgcgagaacgcctggcaggcttgttcaatgagcaacgaaaggggcagagagcaaaggacgttagagaaaatccgagagctatggccaagctgctgcgggaggcaaaccgactcaaaacagttctcagtgcaaatgccgaccacatggcccagattgaggggctgatggatgatgtcgacttcaaagccaaagtgacccgcgtggaattcgaggaattatgcgccgatttgtttgagagagtgccaggccctgtgcagcaagcactgcagagcgctgaaatgtccctagatgagattgagcaggtaattttagtgggtggcgccacacgcgtgccccgggtccaagaagtcctccttaaagcggtaggaaaggaggagttagggaagaatattaacgctgacgaagctgcagccatgggggcagtttaccaagccgctgctctgagtaaggcatttaaggtgaagccattcgtcgtgagagacgcagttgtgtatcccatcctcgtggagtttacacgggaagtggaggaagagcctggaatccacagtctcaaacacaataaacgagtgctgttctcccgcatgggaccctatccgcagcgcaaggtcataacattcaaccggtactcgcacgatttcaactttcacattaattatggcgatctggggtttctcggaccagaagatctgcgcgtgttcgggtctcagaaccttactacagtcaagttgaagggtgtcggcgatagtttcaaaaagtaccccgactatgagagtaagggcatcaaggcacacttcaatctggacgagtccggcgtattgtctctggatcgcgtcgaaagtgtgtttgaaactctggttgaagacagtgcggaagaggagagcacactgacaaagcttgggaacaccatttctagcctctttggcgggggcacgacaccagacgcgaaggaaaatgggacagataccgtgcagaagccatccgagaaagccgaagcaggcccggagggcgtggcccctgctccagaaggagagaagaaacagaagcccgccaggaagaggaggatggtggaagaaataggggtagaacttgtggtcctcgatttacctgacctccctgaagacaagctggcacagtccgtacagaagctgcaagatcttactcttcgggacctcgagaaacaagagagagagaaggcagctaacagcttggaggcttttattttcgagacacaggataagctttaccagccagaataccaagaggtttccacggaagaacagagagaagagatctctggcaaactttctgctgcatcaacatggctggaagacgagggcgtaggggccacaaccgtgatgctgaaggagaagctcgctgaactgcgaaagttgtgtcagggcctcttctttcgcgttgaagagaggaagaagtggccagaaagattaagcgcgctggataacctgctcaatcatagcagcatgtttcttaagggtgctaggttgattcctgagatggatcaaatctttactgaagtagaaatgactactttggaaaaggttataaatgagacttgggcctggaaaaatgcgacgctggccgaacaagccaaattgcccgccactgagaagccggtcttactgtcgaaggacatagaggcaaagatgatggcccttgaccgggaggtgcagtatctcctgaacaaggccaagtttacgaagccacggcctagaccaaaagataagaacggaacacgggccgagcccccactgaatgcatccgcttcagaccagggagaaaaggtgattccgccagccggacagacagaggatgcggagcccatatccgaacctgagaaggtggaaacaggtagcgaaccaggggacacggagccactcgagctcggcggaccaggagccgaacctgaacagaaagaacagtccaccggccagaaaagacccctgaaaaacgatgaactttag

SEQ ID NO: 120398 - DNA, 333 bp, synthetic construct
  misc_feature 1..333: note = Description of Artificial Sequence: Synthetic coding sequence
  source 1..333: mol_type = other DNA
atggctcccaggggttgcatcgtggccgtcttcgctatattttgcatttcacggctgctgtgtagccacggcgcacccgtggcccccatgactccgtacctaatgctatgccagccgcacaaaagatgcggggataaattttatgatccccttcagcactgctgttacgacgacgcagtggtcccccttgccagaacacagacgtgcggaaactgtacctttcgggtctgttttgagcagtgctgtccgtggacattcatggtgaagctgattaaccaaaattgtgattcagcaagaacatctgacgaccgtctttgccggtctgtgagttag

SEQ ID NO: 120399 - DNA, 360 bp, synthetic construct
  misc_feature 1..360: note = Description of Artificial Sequence: Synthetic coding sequence
  source 1..360: mol_type = other DNA
atggttcccaggatctttgctcccgcatacgtgtctgtgtgtcttttgctcctgtgtcctcgagaggttattgcacctgcaggttccgaaccctggttatgtcagcctgcaccaaggtgcggcgacaagatctacaatccactcgagcagtgctgctataacgacgccattgtctccctgtctgagacccggcagtgcgggcctccatgcactttttggccatgttttgagctttgttgcttagattcctttgggctgaccaatgacttcgtggtcaaactgaaagtccagggggtgaatagtcaatgtcacagcagtcccatttcatcgaagtgcgagtctaggagacgcttcccctag

SEQ ID NO: 120400 - DNA, 393 bp, synthetic construct
  misc_feature 1..393: note = Description of Artificial Sequence: Synthetic coding sequence
  source 1..393: mol_type = other DNA
atgcgatttagcgtaagtggtatgcgaaccgactatccccgaagcgtgttagcaccggcctacgtgtctgtgtgcctgcttcttctgtgcccacgcgaagtgattgctcccgccggcagcgaaccctggctctgtcagccagcgcccaggtgcggagacaaaatttacaatcccctggaacagtgctgctacaacgatgccatcgtaagtctttcagagacgcggcaatgtggaccaccctgtacgttctggccctgtttcgagctgtgttgcctcgactcctttgggcttaccaacgactttgtggtcaaattgaaggtgcagggagtcaatagtcagtgtcactcctcaccaatctctagcaaatgcgaatccaggaggagattcccctag

SEQ ID NO: 120401 - DNA, 378 bp, synthetic construct
  misc_feature 1..378: note = Description of Artificial Sequence: Synthetic coding sequence
  source 1..378: mol_type = other DNA
atgaggcctcgatgttgcatcttagccctcgtgtgctggataaccgtgtttctgttacagtgcagcaaaggtacgactgacgctccggtggggtccgggctttggctttgtcagcctactccacgctgtggaaacaagatctacaaccccagcgagcaatgctgctacgacgatgcgatattgagcctcaaagaaactaggaggtgcgggtccacttgcacattttggccatgctttgagctgtgttgtcctgagtcattcggaccccagcagaaattcctggtgaagttgagggtccttggcatgaaatctcagtgtcatctttctcctatctctagaagttgcactcgtaaccgaagacacgtgctgtacccttag

SEQ ID NO: 120402 - DNA, 375 bp, synthetic construct
  misc_feature 1..375: note = Description of Artificial Sequence: Synthetic coding sequence
  source 1..375: mol_type = other DNA
atggttccgcgcatctccgccgctatttttatctttgagttgctcggctcaaacagtgaaggagtgacagatctccgcctgtggctttgccagccggctccacggtgtggagaatggacgtataaccctttggaacaatgttgcgacgacggagtgatccttgacctgaatcaaactcggctgtgcgggagcagttgtaccttttggccctgctttcagcactgttgcctggaaagtctgggctcccaaaaccagaccgtcgtgcggtttaaggtgccaggcatgaagcccgactgcaaaagttctccaatcacacgcatctgcgcgcaggaataccacccgaaatcgcccgtgtccaggagcgatctgatatag

SEQ ID NO: 120403 - DNA, 1068 bp, synthetic construct
  misc_feature 1..1068: note = Description of Artificial Sequence: Synthetic coding sequence
  source 1..1068: mol_type = other DNA
atgggccccggacgctgcctgctgaccgcgctcctactgctggcactggctccaccacctgaggcatcacaatattgtggcagattagagtactggaatcctgacaacaaatgctgcagtagttgtctgcagcggtttgggccccccccatgcccagattatgaatttagggaaaactgcggtctcaacgaccacggcgactttgttacaccacccttccggaagtgttcctcaggccagtgcaaccctgatggagctgaactctgttccccctgcggtggcggtgccgtgacacccactcctgctgccgggggcggaaggaccccttggaggtgccgcgaaaggcccgttcccgccaaaggccattgccccctgactcccggcaatcccggagccccgagcagccaggaacggagttctcctgcatcctccatcgcatggcgaaccccagaaccagtcccccaacaagcctggccaaacttcttgcccttggtggtgttggttctactgcttactttggcagtgatcgctattcttctctttattctgctgtggcatctgtgctggccaaaggagaaagctgacccctacccatatccaggactcgtttgtggagttcccaatacacacacaccatcttcttcccatctgagctcacccggcgcgctggaaacgggggatacatggaaggaagcatccctgctgcccctgctgtcacgggagcttagcagcctggcatcccagcctctgtctcgtttgttggacgaactcgaggtccttgaagaactgattgtgctgctcgatcctgagccaggacctggtggcggtatggctcatggcaccactagacaccttgccgcacgttacggcttaccggcagcctggagcactttcgcctactccctgcggccgtcacgttcccccttacgagcacttatcgagatggttgtcgccagagagccgtccgcttctctaggccaactgggaacccacctggcccagctgggtcgtgccgacgctttgcgggttttgagtaagcttgggtctagtggcgtgtgctgggcttag

SEQ ID NO: 120404 - DNA, 504 bp, synthetic construct
  misc_feature 1..504: note = Description of Artificial Sequence: Synthetic coding sequence
  source 1..504: mol_type = other DNA
atggggccaggacgatgcttgcttacagccctgctgctgttagctctagccccacctccagaggcatctcagtactgcggaagattggagtattggaacccagataataagtgttgcagctcttgtttacaaagattcggccctccgccttgtcctgaactgagttccttggcttcacaaccactgtcgcggcttcttgacgaactcgaggtcctggaggagttgatcgttctgctcgacccggagcccgggccaggaggggggatggcccatggaacaaccaggcacctggccgctcgctacggcctgcccgcagcctggtcaaccttcgcttatagcttacggccctcgcggtcccccctcagggctctgattgagatggtggtggctcgtgaaccatctgcaagtctcgggcaactgggtacccatctggcccagttgggccgggcagacgctctcagagtactttcaaagctcggatcatcaggcgtgtgttgggcttag

SEQ ID NO: 120405 - DNA, 723 bp, synthetic construct
  misc_feature 1..723: note = Description of Artificial Sequence: Synthetic coding sequence
  source 1..723: mol_type = other DNA
atgccagaacgcgactctgagcccttctccaatcctctggcgcctgacggccacgacgtggacgacccccacagtttccaccagtctaagctcacaaatgaggacttccggaagctcctgatgaccccgagggcagcaccaacgtcggcgcccccgagcaaatccaggcatcacgagatgccccgcgagtacaatgaggacgaagacccggctgctcgacgtaggaagaagaagtcgtattacgctaagctgcggcagcaggagatcgaacgagagcgagagctagctgagaagtatcgtgatcgggccaaggagcggagggatggagtcaataaggattacgaagaaaccgaattaatctccaccacagccaactatagggctgtgggccctactgctgaagccgataaatcggccgctgagaaaagaaggcaattgattcaggagtccaagtttctcggcggcgacatggaacatacgcacctggtgaaaggactggatttcgcactgctgcagaaagtgcgcgctgaaatcgcaagtaaagagaaagaagaagaagaactgatggagaagccgcagaaagagacaaagaaagatgaggatccagaaaacaagatcgaattcaagacaaggctcgggcgtaacgtttatagaatgctatttaagtccaaggcttacgagcgaaacgaactattcttgccaggaagaatggctatgtggtag

SEQ ID NO: 120406 - DNA, 1674 bp, synthetic construct
  misc_feature 1..1674: note = Description of Artificial Sequence: Synthetic coding sequence
  source 1..1674: mol_type = other DNA
atgccagagagagatagcgagcctttctccaatcccctggcacccgatgggcacgatgtggatgaccctcactcttttcaccaaagtaagcttaccaacgaggactttcgaaaactgctgatgaccccaagagcggcacccacttctgcaccccccagcaagtctcgccatcacgagatgcccagggagtataatgaagacgaggaccctgccgctcggcgtcgaaagaaaaagagctactatgcaaaactgaggcagcaggaaatcgagcgggagagggagctggccgagaaatatcgcgaccgcgcaaaagaacggagagacggagttaataaggactatgaagagaccgagctgatcagcacaaccgcgaattacagagccgtgggtcccacagccgaggcagacaagtcagccgccgaaaagagaagacagctgatccaggagtctaaattcctgggaggagatatggaacacacgcaccttgtaaaagggttagattttgccctcctccaaaaggtgagagctgaaatcgcaagtaaagagaaggaggaggaggagttgatggaaaaaccccagaaagagaccaagaaggacgaagatccagagaataagattgagtttaaaactagactgggcagaaatgtctaccgcatgctctttaaatccaaagcatacgagcggaacgaactcttcttgccaggacgcatggcttacgtggttgacctggatgatgaatacgcagacacagatatcccgacgaccctcatccgcagcaaagcggactgtcccactatggaggcacaaactacactcacaacaaatgacatcgtgatctccaagttaacgcagatactgagctacctgcgccagggcacacgtaacaaaaaattgaaaaagaaggataagggcaagctggaggaaaaaaaaccacctgaggctgacatgaacatcttcgaagatatcggggactacgtcccctccaccactaaaacgccacgcgataaagagcgcgagaggtaccgggaaagagagagagaccgcgagcgtgacagggatcgcgacagggagcgcgagagagaacgggatcgggagagggaaagagagcgagatcgagagagggaagaggagaaaaagcggcactcttatttcgaaaaacccaaggtggatgatgaacccatggatgtggacaaaggtccgggcagcactaaggaactcattaagtcaatcaatgaaaagtttgccggctccgcagggtgggaaggtaccgagtcactgaaaaaacctgaggataaaaaacagcttggcgactttttcggcatgagcaattcttatgctgagtgttaccccgccacgatggatgacatggcagttgactctgacgaggaagtagattactccaaaatggaccaaggaaataaaaaaggcccgctaggaaggtgggatttcgatactcaggaagaatactcggaatatatgaataacaaggaggctctgcccaaggccgccttccagtatggcattaaaatgagcgagggtcgaaagacgaggcgattcaaggaaaccaatgataaagccgagcttgaccgccagtggaaaaaaatctcagctatcattgaaaaaaggaagaagatggaggcagacggcgttgaggtgaagaggcccaagtactag

SEQ ID NO: 120407 - DNA, 1560 bp, synthetic construct
  misc_feature 1..1560: note = Description of Artificial Sequence: Synthetic coding sequence
  source 1..1560: mol_type = other DNA
atggatgctgacgaaggccaggatatgtctcaggtgagtggaaaggaatccccaccagtctccgatacaccagacgaaggcgacgaaccgatgcccattcccgaggacctgagcaccacttccggcggccaacagtctagcaaatctgatagagtggtggcatccaacgttaaggtggagactcaatccgacgaagagaacggtcgcgcctgtgaaatgaatggtgaggagtgcgccgaagacctcaggatgctggacgcatctggcgaaaagatgaacggctcccacagagaccagggtagttctgcccttagcggtgtcggggggattcgcttgcccaacggaaagttgaagtgtgacatctgtgggataatatgcattggccctaacgtattgatggtgcataagaggagtcatacaggagagaggccctttcaatgtaaccaatgtggggcatctttcactcagaagggaaacctgctgaggcacatcaaattacactccggagagaagccatttaaatgccacctgtgtaactatgcttgtcgaagacgggacgcattaacaggacatctcagaacgcattctgtcgggaagccacacaagtgtggatattgtggccgatcgtacaagcaacggtcatccctcgaggagcacaaagagcgttgtcacaattatctcgagtctatgggcctgccagggaccctgtatcctgtaataaaagaggaaaccaaccacagcgaaatggcggaggatctatgtaaaatcggctctgagaggtcactggttttagataggctcgcctcaaacgtcgccaaacgaaagagcagcatgccacagaaatttctcggggataaggggctttctgacacaccctacgatagctctgcgtcttatgaaaaggagaatgaaatgatgaagtcacatgtcatggatcaggcgatcaacaatgctatcaattatctaggcgccgagtcactgaggccacttgtgcaaactcctcctggcggctccgaagtggttccagtgatttctcccatgtaccagcttcacaaacccctcgcagagggaacaccacggtctaaccactcagctcaggacagcgctgtggagaatctccttctgctgtcaaaagccaagctggtgccttctgagagggaagcctcaccctctaactcatgtcaagactcgacagatacagagagtaataatgaggagcagagatcaggtcttatctacctgacaaaccacattgcgccgcatgcccggaacggactatctctcaaagaagaacatagggcgtatgacctccttcgcgctgcttctgagaacagccaggatgccctgcgcgtagtatctactagcggcgagcaaatgaaggtgtacaagtgcgaacactgccgggtgctctttctggaccacgtgatgtacaccattcacatgggttgtcacggatttagggacccttttgagtgtaacatgtgtggttatcactcgcaagaccggtatgagttctcttcacacatcaccagaggcgagcaccgatttcatatgagttag

SEQ ID NO: 120408 - DNA, 1299 bp, synthetic construct
  misc_feature 1..1299: note = Description of Artificial Sequence: Synthetic coding sequence
  source 1..1299: mol_type = other DNA
atggacgcagacgagggacaggacatgagtcaggtgtccggcaaggaaagccccccggtatctgacactccagatgaaggcgatgagccaatgccgatccccgaagatttgtccacaacgtccggcgggcagcagtcgagcaagagcgatcgcgtggtgggggagaggcccttccagtgtaatcagtgtggggctagtttcacacaaaagggcaatctgttgagacacataaaacttcacagcggcgaaaaaccgttcaagtgccacctgtgtaattacgcatgtaggcgacgagatgctctcacaggccacctcagaacccatagcgtggggaaaccccacaaatgtggctactgcggacggagttataaacaaagatccagcctggaggaacacaaggaacggtgtcacaattacctagagtcaatgggcctgcctggcactttgtatccagtcattaaagaggagaccaatcatagcgagatggctgaggatctgtgcaaaataggcagcgaaaggtccttggtgctcgatagattagcttccaatgtggcgaagcggaaatcctccatgccacagaagtttctcggtgacaagggtctcagtgataccccatacgatagctcagccagctatgaaaaggaaaatgagatgatgaaatcccatgttatggatcaagccattaacaacgcaattaattatctgggtgcagagtctttgagaccactggtccagactccccctggggggtccgaagttgtaccggttatcagccctatgtaccagttacacaaaccactggctgaggggacacccaggagtaaccacagcgcacaggacagcgcagtcgagaatttgttactgctcagtaaagctaaactggttccatctgaaagggaggcatccccatctaactcttgccaggatagcaccgataccgaaagcaacaacgaggagcaacgctctggtctcatctacctgactaatcacattgcaccccacgctcgaaacggcctgtctctaaaagaggagcacagggcttacgaccttctgcgcgctgcctctgaaaattctcaagatgccttgcgtgtggtgtctacctctggagaacagatgaaagtttacaagtgtgagcattgccgcgtgctatttctggaccacgtgatgtacacaattcacatgggctgtcatggttttcgggatccatttgagtgtaacatgtgcggataccattcccaggataggtatgagttttcatcacacatcactagaggggagcaccgtttccatatgagttag

SEQ ID NO: 120409 - DNA, 870 bp, synthetic construct
  misc_feature 1..870: note = Description of Artificial Sequence: Synthetic coding sequence
  source 1..870: mol_type = other DNA
atggatgcagacgagggtcaggacatgtcgcaagtgagcggcaaagaaagcccacccgtctcagacactcccgatgaaggcgacgagcctatgccaatccctgaagatcttagtactacctcaggcggtcaacagagctctaaaagcgaccgcgtggttggagacaaaggcctttctgataccccgtacgatagctcggcttcttacgaaaaggagaacgagatgatgaaatctcacgtcatggaccaagccattaacaacgcaattaactaccttggggcggaaagcttgaggcccctggtacagacgcctccaggcggctccgaggtagtcccggtaatctcgcctatgtaccaactccacaaacctctagccgaaggcactcctagaagcaatcacagtgcccaggattccgcagtggagaaccttcttctgctctctaaggcaaaattagtccccagcgaaagagaagccagcccgagcaatagttgccaagactcaaccgacaccgaatccaataatgaagagcaaagaagtggcctgatctaccttacaaaccacatagcccctcacgcacggaacggactgagcctcaaagaggagcacagggcttatgatttgttaagggccgctagtgaaaactcccaggatgccctgcgggtcgtcagcacaagcggcgagcagatgaaagtctacaagtgtgaacactgccgtgtcttattcctggatcatgttatgtacacaattcacatggggtgccacggctttcgagatcctttcgaatgtaacatgtgtgggtaccattcccaggacagatacgagttttcctcccacattacccgaggggagcatagattccatatgtcttag

SEQ ID NO: 120410 - DNA, 1131 bp, synthetic construct
  misc_feature 1..1131: note = Description of Artificial Sequence: Synthetic coding sequence
  source 1..1131: mol_type = other DNA
atggatgccgatgaaggccaggacatgtcccaggtctccggcaaagagagtcctcccgtgagtgatactcccgacgaaggagatgagcctatgcccatcccagaggatctgagcacgaccagtggcgggcagcaaagcagcaaatccgaccgcgtggtggcctccaatgtgaaggtggagacccaaagcgacgaggagaacggaagagcctgtgagatgaacggagaggaatgtgccgaagaccttcgcatgcttgacgcctcaggtgaaaaaatgaatggatctcaccgtgaccagggcagcagtgccctcagcggtgtgggcgggatccgactgcccaatggcaaactgaagtgcgacatatgtgggattatctgtatcggccccaatgtactcatggttcacaaacggtctcacactggggataaggggctgtcagacactccctacgacagtagtgcttcatacgagaaggaaaatgagatgatgaagagccacgtgatggatcaggctattaacaatgccatcaactacttaggggctgaatcattgaggcctcttgttcagactccccctggtggaagcgaagtagtgccagtcatcagtccaatgtatcagctgcataagcctcttgctgaaggaacccctcgctccaaccattcagcacaggacagcgcagtagagaatctcctactcctttccaaagctaagttggtccctagcgagcgcgaggcttcaccttcaaactcatgccaagatagcacggatactgagagcaacaatgaagagcagagatcgggacttatatatttgacaaaccatattgcccctcatgcccggaacggactctcactaaaggaagaacaccgcgcttatgatctgctcagagccgcctcagagaactcacaagacgcgctgagagtggtttccacctctggcgaacagatgaaagtatacaagtgcgagcactgcagggtgctttttctcgaccacgtcatgtacaccattcacatgggatgtcacggatttcgggaccctttcgagtgtaacatgtgtgggtatcacagccaagatagatatgagtttagctcacatatcacccgaggcgagcacaggtttcacatgtcgtag

SEQ ID NO: 120411 - DNA, 1299 bp, synthetic construct
  misc_feature 1..1299: note = Description of Artificial Sequence: Synthetic coding sequence
  source 1..1299: mol_type = other DNA
atggacgccgacgaagggcaggatatgagccaagtctcaggtaaggaatcgccgcctgtgtcagacacacccgacgaaggggatgagcctatgccgataccagaagacctaagcaccacttcaggagggcagcagtcttccaagagcgatagagtggtggctagcaatgtcaaggtagagactcagtccgatgaagagaatggcagagcatgtgagatgaatggcgaggaatgcgctgaggacctacgcatgcttgatgcctctggcgagaagatgaacggatcgcatcgggatcaaggctcatctgctctttctggcgtgggcggaatcaggttgcctaacggcaagttaaagtgcgacatctgcggcattatatgcatcggtcctaatgtgctgatggtgcacaagcgctcacatacaggggaaaggccctttcagtgtaatcaatgtggggcatccttcacccagaaaggcaacctcctgcgccacatcaaactgcactccggtgagaagccctttaagtgtcacttatgcaattacgcctgccgccggcgcgacgcactgactggccaccttaggacacacagcggcgataagggactttccgatacaccttatgactcatcagcaagttatgagaaagagaacgagatgatgaagagccatgtgatggatcaggcaatcaacaacgccatcaattacttgggagccgagtccttacgccccttagtacagacaccacctggcggcagcgaggttgtgccggtgataagcccgatgtaccaactgcataagcccctggccgaaggaacaccccggagcaaccattcagcacaggatagcgccgtggaaaacctgctcctgctgtctaaggcaaagctagttccgagcgaaagggaagcatctcctagcaattcatgccaagattccacagacacggaaagcaataatgaagagcaacgcagcggactgatctacttaaccaaccatatcgccccacatgcccgaaacggcctgagtctgaaagaagaacacagggcatacgacctgttgcgcgccgccagcgagaatagccaagatgcactgcgtgtagtctcgacgtctggggaacagatgaaggtctataagtgcgaacattgtcgggtgcttttcttggatcatgtgatgtacacgattcacatgggatgtcacggctttcgggatccatttgagtgtaatatgtgcggataccactcgcaggacaggtatgaattttcctcccacatcacaagaggcgaacataggttccacatgtcttag

SEQ ID NO: 120412 - DNA, 1434 bp, synthetic construct
  misc_feature 1..1434: note = Description of Artificial Sequence: Synthetic coding sequence
  source 1..1434: mol_type = other DNA
atggatgcggatgagggccaggatatgagccaggtctccggaaaggaaagcccacccgtctccgacacccctgatgagggtgatgaacccatgcccatacccgaagatctgtctactacaagcgggggacagcagtctagtaagtcggatagagtcgtcgcgtctaatgttaaagtggaaacccagagtgatgaagagaatggacgcgcgtgcgagatgaacggtgaagaatgtgcagaggatctgcgcatgcttgatgcctctggtgaaaaaatgaacggatcccaccgggaccagggctcttcggccctatcaggtgtaggcggtatcaggcttccgaatgggaagttgaagtgcgacatatgtgggattatttgtatcggaccaaatgtcctgatggtgcacaaaagaagccataccggggaaagaccattccagtgtaaccaatgcggcgcctcctttactcagaaaggcaacctactgagacacataaaattacacagtggcgagaaaccctttaagtgccatctctgtaattacgcctgcaggcgtagagacgctctgaccgggcacctgagaacccatagcgtcataaaagaggagactaaccattccgaaatggccgaggatttatgcaagattggatcggaaagaagcttagtcctcgatagattggcaagcaacgttgccaagcgcaagtcatcaatgcctcagaagtttctcggggacaaaggactgagtgacaccccttacgattcttcagcctcctacgaaaaagaaaacgagatgatgaagtcccacgtcatggaccaagcgataaacaacgccatcaattacctgggcgccgaaagcctccggcctctggtccaaacgcctcccgggggaagtgaagtggtccctgttatctcccctatgtatcagctacataagccgctggctgaggggactcctagatccaatcactccgcccaagactcggccgtagaaaacctcctccttctgtcgaaagccaaactagttccctctgagcgcgaggctagccctagtaatagttgccaagacagcactgacactgagtcgaacaacgaagagcagcgatcaggactaatctatctgaccaatcacatagccccacatgctcgtaacggtctgtccctcaaggaggagcaccgcgcttatgacctactcagagccgctagcgagaattcccaggacgccctccgtgtggtgagtacttccggcgaacaaatgaaagtctacaaatgcgaacattgccgcgttctatttctggaccatgtgatgtatactatccacatgggctgtcatggcttccgtgacccctttgagtgcaatatgtgcggctatcactcacaggaccgctacgaattctcctctcacattaccagaggggaacatagattccatatgtcttag

SEQ ID NO: 120413 - DNA, 1299 bp, synthetic construct
  misc_feature 1..1299: note = Description of Artificial Sequence: Synthetic coding sequence
  source 1..1299: mol_type = other DNA
atggacgccgacgaaggacaagacatgtcccaggtatctggtaaggagagccctccagtgagcgacactccggatgagggggatgaaccaatgcctatacctgaggacctttccaccacgtcaggaggacaacagtcgtctaagagcgatcgagtggttggcgaacgcccctttcagtgtaaccagtgtggggcctccttcacacagaagggtaacctgctgagacacattaaactccactccggggaaaagccattcaaatgccatctgtgtaattatgcctgtagacgtcgagacgctctcaccgggcacctgcggacgcattccgtgggcaagcctcacaaatgtggatattgcggacgaagctataaacagcgctcttctctggaagagcacaaagaacgctgtcacaactaccttgagtctatgggtctcccagggacgctgtacccggttatcaaggaagaaaccaaccattcagagatggcggaagacctgtgtaaaatcggatccgagcgaagtcttgtgcttgaccgcctggccagcaacgttgctaagaggaagtcgtccatgccccaaaaattcctcggcgataaggggctgtccgacaccccatatgactctagcgcatcttatgagaaggagaacgagatgatgaaatcacacgtgatggatcaggcaatcaacaatgcgatcaactacttgggagcggaatctctgagacccctagtccagacacctcctgggggaagcgaggtagttcccgtcatttcccctatgtaccaacttcataagccacttgctgaggggacaccccgctccaaccactctgcacaggacagcgccgtggagaacctactacttctgtcaaaggctaagctggtgccctccgagcgggaggctagcccaagtaactcatgtcaggatagcacggataccgagtcaaacaatgaagagcagagatccggcctcatctatctgacgaaccacatagcaccacacgctaggaacggactctccctaaaagaggaacaccgagcttacgatctcctccgagccgcttccgaaaatagccaagatgctctaagggtagtgagcacatctggggaacaaatgaaagtgtataagtgcgaacactgccgagttctgtttcttgaccatgttatgtatactattcacatgggctgtcacggattccgggaccctttcgaatgtaacatgtgcgggtatcactcacaggaccggtacgaattcagttctcacattactaggggcgaacacagattccatatgtcatag

SEQ ID NO: 120414 - DNA, 1434 bp, synthetic construct
  misc_feature 1..1434: note = Description of Artificial Sequence: Synthetic coding sequence
  source 1..1434: mol_type = other DNA
atggacgccgatgagggccaggatatgagtcaagtgagcggtaaagagtcccctcccgttagcgacaccccggatgagggagatgagcctatgccaattccggaagacttgtccactacttccgggggacaacagagttcaaagtccgatcgggtagtcgcctccaacgtgaaagtggaaacccagagcgatgaggaaaacggacgtgcctgcgagatgaatggagaggagtgcgctgaagatctccgaatgttggacgcatcgggagagaaaatgaatggtagccatcgggaccagggtagctctgccctcagcggagtaggtgggataaggctccctaacgggaagttgaagtgcgatatatgtggtattatttgtatcgggcctaacgttcttatggttcataaaagatctcatacaggagaaaggccttttcagtgcaaccaatgcggagcgagttttactcagaaggggaatctcctgcgtcacataaagctgcattccggggagaaaccatttaaatgtcatctgtgtaattatgcatgcagaagaagagacgccctgaccggacacctgagaacccattcagtaatcaaggaggaaaccaaccacagcgaaatggcagaagacttatgtaaaattggcagcgagcgaagcctagttcttgacagactcgcaagcaatgtcgctaagagaaaatctagcatgcctcagaagttcctgggagacaagggcctgagcgatactccctacgatagctccgcctcctacgagaaagaaaacgagatgatgaagagccacgtcatggatcaggccatcaataacgccataaactatttaggcgcagagagcctgagacctctcgtgcaaaccccccctggcgggagtgaggtcgttccagtcattagccctatgtatcagctccataagccactggcagaggggacaccacgttctaaccatagcgctcaggatagcgccgtggaaaatcttcttttactgtcaaaggcaaagcttgtccctagcgagcgggaggcgtcccccagtaattcctgccaggacagcactgacaccgagagcaacaatgaagaacagcgctctgggctgatctatcttactaaccatattgccccccatgcccggaatggtcttagcctcaaagaggaacaccgggcttacgatctcctgcgtgctgcatctgaaaatagtcaggacgcgctgcgggtggtgtcaaccagcggagagcagatgaaagtctacaagtgtgaacattgccgggtcttgtttctcgaccacgttatgtacactattcacatgggatgccacggatttcgtgacccttttgaatgcaatatgtgcgggtaccacagtcaggacaggtacgagttctcctctcacatcactcggggagagcatagattccatatgagctag

SEQ ID NO: 120415 - DNA, 681 bp, synthetic construct
  misc_feature 1..681: note = Description of Artificial Sequence: Synthetic coding sequence
  source 1..681: mol_type = other DNA
atggacgccgatgagggccaagacatgtcccaggtgtccgggaaggaaagcccacctgtctccgacacaccagacgagggtgatgaacctatgcctatccccgaagacctaagtactaccagtggagggcagcagagttccaaatcggatcgtgttgtggcgagtaatgtaaaagtcgaaacccagagtgacgaagagaatgggcgggcctgcgaaatgaatggcgaggagtgtgctgaagacctgcggatgctcgacgctagtggtgagaaaatgaatggatcccatcgcgatcagggcagtagtgccctaagcggggtcggagggatccgactaccaaatggcaagctgaagtgcgatatttgtggtatcatctgtatcgggccaaacgtactgatggtccacaagagatcccataccggcgaacggcctttccagtgtaatcagtgcggcgccagcttcacccagaaagggaatctgttgagacacatcaagcttcattctggcgagaaaccattcaaatgtcatctttgtaactatgcctgcaggaggcgagatgcgctaacggggcacctgcgaactcactccgtgattaaggaagaaactaaccattctgaaatggccgaggatctgtgtaagatcggtagtgagatctctcgagcaggccagacctcaaaatag

SEQ ID NO: 120416 - DNA, 1758 bp, synthetic construct
  misc_feature 1..1758: note = Description of Artificial Sequence: Synthetic coding sequence
  source 1..1758: mol_type = other DNA
atgcacactccgcccgcgctcccgagaaggtttcagggaggcggcagagtccgtacccccggttctcaccggcaagggaaggacaacctggagcgagacccaagtggaggctgtgtccctgacttcctcccacaggcccaggactcgaaccatttcatcatggaaagcttgttttgtgagagttccggagatagttcccttgaaaaagagttccttggagccccggtggggccatccgtgtccacgccaaactcacagcattcatcgccttctaggagtctgtcagcaaatagcatcaaagtggagatgtactccgatgaagaaagttctcggttattaggccccgatgagaggttgctcgagaaagacgattctgtgatcgtggaagatagcttatccgaacccctgggttattgtgatggttcaggtcccgagcctcactcccccggcggcattcgactgcccaatggcaaacttaagtgcgacgtttgcggaatggtttgtataggtcccaacgtactcatggttcataagagatctcataccggggagaggccttttcactgcaatcagtgtggagccagcttcacacagaagggaaatctccttaggcatataaagttgcactcaggagagaagcctttcaaatgtcctttttgcaattatgcatgtcggagaagggacgccctcacgggacacctcagaacacacagtgtttcatctcccacggtggggaaaccctataagtgtaactattgtggcagaagttacaaacaacaatcgactctggaggaacacaaagaaaggtgtcacaattacctgcagtcgctgtccacagaggctcaggcgctcgcaggtcagcctggagatgaaatccgagacctggagatggtgcccgattccatgctccactcatcctcagagcggcctacctttatcgaccggctggcgaattctctgaccaagagaaaacgctctactccgcagaagttcgtgggggagaaacaaatgcggttctccttaagtgatctgccttatgacgttaatagtgggggctatgaaaaggacgtggaattggtggcgcatcatagcctagaacccggatttgggagtagtctggccttcgtgggcgcagagcaccttcgcccgttgcggctgccacctaccaattgcatttccgagctcacaccagtaatttcctccgtgtacacacagatgcagcccctgcccggcaggttggagttgcctggctccagggaagccggagaaggaccagaggatttggcagacggcggaccgctcctttacaggccaagaggtcccttaacagatccaggggcaagcccatcaaatggctgccaagactctacagacaccgaatcaaaccatgaggacagggtagccggggttgtgagcctgccccaaggaccgcctccacagcctccaccgacaatcgtcgttggacggcatagccccgcttacgcaaaagaggatccaaagccacaggaaggtttgctccgcgggactcctgggcctagcaaagaggtgttgcgggtggtgggcgagagcggcgaaccggttaaggcattcaaatgtgaacactgccgaatcctctttctggaccatgtcatgtttacgatccacatgggctgccacggcttccgtgacccctttgaatgtaacatttgtggctaccatagccaggatagatatgagttctctagccacattgtccggggcgagcataaagtgggctag

SEQ ID NO: 120417 - DNA, 1452 bp, synthetic construct
  misc_feature 1..1452: note = Description of Artificial Sequence: Synthetic coding sequence
  source 1..1452: mol_type = other DNA
atgtactcggatgaggaatcatctcggctattaggacctgacgaacggctacttgagaaagatgattctgtaatcgtcgaagactctctttccgaaccgctcggatattgtgatggttccggcccggaacctcactcccctgggggcattaggctgcccaatggcaagctaaagtgtgacgtatgcggaatggtttgcatcggacctaatgtgcttatggttcacaagaggtcccatacaggagagaggcccttccactgtaaccagtgcggggctagtttcacccagaaaggaaatttactgcgccatattaagctgcatagcggagaaaagccttttaaatgtcctttctgtaattatgcatgtcgccgaagagatgccctgaccggacacctcagaacccacagcgtgtcatctccaaccgtcgggaaaccatataagtgtaactactgtggccggagctacaaacagcagtcgaccctggaggagcacaaggagcggtgtcataattacctacagtccctctcaaccgaggcacaggccctcgccggacagcccggggacgaaattagggatctagagatggtacccgacagcatgctccactcatcttcggagaggcctacattcattgatcgactagctaattccctgactaaacgcaagcgaagtaccccccaaaagttcgtaggggagaaacagatgagattctcgctctctgacctcccttacgatgttaactcaggaggctacgagaaggatgtggagctggttgctcaccattctttggaacctggattcggttcctccctggcctttgtcggagcggagcacctgagaccactcaggcttccccccaccaattgcataagtgaactaacccctgtgatctcgtcagtctatacccaaatgcaacccctgccaggtcgcctggaactgcccggctctcgtgaggccggagaaggcccggaggaccttgcagatgggggacctttactctatcggccacgaggcccactcaccgaccccggcgcaagcccgagcaatggctgccaggatagtaccgatactgagagtaaccatgaggaccgcgtggccggcgtcgtgagcttgcctcaaggacctcctccacaaccccccccaacaatcgtggtgggtcgtcactcgccggcatacgccaaagaggaccccaaacctcaagaagggctgcttcgtggaacaccaggtccatcgaaggaggtgctcagagttgtgggggagtccggtgaacccgtgaaagcatttaagtgcgagcattgccgcatactgttcctggatcatgtgatgttcacaattcatatggggtgccatggttttagggatccattcgagtgtaacatttgcggatatcacagtcaagaccggtacgagttcagctcgcatatcgtgagaggagaacacaaagtggggtag

SEQ ID NO: 120418 - DNA, 1758 bp, synthetic construct
  misc_feature 1..1758: note = Description of Artificial Sequence: Synthetic coding sequence
  source 1..1758: mol_type = other DNA
atgcacacaccccccgcccttcctaggagattccagggagggggacgcgttagaacacctgggtcccatcggcagggcaaggataacctagagcgcgacccaagcggaggttgtgtgccagatttcctgccccaggctcaggatagcaaccacttcatcatggaaagtctgttttgcgagtcatccggcgacagctcattagagaaggaatttctgggggcccccgtaggcccaagcgttagcacacctaacagccagcattcctctccaagcagaagtttgagcgcaaacagcattaaggtcgaaatgtactctgacgaagaatcctcccggcttctcgggcccgacgaaaggctactcgagaaggatgattctgtcatagtggaagattctctttctgaacctcttgggtattgtgatgggagcggacctgagccccacagccctggcggtatccgactcccgaacgggaaactgaagtgcgacgtgtgtggcatggtatgcattggccccaatgtgcttatggtacacaaaagatcgcacaccggcgagcgcccctttcattgcaatcaatgtggtgcatcatttacccagaagggaaacctcttgaggcacatcaagctccactcaggggaaaagccattcaagtgtcccttttgtaattacgcatgtcggcgtagggacgctttaaccggccacttgaggacccactcagtgtcatcccccactgtgggtaaaccatacaagtgtaattattgcgggcggagctacaagcagcagtcaacactcgaggaacacaaggagcgttgtcacaactacctgcagtcacttagcacggaagcccaagctctggctgggcagccgggggacgagattcgcgatctggagatggtgcccgatagcatgctacactcaagctctgagagacccacatttatcgacaggctcgccaactccctaacaaagagaaagcggagcactccgcaaaagttcgtcggggaaaaacagatgcggttctccctgtccgatttgccgtacgatgtgaatagcggcgggtacgagaaagatgtggaactcgttgctcatcactctttggagccaggtttcggatcctcattagccttcgtgggggccgagcacctgcgcccacttcggctgccgcccacgaattgtatctctgaactgacacccgtgatctccagcgtgtatacccaaatgcagccgcttccaggacggctggagttacccggctcccgagaggcaggggagggacctgaagaccttgcggatggaggaccactgctgtataggccacgcgggcctctgactgacccgggcgcctcccctagtaacgggtgtcaggattcaaccgacactgaatcaaatcacgaggaccgggtggccggtgtggtgtctctgccccagggtccgcctccgcagccacctccaacgatcgtggtaggcagacactcccccgcctatgcaaaagaagaccctaagccccaagagggattgcttcggggcacccccggcccatccaaagaagtgctgcgagtcgtgggtgagagcggagaacccgtaaaagctttcaagtgtgaacactgccggatactctttctggaccacgtcatgttcactatccacatgggctgtcacggcttccgagacccttttgaatgcaacatttgtggctatcacagtcaggacagatatgagtttagttctcatatcgtgcggggcgaacacaaagtgggctag

SEQ ID NO: 120419 - DNA, 33 bp, synthetic construct
  misc_feature 1..33: note = Description of Artificial Sequence: Synthetic coding sequence
  source 1..33: mol_type = other DNA
atgcacacccctccagccctgccgcggaggtag

SEQ ID NO: 120420 - DNA, 1863 bp, synthetic construct
  misc_feature 1..1863: note = Description of Artificial Sequence: Synthetic coding sequence
  source 1..1863: mol_type = other DNA
atgaacaacttcatcctcctggaagaacagctcattaagaaatcacagcaaaagagaaggactagcccatccaacttcaaggtccggttcttcgtactgacaaaagcaagcctggcctatttcgaagatcgacacgggaaaaaaagaactctgaaggggtccattgagctctcgcgcatcaagtgcgtggaaatcgtaaagtccgatatctccattccgtgtcattacaaatacccgtttcaggttgtgcacgacaactacctactctatgtgtttgcccccgatcgtgagagcagacaacggtgggtgcttgccctcaaggaagaaactcgcaataacaattctctagtgcccaagtaccacccaaatttctggatggacggcaagtggcggtgttgttctcaattagagaaactggcaaccggttgcgcccagtacgatcccactaaaaacgcaagcaaaaagccactgcctccaaccccagaagataacaggagaccactttgggaaccagaagaaactgtggtcatcgccctgtatgattaccagactaacgatccgcaggagttggccctgcggcgcaacgaagagtattgtctcctcgactcctctgagatccactggtggcgggtgcaggatcgtaatggccatgagggatacgtgccatcctcctacctggtggaaaagtcacccaacaacctcgagacttatgaatggtataacaagtccatttcacgtgataaagccgagaaactccttctggacaccggaaaggagggcgcgttcatggtgagggacagtagaaccgccggaacctatacagtttctgtgttcactaaagccgtcgtgtcagaaaataatccctgcatcaagcactaccatatcaaagagaccaacgataacccaaagcgctactacgtggccgagaagtatgtgttcgattctatacctctcttgattaattatcatcaacacaacggtggagggctggttaccaggctgcgctaccccgtatgcttcggaagacagaaagcccccgtgacagcgggtcttcgctacgggaagtgggtgatcgatccatctgagctgacttttgtccaggaaattggatctggccagtttgggctggtacatctaggttactggctgaacaaggataaggtggcgataaaaacaattagggaaggagctatgagcgaggaagactttatagaagaggccgaggtaatgatgaaactgagtcacccaaaactcgtacaactgtatggagtatgtctggaacaagcgcctatctgtttggtttttgagttcatggagcatgggtgtctgagtgactatctgcgaacccagagggggcttttcgcggccgaaacattactcggcatgtgcctggacgtgtgtgaagggatggcttatctggaggaagcatgtgtgatccacagggatctggcagctcggaattgtctggtgggcgaaaaccaggtcatcaaggtttccgacttcggaatgacacggtttgttttggatgatcagtatacgagctccacaggaaccaaattccccgtcaagtgggcctcccccgaggtgttctctttctctagatattcttccaaatccgatgtctggagcttcggagtcctaatgtgggaggtgttcagcgagggaaaaatcccctacgagaaccgctccaatagcgaagtggttgaggacatttctacagggtttcggttatataaaccacgtctggcgtccacacatgtgtatcagatcatgaatcattgttggaaagagaggccagaggacaggcccgccttcagtcgactactccggcagttggcagaaatcgccgaatccggcctctag

SEQ ID NO: 120421 - DNA, 1899 bp, synthetic construct
  misc_feature 1..1899: note = Description of Artificial Sequence: Synthetic coding sequence
  source 1..1899: mol_type = other DNA
atggagacaccagccgccgctgcccccgccgggtctttgtttcctagctttctgctgctcgcctgcggcacactggtggcagccttgctgggcgcagctcatagattaggactgttttatcagcttttacataaagtcgacaaggcgtctgtccggcacggtggggagaatgtggccgccgtgctgagggcccacggggtacgcttcatcttcacactggtgggcgggcacatctccccgctgttggttgcttgcgagaaacttggaattagggttgtggacacccgccacgaggtaaccgctgttttcgccgctgatgccatggctcgactgtccggcacagtgggcgttgctgcagtgaccgctggacccggcctgacgaatacagtcacggccgtgaagaatgctcagatggcccaaagcccgattttattattagggggtgccgcgagcaccctgctgcagaaccgtggggccttacaggccgtagatcagctaagccttttccgaccactgtgcaagttctgtgtgtccgtccggcgagtgcgggatattgtacctactctgagagctgccatggccgctgcacagtcaggtacaccagggccagtcttcgttgagctcccagtggacgtgctgtatccttatttcatggtccaaaaagagatggtacctgcaaagccaccgaaaggcctggtgggtagggtggtgtcctggtacctggagaattacctcgccaatttatttgcaggtgcttgggaaccccagcccgagggacccctgccactcgatataccgcaggcaagccctcagcaggtacaaagatgtgtagagatcctttccagagccaaaaggcccctcatggttctgggctcccaggctctcttaacccccacatctgcggataagttgagagccgccgttgaaaccctgggcgtgccatgcttcctgggaggcatggccagaggcctactggggagaaaccaccctctgcacattcgcgaaaatagatccgcggctctgaagaaagcggatgtgatcgtgcttgccggcactgtgtgcgattttcgcttatcctacggtagggttttgtcccacagctccaaaattatcatcgtgaaccgtaatagagaagagatgcttctgaactccgatattttctggaaaccgcaggaagctgtacagggagacgttggctcatttgtcctaaagctcgtggaggggctccagggtcaaacttgggctccggattgggtagaagagctccgcgaagcagatcggcagaaagagcaaacatttagagagaaggccgcgatgcctgtagcgcagcatctcaacccagtgcaggtcctgcagctagtggaggagaccctgcccgataacagtattctggtcgtcgacgggggtgatttcgtgggtaccgcagcccatttggtgcaacctaggggaccactgcgttggttagacccgggcgctttcggaactttgggggtcggggccggtttcgctctgggggcgaagctatgtcgccccgatgctgaagtgtggtgtctctttggagatggggccttcgggtactcacttatcgagttcgacaccttcgtgcggcacaaaatccccgtgatggcattggtgggaaacgacgcaggctggacacagatctctcgggaacaagttccctctctgggttctaatgttgcctgcggcttggcctataccgattatcataaggcagccatggggttgggcgctaggggccttctgctgtccagggaaaatgaggaccaggttgtgaaggtgctacacgatgcccaacagcagtgtagggatgggcatcccgtcgttgttaatattctaatcgggaggactgacttcagagatggttctatcgctgtttag

SEQ ID NO: 120422 - DNA, 678 bp, synthetic construct
  misc_feature 1..678: note = Description of Artificial Sequence: Synthetic coding sequence
  source 1..678: mol_type = other DNA
atggagaccccagccgccgccgctccagcgggctccctttttccgtcctttctcctccttgcatgtggaacccttgtggccgctcttctgggggccgcacaccgactgggactgttttatcaacttctgcataaagtggataaggcaagcgttcgccacggaggggaaaacgtagcagcagtcctgcgcgcacacggggtgcgattcatcttcactctggtgggggggcatatcagtcctttgctcgtcgcttgtgagaaacttgggattagagtcgtcgatacccgtcatgaggtaaccgccgtgttcgccgcagacgccatggcacgactgtccggtaccgtgggagtggccgcagtaaccgctggccccgggctgacgaacacagtgactgcggtgaagaatgcacagatggcccagagccccatacttctgctgggtggtgctgccagcacccttctccaaaatcgcggtgcccttcaggccgtggaccagttaagccttttccgccctcccccgggctgtggccagcacccacattgggaggacggcctcccccgttggcttcattgctgtatagggccatgcgggtcaggacgtctggctgcgtttctccccctcgattgcgtgcagctcgtgtggagccttatcattgcttgtcctggcccaatcccttag

SEQ ID NO: 120423 - DNA, 789 bp, synthetic construct
  misc_feature 1..789: note = Description of Artificial Sequence: Synthetic coding sequence
  source 1..789: mol_type = other DNA
atggagactccggctgcagccgccccagcaggaagtctctttcccagctttctgttgttggcgtgcggcacattagttgcagcactgctgggagctgcccacagattagggttgttttaccagctgctgcataaggtagacaaggcttcagtgcgccatggaggggaaaacgtggccgcagtgctgagggcgcacggggtgcgttttatttttacactcgttggcggccacatctcacccctcctggtagcatgtgagaaactcggaatacgcgtggtggatacacgtcacgaggtcacggccgtgttcgctgccgacgccatggcccgcctgtctggtacagttggcgtcgccgccgtgactgccgggccagggcttacgaacacagttacggcagtcaagaacgcacagatggctcagagtcccatactcttgcttggaggcgccgcctctaccctccttcaaaacaggggcgctctgcaagccgtggaccaactgagcctcttcaggcctctgtgtaaattttgtgtttccgttcgtcgcgtgcgagatatcgtacccacactccgtgccgctatggcagctgcccagtctggtaccccgggcccagtgtttgtagagcttccagtggatgtgctctatccatacttcatggtccagaaggagatggtacccgctaaaccacccaaagggctggtcggccgcgtggtgtcttggtaccttgagaactatcttgctaatcttttcgctggcgcatgggaacctcaaccggaaggacccctcccttag

SEQ ID NO: 120424 - DNA, 501 bp, synthetic construct
  misc_feature 1..501: note = Description of Artificial Sequence: Synthetic coding sequence
  source 1..501: mol_type = other DNA
atggagacaccagcagccgctgcacccgccggaagcctgtttccgagctttctgcttttggcttgcggtaccctcgtcgctgccttattgggggcagcccaccgattaggcttgttctaccaactgctccacaaagtcgacaaggcttctgtccggcatggaggagagaacgtggctgctgtcttacgggcacacggcgtgaggtttatcttcaccttagtggggggtcacatatctcctctcctggtggcgtgcgagaagctcgggattcgcgtggtggacactcggcatgaggtgacagcagtgtttgctgcagacgcaatggctcgactgagtggaacagtgggagtcgcagccgtgacggccgggcccggattgacaaacaccgtgactgctgtgaaaaacgcccaaatggctcagagcccaattctgctgctcggcggggcagcctcaacgcttctgcagaatcgaggcgctctacaggctgtcgatcagttatag

SEQ ID NO: 120425 - DNA, 621 bp, synthetic construct
  misc_feature 1..621: note = Description of Artificial Sequence: Synthetic coding sequence
  source 1..621: mol_type = other DNA
atggccgcaactaggtgcctacgttggggactctcccgtgctggagtctggcttcttcctccacccgctcggtgcccgcgcagggcgctccacaagcagaaggacgggacagaatttaagagcatctacagcctggataaactctaccccgagagtcaagggagcgacacagcctggcgcgttcccaacggcgccaagcaggccgacagtgacatacccctcgataggctgacaatctcatactgccggtcaagcggacctggcgggcagaacgtgaataaggttaattcgaaggcagaagtgaggttccacttagccaccgccgagtggatcgctgagcctgttagacagaagatcgccatcacacacaagaacaagatcaaccggttgggagagctgatcctcacgtccgaaagctcaaggtatcaatttaggaatctcgccgactgtctccagaaaattagggatatgatcactgaagccagtcagactccaaaggaacctaccaaggaggacgtgaagttacatcggatccgcatcgagaacatgaatagggagaggctgcggcagaaacgtattcattctgcagttaagacctctcggcgggtcgacatggattag

SEQ ID NO: 120426 - DNA, 471 bp, synthetic construct
  misc_feature 1..471: note = Description of Artificial Sequence: Synthetic coding sequence
  source 1..471: mol_type = other DNA
atgtgccactcgaggtcttgccacccaacaatgactattctgcaggcccctaccccagccccgagtacaattccagggccaagaagaggcagcggcccggagatcttcacctttgaccctctacctgagcccgccgccgcgcctgccggcaggccttcggcttctcgagggcatcgcaaacgctcccggcgggtgctgtaccctagagtggtcaggcggcagctgcctgtagaggaacccaatcctgcgaaacgtttactgttccttctgctcacaatcgtgttttgtcagatcctgatggccgaggaaggggttcccgcccctttgcccccagaagacgcgccaaacgcagcctccctggccccgacacccgtgtcagcagtactcgagccattcaatctcacaagtgagcctagcgactatgccctggacctctccacgtttctgcaacaacatcccgcagcattctag

SEQ ID NO: 120427 - DNA, 417 bp, synthetic construct
  misc_feature 1..417: note = Description of Artificial Sequence: Synthetic coding sequence
  source 1..417: mol_type = other DNA
atgtgtcatagtaggagttgccacccaacgatgaccatcctgcaagcaccaacgcctgcgcctagcactatccccggccctaggcggggctcaggacccgagatatttacgttcgacccactccccgagccagctgccgctcctgccgggcggccttccgccagtagggggcacagaaagaggagtcgccgcgtcctctacccacgagttgtgagtatagccgaggtggggatccgaggagtgcgttgcccaggggtgactggggagagacctgattccagaggcctggacctaacttgtctgctcttttgtctgccattggggcccgctcccgcagctagtcggggtaccgagccgtcacagaaagcctctctgtctgccgcccaccacagactccttcctgaccctgacgggtag

SEQ ID NO: 120428 - DNA, 579 bp, synthetic construct
  misc_feature 1..579: note = Description of Artificial Sequence: Synthetic coding sequence
  source 1..579: mol_type = other DNA
atgtgccacagtcgtagttgtcacccaacaatgacaatcttgcaggcacccacccccgccccgtcaacaattccaggaccacgaagaggcagtggccctgagatattcacctttgaccccctccctgagcctgccgctgctcccgctggtcgtcccagtgcgtctcgcggacacaggaaacggtctaggcgagtgctaccttctagcggcgaatacaggcgttcgggccacagccggggagccctcccctggagtcactggggtacgacacgtctacagggtctggacctgacttgtttattattttgcctgcccctggtgcgtcgacagttaccagtcgaagagcctaaccccgcaaagaggctgctgttcctcctgctcacaatcgtattctgccagatcctcatggcagaggagggagtgccggctcctttacctccagaggacgctccaaatgcggcctcactggccccaacaccagtgtcagccgtgctggaaccatttaatttgacttcagaaccaagcgattacgccctggatttgtcaacatttctgcagcagcatcctgctgcgttttag

SEQ ID NO: 120429 - DNA, 471 bp, synthetic construct
  misc_feature 1..471: note = Description of Artificial Sequence: Synthetic coding sequence
  source 1..471: mol_type = other DNA
atgtgccactcgagatcctgtcatccaacaatgacaattctgcaggctccaacccccgctccaagtaccattcctgggccgcggagaggcagtggacccgagatctttactttcgatcctcttcccgagccggccgcggctcccgccgggagaccatctgcctcccgggggcacaggaagagatctcgcagagtgttgtacccacgcgttgtccgccggcaactgccagtggaagagcccaatcctgccaaacgactcctctttcttctcttaaccatcgtcttttgccagatacttatggccgaagaaggggtccctgcccccctgccacccgaggacgctcccaacgctgcgagcctagctcctaccccggtgagccccgtattggaacctttcaatcttacatccgagccatctgattacgcgctagatttgtccaccttcctgcagcaacacccggctgcattttag

SEQ ID NO: 120430 - DNA, 417 bp, synthetic construct
  misc_feature 1..417: note = Description of Artificial Sequence: Synthetic coding sequence
  source 1..417: mol_type = other DNA
atgtgccacagcaggtcttgtcaccccacaatgacaatcctgcaggccccaacccctgcaccatcaactatcccaggtccccgacggggttcggggcctgagattttcacattcgatccgttgccggagcccgccgccgctccagccggccgcccctcagcctcacgcggacacaggaaaaggtcacgacgtgtgctctatccccgggtcgttagcatagccgaggtgggaatacggggggtgcgttgccctggggtcacaggagagcgaccagactcccgcgggcttgaccttacgtgtctgctgttttgtctcccactgggccccgctcctgcagctagccgaggaacagagcccagccagaaagcttccctctcagcagcacaccatcgcctgctacctgacccagacgggtag

SEQ ID NO: 120431 - DNA, 417 bp, synthetic construct
  misc_feature 1..417: note = Description of Artificial Sequence: Synthetic coding sequence
  source 1..417: mol_type = other DNA
atgtgtcatagtcgcagctgccaccctaccatgacaattctccaggctcccacccctgcacctagcacaataccaggccctagacgcggctctgggcctgaaattttcacatttgatcctctgccagagccagcagcggctcccgctggaagaccctccgcaagcagaggacacaggaagcggtccaggcgtgtgctttaccctcgcgtcgtttccatagctgaagtggggattagaggggtcaggtgccctggcgtcacgggcgaacgccccgactctcggggactggacctgacatgcttgcttttttgccttcctctgggacctgctcccgccgcttctaggggtaccgagccgtcccagaaagcctctttgagcgcagcacatcaccgcctcctgcctgacccggacggatag

SEQ ID NO: 120432 - DNA, 471 bp, synthetic construct
  misc_feature 1..471: note = Description of Artificial Sequence: Synthetic coding sequence
  source 1..471: mol_type = other DNA
atgtgtcactctagatcttgccaccccaccatgactatcctgcaggccccaacacctgctcccagcacaatcccagggccacgccgcggctctggccccgagatcttcacttttgaccccctcccggaacctgccgctgctcctgcaggccggcccagtgcatctagagggcatcggaaacggagcaggagggtgctctatcctagggttgtgcgtaggcaactgccagtggaggaacctaaccccgccaaacgcctgctctttctattgctgacaattgttttttgccagatcctgatggccgaggaaggagtccccgcgcctctgccgcctgaggatgcccccaacgctgcttccctggcaccaaccccagtgtcacccgtgctggaacctttcaatctcacctctgagccttctgattacgccctggatctctccacgttcctgcagcaacaccccgcagctttttag

SEQ ID NO: 120433 - DNA, 417 bp, synthetic construct
  misc_feature 1..417: note = Description of Artificial Sequence: Synthetic coding sequence
  source 1..417: mol_type = other DNA
atgtgtcatagtcgcagttgtcacccgaccatgacgatcctgcaggctcctacacctgcaccctctacaatccctggtcctcggagaggtagcggccccgagatcttcactttcgacccccttcctgagcccgctgctgcccccgctggacgtccttctgcgagtagagggcaccgcaaacgcagtaggcgcgtgctttatcctagggtagtgtccatcgcagaagtaggcattagaggcgtcaggtgtcccggcgtgactggggagcggcccgattcgagaggcctggatctgacctgcttgctgttttgcctgccgctgggccctgctcccgcagcaagcagaggtacagagccctcacagaaggcctctctgtcagctgctcatcaccgcctgttgcctgatcccgacggctag

SEQ ID NO: 120434 - DNA, 471 bp, synthetic construct
  misc_feature 1..471: note = Description of Artificial Sequence: Synthetic coding sequence
  source 1..471: mol_type = other DNA
atgtgccactctcgcagctgccatcccacaatgacaatcttgcaggctcctacaccggcacccagcacaattcctggccctagaagaggctccggccccgaaatctttactttcgacccactccccgagcctgcagccgctcctgccggcaggccctcagcttctagaggacacagaaagcgctcccggagagttttgtaccccagggtggtccggcgccagctgccagtagaagagcctaatcccgctaagcgcctcctgtttctgctccttaccatcgttttttgtcaaattctgatggcagaggagggggtcccggcgccactacccccggaggatgccccaaacgccgcctccctagcaccgacaccagtgagccctgtcctggaacctttcaatcttaccagcgagcccagcgattatgccctggatctgtcgacatttttgcaacagcacccggcagcgttctag

SEQ ID NO: 120435 - DNA, 417 bp, synthetic construct
  misc_feature 1..417: note = Description of Artificial Sequence: Synthetic coding sequence
  source 1..417: mol_type = other DNA
atgtgccatagccgctcttgccatcccacaatgactattctacaggctccaacacccgccccttccacaatccccggtcctagaagaggaagcggccctgagatcttcacttttgacccacttcctgagcctgctgccgctccagcgggtcggccctctgcttcacgcggccataggaaacgttcccgcagagtgctgtaccccagagtggtgtcgatcgcagaagtggggatccgaggtgtgagatgcccgggagttaccggggaacgcccagattccagaggtctggacctgacttgtctgctgttctgtttgcctttgggtccagcccccgctgcaagtagaggaactgagccaagccagaaggcatctctgtcagccgcacaccatcgtctgcttccggatccggatggctag

SEQ ID NO: 120436 - DNA, 471 bp, synthetic construct
  misc_feature 1..471: note = Description of Artificial Sequence: Synthetic coding sequence
  source 1..471: mol_type = other DNA
atgtgccatagcagaagctgtcatccgacgatgacaattctgcaggctcctacaccagccccctccaccatccccgggcctaggcggggctccggacctgaaatcttcactttcgacccgctgccagagcctgcagctgctcctgccggcagaccttccgcctcacggggccacagaaagcgaagccgcagggttctttatccccgggtggttaggaggcagctcccagtggaggagccaaatccagctaagagactgctctttcttctgctgaccatcgttttttgccaaatactgatggccgaggagggagttccagcaccactcccacctgaagacgccccaaacgccgcctctctggcacctacaccggtgagcccggtattagaaccatttaatctcacctcggagcctagtgattatgcgctggatctgagcacttttctccagcagcaccctgcagccttttag

SEQ ID NO: 120437 - DNA, 417 bp, synthetic construct
  misc_feature 1..417: note = Description of Artificial Sequence: Synthetic coding sequence
  source 1..417: mol_type = other DNA
atgtgtcacagtaggagttgccaccccaccatgaccattctgcaggccccgaccccagcaccaagcacaatcccaggtccccgccgaggatctggaccagaaatattcactttcgatccattaccagagccagctgcagctccagccggtcgccccagcgctagtcggggccatcggaaacgaagtcgccgcgtcctgtatccacgggtggtctcgatcgcagaagtaggaatccgcggggtcagatgtccaggggtgacgggcgagcgccctgacagcagagggttggacctgacatgcctgcttttttgtctccccctcggcccagccccggctgcaagtcgcgggacagagcctagtcaaaaagctagcctatcagcagcacatcacagactcctgcctgaccccgacgggtag

SEQ ID NO: 120438 - DNA, 471 bp, synthetic construct
  misc_feature 1..471: note = Description of Artificial Sequence: Synthetic coding sequence
  source 1..471: mol_type = other DNA
atgtgtcacagccgcagttgtcatcctaccatgaccattcttcaggcacccacaccagcccccagcacaatccccgggcctcggcgcggctccgggcctgagattttcacctttgaccctctgcctgaacccgcggccgcacccgcaggccggccttctgcaagccgcggacaccgcaagcggtccaggcgtgttttataccccagggtggtgcgcagacagctgcctgtagaggagcctaaccccgccaagcgccttctttttctgttgctgaccatcgttttctgccagatcctcatggcagaggaaggcgtgcccgccccactgccccctgaagacgctcccaacgcagcgagcctggccccaacccctgtaagccccgtcctggagccattcaatctgacctccgagccatctgactatgccctcgatctgtccaccttccttcagcagcatccagccgccttttag

SEQ ID NO: 120439 - DNA, 249 bp, synthetic construct
  misc_feature 1..249: note = Description of Artificial Sequence: Synthetic coding sequence
  source 1..249: mol_type = other DNA
atggcattcacgctctatagcctcctacaggcagccctgctgtgcgtcaacgccatagccgtcctgcatgaggagcgcttcctcaagaatatcggctggggcactgatcaaggcataggcggattcggcgaggagcccggaattaagagtcagcttatgaatctgatccgatccgtgcgcactgtgatgcgggtccctctgatcatagttaattctatcgcaattgtcctgctcttgttgtttggctag

SEQ ID NO: 120440 - DNA, 984 bp, synthetic construct
  misc_feature 1..984: note = Description of Artificial Sequence: Synthetic coding sequence
  source 1..984: mol_type = other DNA
atggaattcaagctggaagcccaccgaatcgttagtatcagtttaggaaagatctacaattcgcgcgtccagaggggagggattaagcttcacaaaaacctgctggtatcactggtactaagaagtgccaggcaggtgtacttgtcagacccatgccccggactgtacctggccgggcccgctggcactcctgctccaccaccacagcagcaacctggggaaccagccgcaggacctcctgccggctggggtgaaccgccccccccggccgcaagagccagctggccagagaccgaaccccagcctgagagatccagcgtcagcgatgccccgcgcgtgggggacgaggtgcctgtggctaccgtgaccggcgtgggtgacgtgtttcagggcggagaagcagatgcaaccgaagctgcttggagtagagttgaaggtcccagacaggcggcggctcgagaggccgaggggaccgccggcggatggggtgttttccctgaagtttccagagcggcacggcgaccctgtggctgccctctgggaggcgaggatcctcctggaaccccggcagccacgccaagagctgcgtgctgttgcgcgccccagccagctgaggatgagccgcccgctccccctgctgtgtgccctaggaaacggtgcgcggccggagtgggcgggggacccgctggctgtccagcccccggtagtacacctttaaagaagcctcgacgaaacctcgaacagccaccttccggaggggaggacgatgatgcagaggagatggaaacaggaaatgtggccaacctgatatcgatttttggatctagctttagtggcttgcttcgcaagtcccctggcggaggacgcgaggaggaagagggagaggagtccggtcctgaggccgctgaacctgggcagatctgctgcgataaaccggttctgcgcgacatgaatccgtggagtactgctatagttgctttctag

SEQ ID NO: 120441 - DNA, 420 bp, synthetic construct
  misc_feature 1..420: note = Description of Artificial Sequence: Synthetic coding sequence
  source 1..420: mol_type = other DNA
atggagtttaagctggaagctcatcgtatcgttagcattagcctgggtaaaatctacaattccagggtccaacgcggaggcataaaactgcataaaaacctgttggtcagtttagtattgagaagcgcacggcaagtctatttgagcgatccatgtccaggactctatctggcaggcccagcaggcacccctgccccccccccacagcagcagcccggtgaacccgccgccggcccacctgctggctggggtgagcctcctcccccagcggccagggctagctggcccgaaaccgagccccagcccgaaaggtcttctgtgtccgatgcgccgagggtcggggatgaggtgcccgtggccaccgtcaccggggtgggagacgtctttcaggggagatcggctgctatttccagatgctag

SEQ ID NO: 120442 - DNA, 546 bp, synthetic construct
  misc_feature 1..546: note = Description of Artificial Sequence: Synthetic coding sequence
  source 1..546: mol_type = other DNA
atggaagccatgaacgtcgagaaagcgtcagcagacggaaatctgccagaggtcatctctaacattaaggaaactctgaagattgtttcaaggaccccagttaatattacaatggccggtgacagtgggaatggcatgtcaacctttatttcagctctgcgaaataccggccacgagggcaaggccagtcctcccacagaactggtgaaggcaactcagcgctgtgccagctatttcagtagtcatttttccaatgtggtgttatgggaccttccggggaccgggtcagcgactacaaccttggaaaactatctcatggaaatgcagtttaaccgttatgactttatcatggtagcctcagcccagttcagtatgaaccacgtgatgctcgccaaaactgcagaggacatgggtaagaagttttacatcgtttggaccaaacttgacatggacctttcaactggggctctgcctgaagtgcagctgctccagatccgtgagaacgtcctggagaacttgcagaaagaacgggtctgtgaatattag

SEQ ID NO: 120443 - DNA, 1020 bp, synthetic construct
  misc_feature 1..1020: note = Description of Artificial Sequence: Synthetic coding sequence
  source 1..1020: mol_type = other DNA
atggccgctgaagacgagcttcaactcccacggctgcccgagttgtttgagacaggtcggcagctgctggatgaggtagaggtggctactgagcccgccgggagcagaatcgtgcaggagaaagtcttcaaggggctggatctcctggaaaaggcagccgagatgcttagtcagttagacctattcagccggaatgaagacctggaggagattgccagtaccgatctgaagtacttattggtacccgcatttcaaggggcgttgacaatgaagcaagtcaatccctctaaacgtttagatcacctacagcgcgcgcgagaacactttattaactacttaacacagtgccattgctaccatgtagcagaatttgaactcccaaagactatgaacaatagtgccgaaaatcatacagcaaattcctccatggcctacccctccctggtggctatggcgtctcaaagacaagctaagatccagcgatacaagcagaaaaaggagcttgaacaccgcttgtccgctatgaaatctgcggtagagagcggccaagccgatgatgaacgtgtccgggagtattatctgctgcatttgcagcgctggatcgacatttcactggaagaaatagagtctatagatcaggagattaagatccttcgtgagagagactcgagtcgcgaggcgtctactagcaactcaagcagacaagaaagaccaccagtgaaaccctttattctgacgaggaatatggcccaagcaaaagtgttcggcgccggataccccagcctgccgactatgaccgtcagtgactggtatgagcagcaccgcaagtatggggcactccccgatcaaggaatcgccaaagcagcccccgaggaattccgtaaggctgcccagcaacaggaggagcaagaggaaaaggaagaggaggacgacgagcagactttgcatcgcgcccgcgaatgggatgactggaaggatacccatccacgaggctacgggaaccgccagaatatgggatag

SEQ ID NO: 120444 - DNA, 1020 bp, synthetic construct
  misc_feature 1..1020: note = Description of Artificial Sequence: Synthetic coding sequence
  source 1..1020: mol_type = other DNA
atggccgccgaagatgaactgcagctcccgagactgcccgagctgttcgagactggaaggcaactgctggacgaggtggaggtggcaacagagcctgcaggtagtcggattgtgcaggagaaagtgtttaaggggctggacttgctggaaaaagccgctgagatgctcagccaattagacttattctcaaggaacgaggacttagaagagatcgcctccaccgatcttaaatacctgttggtcccagcattccagggagcgttgaccatgaagcaagttaatccttctaagagattagaccacctccaaagggctagagagcacttcattaactacctgacccagtgccactgctaccatgtggccgaatttgaactgcctaaaactatgaacaactcagccgaaaatcataccgcgaattcatctatggcgtatcctagcttagtggcaatggcctctcagaggcaagcaaagattcagcggtataagcagaaaaaagaacttgaacatagactatccgccatgaaaagcgctgtcgagtccggccaggcagacgacgaaagagtacgggagtattatctactgcacctgcagagatggatagacatatccctggaagaaattgagagtattgaccaagaaattaaaatcttgagggagagggatagttcgagggaagcaagtacgagcaattcaagccgccaggaacgaccacctgttaaaccttttattctcacccgaaacatggcccaggcaaaagtgtttggagcgggttatccgtccttgccgaccatgaccgtgtcggattggtatgaacagcacaggaaatacggagcgctgccagatcaagggatagctaaagccgcacccgaagagttccgcaaggccgcacagcagcaggaggagcaggaagagaaagaggaggaggacgatgagcagaccctccatcgcgcccgtgaatgggacgactggaaagacacacacccacggggttatggaaaccggcagaacatgggctag

SEQ ID NO: 120445 - DNA, 480 bp, synthetic construct
  misc_feature 1..480: note = Description of Artificial Sequence: Synthetic coding sequence
  source 1..480: mol_type = other DNA
atgaagaaccatctcctcttttggggagtgcttgccgtgttcataaaggctgtccatgtgaaagcccaggaggacgagcggatcgtgttagtagataacaagtgtaagtgcgccaggattacttcccggattatccgctcctccgaagatccgaatgaggacattgtcgaacggaacatacggataattgtgcctctgaataatagagagaatataagcgatcccaccagccccctgcggacccgttttgtctatcacttgagtgacctttgtaagaagtgtgatcccacagaggtggaactggacaaccagatcgtcacagcaacacagagtaacatatgcgacgaagatagtgcgaccgaaacatgctatacatatgaccgaaataaatgctacacagccgttgttcccctggtttatgggggcgagactaaaatggtggaaaccgcactgacgccagacgcttgttacccggactag

SEQ ID NO: 120446 - DNA, 213 bp, synthetic construct
  misc_feature 1..213: note = Description of Artificial Sequence: Synthetic coding sequence
  source 1..213: mol_type = other DNA
atgaaaaatcacctcctcttctggggtgtcctggccgtcttcataaaagcggtccatgttaaagcccaggaagatgagagaatcgtactggtcgataataaatgtaagtgtgctagaattaccagccgaatcattcggtccagcgaggaccccaacgaggatatcgtagaaagaaatatccggattatcgtccccttaaataacagggaatag

SEQ ID NO: 120447 - DNA, 480 bp, synthetic construct
  misc_feature 1..480: note = Description of Artificial Sequence: Synthetic coding sequence
  source 1..480: mol_type = other DNA
atgaagaaccacctgctattctggggcgtgcttgccgtgttcatcaaagcagtgcatgtcaaagctcaggaggatgaacggatcgtcctcgtagataataagtgtaaatgtgcccggatcacaagtcgcatcatacgcagcagcgaggatcctaatgaggacattgtggaaagaaacattcgcattattgtgcctctgaacaacagggagaatatttctgatccgacgtctcctctacgcacccggttcgtttatcacttgtctgatctgtgtaagaagtgcgatcctaccgaggttgagctggataaccagatagtgactgctactcagtcaaacatctgcgacgaggactctgccactgagacttgctacacttatgacaggaacaagtgctacacggctgtcgtgccactggtttacgggggtgaaacgaagatggttgaaacagctctgacccccgacgcttgctacccggattag

SEQ ID NO: 120448 - DNA, 528 bp, synthetic construct
  misc_feature 1..528: note = Description of Artificial Sequence: Synthetic coding sequence
  source 1..528: mol_type = other DNA
atgaagaaccatctcctattctggggagtgctggccgtgtttatcaaagccgtccatgtaaagggttcccgggattcttctgcctcagcttcccgcgtggcagggatcacagcacaggaagatgagcggatcgtgctggtggacaacaagtgcaagtgcgccagaataaccagccggatcatccgctctagcgaagaccccaatgaagacatcgtcgagaggaacatcagaattatcgttcccctcaataaccgtgagaacatctccgaccccacttcaccactaaggacaagatttgtctaccatcttagcgacctatgtaagaagtgtgacccaacagaagtcgaactggacaatcagatagtcactgccacacagtccaacatttgtgacgaggattctgcaacggaaacctgctacacttatgacaggaacaagtgttatactgcggtggtgccactggtctatggcggcgagacaaaaatggtcgaaacagcactcacccctgatgcttgctatcctgattag

SEQ ID NO: 120449 - DNA, 642 bp, synthetic construct
  misc_feature 1..642: note = Description of Artificial Sequence: Synthetic coding sequence
  source 1..642: mol_type = other DNA
atgagaccaggaaccggccagggggggctcgaggcccctggcgagccaggcccaaatctgcggcagagatggcctctgctgctcctgggcttagccgtggtaacccacggcctactgcgccctactgccgcaagccagagcagagccctcgggcccggcgcacctggcggaagctcaaggtcctccttgcgatctagatggggaaggtttctcctacagcgcggctcgtggacaggtcctcgttgttggcctcgtgggttccagtcgaagcataattctgtcacccacgttttcggtagcggcacccagctgactgtactgtcccagcctaaggccactccatctgtcactctctttccacctagttcggaagaacttcaagccaacaaagctacattggtctgtctgatgaatgatttctaccccgggattctcactgtcacctggaaggcggacgggactcctattacgcagggtgtggaaatgaccacgccaagcaagcaatccaataacaaatatgcggcctccagctacctctccctgaccccagagcagtggagaagtcgccggtcttatagctgtcaagtcatgcatgaaggcagtacagtggaaaaaactgtggccccagcagaatgtagctag

SEQ ID NO: 120450 - DNA, 255 bp, synthetic construct
  misc_feature 1..255: note = Description of Artificial Sequence: Synthetic coding sequence
  source 1..255: mol_type = other DNA
atgcgaccaggaacggggcagggaggcctggaagcaccgggcgagcctggccctaacctgcggcagaggtggcccttattattgcttggacttgccgtggtaacccatggcctcctgcgccctactgctgcgtctcagtccagggctcttgggcctggcgctccagggggttccagccgttcttcgctgaggtcccgttgggggcgaagcgcacagggccaccctctgggtcatagcgtgccggccgtgctctag

SEQ ID NO: 120451 - DNA, 2982 bp, synthetic construct
  misc_feature 1..2982: note = Description of Artificial Sequence: Synthetic coding sequence
  source 1..2982: mol_type = other DNA
atggcttctgcggccgtggaatcttttgtcaccaaacagctagatctgttagagttggagagggacgccgaggttgaggaacgaaggtcttggcaggagaacatctctttaaaggagctgcaatcccggggcgtctgtctgctcaaactgcaagtgtcctcccagaggaccgggctctacggtcggttgttagttacatttgagccaaggcggtacggaagtgccgcagccctccccagcaactccttcacatctggtgacatcgtaggactttatgacgctgccaatgaagggtcccagctggccaccggtattcttacgcgggtaacccaaaaaagcgtgacagtcgcgtttgacgagagccacgatttccagctatctctcgaccgtgagaattcgtacaggttgcttaagttagcaaacgacgttacctataggcgattaaaaaaagccttaattgcgctgaaaaaatatcactctgggcctgcctcgtccttgatcgaggttctgtttggacgctcagcaccctctcctgcctccgagatacacccactgacttttttcaatacatgcctggatacaagccagaaggaagccgtcctgttcgcactttcacagaaggagctggccataatccacggtccgcctggaactgggaaaacaaccacagtggtggaaattatcctccaagccgtgaagcaagggctgaaggtcctgtgctgtgctccctctaacattgcagtggacaatcttgtggagaggctagcattgtgtaaacagcgtatcttacggcttggccaccccgctcgtttgttggaatccatccagcaacacagtctggatgccgtgctggcccgtagtgacagcgcccagatcgtcgccgacattcgtaaagatatcgaccaagtgtttgtaaaaaataaaaaaacccaggataaaagagagaaatctaacttcaggaatgagataaagctgctccggaaagaactgaaggagagagaagaggccgctatgctggaatccctgacatccgcgaatgtggtcctggccaccaacaccggcgcgtcagctgatggacccctgaaactgttacccgaatcttacttcgatgtcgtggtgatcgatgagtgcgctcaggctctcgaagcatcctgctggatcccgcttctcaaggcccggaagtgcatcctggccggcgaccataagcagttaccaccgaccacggtctcccacaaagctgccttggctggtctgtctttgagtctgatggagagactggcggaggaatacggtgccagggttgtgcgaacgctgactgtccaatatcggatgcaccaggcaattatgcgctgggcgtctgacacaatgtacctggggcagctgaccgcccatagctctgttgccagacacttgctccgcgacctccctggtgtggctgccaccgaggaaactggagtaccactgcttcttgtcgatacagcgggctgtgggctgtttgagttggaggaagaggatgagcagtccaaagggaaccctggcgaagtgagattagtctccctccacattcaggcgttggtggatgccggagtgcccgccagagacatagctgtagtcagtccgtacaacttacaagtagacctgctgaggcagagcctcgtgcaccggcaccctgagctggagatcaaatcagtggacggatttcagggtagagagaaggaggcagttatcctttcttttgtacggagcaaccgcaagggagaggtgggcttcctggcggaagatagacgcattaatgttgccgtgacccgcgcgaggagacacgtggcagtgatctgcgactcaagaacagtcaacaaccacgcattccttaagactcttgtcgagtatttcacccaacacggagaggttcgtactgcatttgaataccttgatgatattgtgccagagaattactcgcacgagaacagtcaagggtcttcacacgctgccacaaagccccaggggcccgcgacctccacacgtacaggctctcagcggcaggagggcggccaggaagccgcagctccagcccgacaggggcgaaagaaacctgcgggaaaaagcctggctagtgaagcaccttctcagcctagcctgaatggcggatcacctgagggcgtcgaaagccaggacggcgtcgaccatttccgggccatgattgtggagttcatggcctcaaagaaaatgcagcttgaattccctccaagtttgaactcacatgaccggctcagggtccaccagatagccgaggaacacgggctaagacacgacagctctggcgagggcaagcgccgatttatcactgtgtccaagcgcgccccacgtccaagggccgccctgggcccacctgccggcactggggggcccgcccctttgcaaccagtacctcctactcccgcgcagacagaacagccgccaagagagcagcgaggacctgatcaacccgaccttagaaccctacacttggaacgtctgcaacgagtccgcagcgcccagggacaaccagcgagtaaggagcagcaggcatcaggtcagcagaaactgcctgagaagaaaaagaaaaaggctaaaggccacccagcgaccgatctaccgacagaagaggatttcgaggcactagtgagcgcggccgtgaaggcagataacacctgtggatttgccaagtgtacagccggggttacaacccttggccagttctgccagctttgctctcgtaggtactgcctgtcccaccacctccccgaaatccatgggtgtggtgagcgggcccgtgcccacgcgcgccagcgtatttcaagggagggcgtgctttacgcgggatcaggcaccaagaacgggtccttagatcccgccaagagagcccagcttcagagacgactggataagaaactctcagaactgagtaatcaacggacaagtagaaggaaggaacgcggtacatag

SEQ ID NO: 120452 - DNA, 1287 bp, synthetic construct
  misc_feature 1..1287: note = Description of Artificial Sequence: Synthetic coding sequence
  source 1..1287: mol_type = other DNA
atgcaggagttgcaccttctgtggtgggccctgctccttggcctcgcgcaggcatgcccagagccctgcgactgtggcgagaaatacgggttccaaatcgccgattgtgcatacagagatctggaatctgtacccccggggttccctgccaatgtgactaccctctctctgagcgcaaacaggttgcctgggctgccggaaggagcttttagagaagtgcccctgctgcagtccctgtggctggctcacaacgagattagaactgttgccgcaggtgccttagcctcactcagtcatttgaagtccctagatttatctcacaacctgatatctgactttgcctggtcggacttgcacaatctgtccgccctccagctcttaaagatggacagcaatgagctgacatttatcccgagggacgcatttcggtcacttcgtgcccttagatctctgcagctgaaccataataggctccacacactcgccgaaggaacgttcacaccactcacagccctctcccatcttcagattaatgagaatcccttcgactgcacatgtggaattgtctggctgaagacctgggcactgacaacagcagtctcaatccccgagcaggacaacattgcttgcacctccccgcatgtgctgaaggggacacccctgagtaggctgcctcccctaccatgttccgcacctagcgtccagctgtcataccaaccctctcaggacggcgccgaactacgacccggattcgtgctggctctacattgtgatgtggacggtcagccggcaccgcagctgcattggcatatccagatcccgagcggcattgtggaaattacttcccctaacgtcggaactgacggtcgcgccctccctggcacaccggtggcctccagtcagccgcggtttcaggcctttgccaatggttcattgctgatccccgacttcggcaagctcgaggagggcacctattcctgtctcgctaccaacgaactgggctcagcagaatcatctgtcgacgttgctctggcaacgccaggagaaggcggcgaggacacccttggaagacggttccatggcaaggccgttgaaggaaagggatgttatacagtggacaatgaagtacagccttctgggccagaagacaatgtggtgatcatctatttgagcagggcaggaaatccggaagccgctgtggctgaaggtgtccccgggcaactgccccccggcttactgctactgggccagtctcttttactgtttttcttcctgacctccttctag

SEQ ID NO: 120453 - DNA, 1287 bp, synthetic construct
  misc_feature 1..1287: note = Description of Artificial Sequence: Synthetic coding sequence
  source 1..1287: mol_type = other DNA
atgcaggagctccaccttctttggtgggcactgctgttggggctcgcccaggcatgcccagagccctgcgactgcggtgagaagtacggtttccagatagcggattgcgcctatcgtgatttagaatcggtgccccctggttttcccgccaacgtcacaactcttagtttgagcgcaaaccgcttaccaggcctgcccgagggggcttttagggaagtaccactgctccaatccctctggcttgcacacaatgagattcgtaccgtggcagccggggcccttgcaagtcttagccacctgaagagtctggatctgtcccacaatctgatctccgatttcgcttggtctgatttgcacaacctgagtgctttacagttgctgaaaatggactccaacgaattgacttttataccacgggacgcatttcgctctctccgggcacttcgatccttacagcttaaccacaatcgcttgcatacgttagcagagggcaccttcacaccattgaccgctctcagtcaccttcagattaacgagaatcccttcgactgcacctgcggcattgtttggctcaaaacttgggccctaactacagccgtatcaattcctgaacaggataacattgcttgcacctcgccccacgttcttaaagggacaccactaagcaggctccccccccttccgtgtagcgccccgtcagtgcagctgtcctatcagcccagccaggacggggcagaactgcgcccaggcttcgtacttgcgctgcactgtgacgtggacggacagcccgccccgcagctgcactggcacattcagattcctagtggcatcgtcgaaattacaagtccaaacgtaggaacagatggcagggctttacccggcactcccgttgccagttctcaaccacggttccaagcttttgccaacgggtcattgctcatccctgatttcgggaaactcgaagagggcacatattcttgcctcgctaccaacgagcttggaagcgctgaatcttccgtggatgtggctctggctactcctggggaaggcggggaggatacactgggcaggcggtttcatggcaaggcagtagaaggcaagggttgctacaccgtcgataacgaagtgcagccttctgggcctgaagacaacgtcgttattatttacctgtcccgtgcaggaaaccctgaggctgcggtggctgagggcgttccagggcaattgccgcctggcctgcttctcctaggacagagcctgttactgtttttcttcctaactagcttttag

SEQ ID NO: 120454 - DNA, 444 bp, synthetic construct
  misc_feature 1..444: note = Description of Artificial Sequence: Synthetic coding sequence
  source 1..444: mol_type = other DNA
atgcaagaactgcacctgctgtggtgggccttactgttaggcctggcccaggcatgtcccgaaccgtgtgactgtggggagaaatacgggttccagattgctgattgcgcctacagagatctggagtcagtgccacccggctttcctgctaacgttacgaccttatccctgagcgccaataggctcccaggtctgccggaaggcgcatttcgcgaagtccctctgctccagtccctgtggttggcacacaatgagattcggacagtcgcagctggcgcacttgcctctctgtctcacctcaagtccctggatctttctcataacttgattagtgactttgcttggtccgatctacacaatctgagtgctctacagctgttaaaaatggactccaacgagctcacctttatccccagagatgccttcaggagcttgcgggcctag

SEQ ID NO: 120455 - DNA, 552 bp, synthetic construct
  misc_feature 1..552: note = Description of Artificial Sequence: Synthetic coding sequence
  source 1..552: mol_type = other DNA
atgcaggaactgcatctcctttggtgggctttgctgctgggactcgcacaggcatgtcctgagccttgtgactgcggagagaagtacggattccagatcgctgactgcgcctatcgagacttggagtcagtcccgcctgggtttcctgccaacgttactaccctctcactgtcggcgaatagattgccaggactgcctgaaggggcattcagagaggtgcccctcctccagagtctgtggctggcccacaacgagattcggactgtagctgccggagctctggccagcttgtctcacctcaagagcttggacctgagccacaatctaatcagcgactttgcatggtcagacctccataatctgtccgccctgcaactgctcaaaatggacagcaatgaactcaccttcatccctagggacgccttcagaagcttacgagctctccgatcgctacaactgaatcataacaggcttcacacactcgccgagggaaccttcacaccactgactgccctgtctcatctgcagatcaacgagaatccatttgattag

SEQ ID NO: 120456 - DNA, 2238 bp, synthetic construct
  misc_feature 1..2238: note = Description of Artificial Sequence: Synthetic coding sequence
  source 1..2238: mol_type = other DNA
atgttccctctgcgtgcattgtggttggtgtgggctctcctcggggtggctggaagttgccccgagccgtgtgcatgcgtcgataagtacgcccaccaattcgcagactgcgcctacaaggagctgagagaggtgccagaggggcttccggccaacgtaaccacattatctctttccgccaataagatcacagtgctaagaagaggcgccttcgccgacgtgacacaggtgacttctttgtggttggcccacaacgaagtgcgcaccgtcgaacctggagctctagcagtgctgtcccagctgaagaacctggacctgagccataattttatctcttcctttccatggtctgaccttcggaacctctcagctctccaacttttgaagatgaatcataaccgcttaggcagcttgcctagggacgctttaggagcactgccagaccttagaagcctcagaattaataataacaggctgcgcactttagcgcccgggacatttgacgccctctcagctttgagccacttacagctttatcataatccgtttcactgcggttgcggactcgtgtggctgcaggcctgggcggcttcgacacgggtgtctctgcctgaaccagattctattgcctgcgcaagcccccccgcccttcagggggtgccagtttatcgactccctgccctgccctgcgcaccaccgtctgttcatcttagtgcagagcctcccctcgaagcgcctggaactcctctacgggcaggactagcgtttgtgctgcattgcatcgccgatgggcatccaaccccaaggctccagtggcaattgcagattccagggggcaccgtggttcttgagccgccagtgctgtccggagaggacgacggggtgggcgccgaggaaggcgagggcgagggagatggtgaccttcttactcagacccaggctcagacccccacccctgcgccggcttggccagccccacccgctactccccgctttttggcactcgcgaacggatcactcctggtaccactgctctcagcgaaggaggccggtgtgtacacttgtagggcccataatgagttgggggcaaatagcacttccataagggtcgccgttgcagcaactgggcctcccaaacatgctcccggcgcaggcggtgagcctgacggacaagctccaacaagtgagaggaaatcaactgccaaaggccgggggaattctgtgctgccgagtaaacctgagggcaagatcaaggggcaaggcttggcgaaggtgagcattctgggggagactgagacagagcctgaagaggacaccagtgaaggagaggaagctgaggaccaaattctagccgaccccgctgaggaacagcgttgcggcaatggagaccctagccggtacgtcagtaaccacgccttcaaccagagtgctgaacttaaaccccatgtattcgaactgggcgtcatagcactcgacgttgccgaacgggaagccagggtgcagctgacgcccctagcagcaaggtggggccctggaccggggggggctggcggggcaccacggccagggcgccggccactccggcttttgtacttgtgtcctgcaggagggggcgcagccgtacagtggtcccgcgttgaggagggtgtcaatgcctactggtttaggggcctgcggcccggcacaaactactctgtgtgcctggccctggcaggagaggcatgccacgtgcaagtggtctttagtactaagaaagaattgcccagccttcttgtgatcgtcgctgtgagcgtgtttctgttggtccttgcaacagtgccactgctgggggcagcgtgttgccaccttctggccaagcatcccgggaagccctaccggcttatcttaagaccccaggctcccgaccctatggagaagagaattgccgccgactttgacccaagggcaagctacctagagtctgaaaaaagctacccagctggtggggaagccggaggagaagagcccgaagatgttcagggggagggcctggacgaggatgctgagcagggggatccatcgggtgatcttcagcgggaggagtccctcgcagcttgttcattggtcgagtctcaaagcaaagcgaaccaggaggagttcgaagcaggttcagagtacagcgatagactgcctctgggcgccgaagccgttaatatcgcccaggaaatcaatgggaactaccgtcagaccgcgggatag

SEQ ID NO: 120457 - DNA, 1005 bp, synthetic construct
  misc_feature 1..1005: note = Description of Artificial Sequence: Synthetic coding sequence
  source 1..1005: mol_type = other DNA
atgttccccttgagagccttatggctcgtctgggctctactgggagtagctgggagctgtccagaaccatgcgcttgtgtggataaatatgctcatcagttcgcggattgtgcttacaaagagctaagggaggtgcccgagggcctccccgccaacgttaccacactgtcactgtctgccaataaaattaccgttctgaggcggggggcctttgctgacgtgacacaggttacctctctctggctggctcacaacgaagttcgcaccgtcgaacctggtgccctagctgtgttgtcccaactaaaaaatctggatctctcacacaattttatctctagcttcccttggtccgatctgagaaacctgagcgcactccagctgcttaagatgaaccataatagacttggttcgctcccgcgggacgcactgggcgcactgcctgacctgcggagcttacggattaacaacaacagactggccggcgaggcctgtcacgtacaggtggtgttctccaccaaaaaggagctgcccagtttgctggtaatcgtcgccgtgtccgtattcctgcttgtgctcgccactgtacctttgctgggcgcagcatgttgtcacttactagccaagcaccccgggaaaccctataggttgattctgcggccccaggctccggacccaatggagaaacggatcgccgccgacttcgacccccgcgcgagttatttggagtctgagaaatcttaccccgccggaggcgaggcagggggcgaagagccagaagacgtccagggcgaaggccttgacgaagatgccgagcaaggcgatcccagtggtgacctacagcgtgaggaatcattagcggcatgcagcttagtcgaaagccaatccaaggctaatcaagaggagtttgaagctgggtccgaatattccgaccgccttccactcggagccgaagcagtcaacattgcccaggaaataaatggtaactaccgacagacggcagggtag

SEQ ID NO: 120458 - DNA, 2238 bp, synthetic construct
  misc_feature 1..2238: note = Description of Artificial Sequence: Synthetic coding sequence
  source 1..2238: mol_type = other DNA
atgttccctctgagagccctttggttagtgtgggccctcctaggcgtcgcaggttcgtgtcccgagccatgcgcatgcgttgataaatacgcacaccaatttgccgattgcgcttacaaggaactcagggaggtccccgaggggctgccggctaatgtgactacactctctctctccgccaacaaaattactgtcttgagacgcggagcctttgctgacgtgactcaggtcactagcctgtggttggcacataacgaggttcgcactgtagagccaggtgctctggctgtgttgtcccagctgaagaatctcgacctgagccacaacttcatctcatcctttccctggagtgacttgcgcaatctcagcgccctgcagttattaaaaatgaatcacaaccgattaggatcgctcccccgcgatgcactaggtgccctaccggaccttcgtagtcttagaatcaacaacaaccgcttacgtaccctggccccggggaccttcgatgccctctctgcattgagccacctgcagttataccacaatccttttcattgtggttgcgggctggtgtggctacaggcttgggccgctagcaccagggttagcctccccgaacctgattccatagcctgtgcatctcctcccgcactccagggggttccggtctaccgtctcccggcccttccatgcgctcctcctagtgtgcacttatccgccgagccgcctctggaggcacccggtacccccctcagggccgggctggccttcgtgcttcactgcattgctgatggccatccaactcccaggcttcaatggcagctgcagatccccgggggcacagtggttctggaaccaccagtgctctcaggcgaggatgatggcgttggcgccgaagaaggggaaggagagggcgatggagatcttctgacgcaaacccaggcgcagactcctacacccgctcccgcttggccagccccccctgctacccccaggttcctcgctttagccaacgggtccctcctcgtcccacttctcagcgccaaggaagcgggcgtatacacttgcagggctcataatgagctcggggccaacagcacctctattagagtggccgtagccgcaaccgggcctcctaagcatgcaccgggagcaggaggagagccagatgggcaggctccaacctcggagcgcaagagcaccgccaagggacggggaaatagcgtgctgccatccaagccagaaggtaaaattaaaggccagggtctggcaaaggtgtctatactgggcgaaacagagactgagccagaagaagatacctccgaaggcgaggaggccgaggatcagattctggccgaccctgcagaagagcaaaggtgtgggaacggagatcccagccgttatgtcagcaaccacgccttcaaccaaagcgcggaacttaagcctcacgtttttgaactgggcgtgattgcactggacgtcgctgagcgagaggcaagggtacagttaacccctttggctgcgcggtggggccccggacctggcggagccggcggtgcccccaggccagggagaaggcctctgcggttgctttatctgtgccctgccggcggtggtgctgctgttcagtggtcgcgggtggaggaaggggttaatgcgtactggtttcgggggctaagaccaggcaccaattattccgtgtgcctggctttagccggagaagcttgccacgtccaggttgtgtttagcacaaagaaggaactgccatcactcctcgtgattgtagcagtatccgtcttcctgctggtactcgctactgtccccctcctgggggccgcctgctgtcaccttcttgccaagcatcccgggaagccttaccggttgatcctgagaccacaagcgcctgaccccatggagaagcggattgccgccgatttcgaccctcgagcatcatacctggaatccgagaaatcttatcctgcaggaggagaggcggggggggaggaacccgaagacgtccagggcgaaggactagacgaagatgctgaacagggggacccttcaggtgacttgcaacgggaggaatccctcgccgcctgcagtctcgtggaaagccagagcaaggccaatcaggaagagttcgaggcgggctcggaatactcagatagacttcccctgggtgccgaggccgtgaatatcgcgcaggaaatcaacggcaactacaggcagactgctgggtag

SEQ ID NO: 120459 - DNA, 2238 bp, synthetic construct
  misc_feature 1..2238: note = Description of Artificial Sequence: Synthetic coding sequence
  source 1..2238: mol_type = other DNA
atgtttcctctgagggctctgtggctggtctgggcgttactgggcgtggccgggagttgccccgagccctgcgcttgcgtagataagtatgcacaccagttcgctgactgtgcttataaagaactccgggaggtgccggaagggttacccgcaaatgtcaccacactcagcctctcagcaaataaaatcacagtgctgcggcgcggcgccttcgctgacgtcacacaggtcaccagtctatggctggctcacaacgaggtgaggaccgtcgagcccggggctctggcggtgctcagccagctaaagaatctcgaccttagccacaacttcatctcttcctttccttggagcgacttgagaaatcttagcgccctgcagttgctgaagatgaatcataataggctgggtagtctcccccgtgatgcactaggcgccctccctgacctgaggtcactgcgaatcaacaataatcgcctaagaaccttagccccgggaacatttgacgcactatctgccctgtcccatttgcagttatatcacaacccctttcactgtggctgcggactggtttggctgcaggcatgggcggcctcgactcgggtgtccctccccgagcctgactctatcgcctgcgcttcccctcccgctctgcagggggtgccagtgtaccggttgccagcccttccatgcgcacctccttcagtgcatttgtccgccgaaccccccttggaagcacctggcactcccctacgagcgggactggcctttgtgctccattgcatcgccgatggccaccctactccgaggctgcaatggcagcttcagatccctggtggcactgtggtgctcgagcctcccgtcctctctggcgaagacgacggagttggcgcagaggagggggagggagaaggcgacggcgacctccttacacaaactcaggctcagaccccaaccccggcaccagcatggccagcccccccagcgacaccacgattcctcgctcttgccaatgggagcctgctggtgcctctgctgtccgccaaggaagccggcgtctatacttgccgggcccacaacgagcttggggccaactcaacgtctattcgggttgcagtggccgccaccggaccacctaagcacgcgccaggggccggcggagagcctgatggtcaagccccaacaagtgagagaaagtccaccgctaaaggccgagggaatagcgtcttacctagtaagcctgaaggcaagatcaagggccagggcttagccaaagtctcgatccttggcgaaactgaaaccgagcctgaagaagatacttccgagggcgaggaggccgaagaccaaatcctagccgatccagctgaggagcagcgctgcggcaatggtgacccttcgaggtacgtgtctaatcacgcttttaatcagtctgcagaattgaagccacatgtgttcgagctgggcgtgatcgcccttgacgtggccgagagggaggctagggtgcagttaactccactggccgcccggtggggtccaggcccaggaggagcaggaggcgcaccaagacccgggcgccgaccccttcgattgctttatctgtgtcccgccggaggaggtgctgccgttcaatggtctcgcgtcgaagagggcgtgaacgcatactggttcaggggtctgcgccccgggaccaattattcggtgtgcttggctctcgcaggggaggcatgccacgtccaggtggtgttcagcacaaagaaggagctcccaagcctgcttgtgatagtggcggtctcagtgtttctgctggtgctcgctactgtcccactgctaggcgccgcgtgttgtcacctgctagctaaacatcctggtaaaccgtatcggcttatcctgcggcctcaggcacccgacccgatggaaaagagaatcgcggctgattttgatccacgggcatcttatttagaatcggaaaagtcataccccgcggggggcgaggccgggggagaggaacctgaggatgttcagggcgaaggtctggacgaagacgccgaacagggagatccgtccggggatctgcagcgcgaggagagtctggctgcctgcagccttgttgaatcacagagcaaggccaaccaggaggagtttgaggcaggctccgagtatagcgatcgcctcccgctgggcgccgaagccgtcaacatcgctcaagagattaatggcaactaccgtcaaactgctgggtag

SEQ ID NO: 120460 - DNA, 2238 bp, synthetic construct
  misc_feature 1..2238: note = Description of Artificial Sequence: Synthetic coding sequence
  source 1..2238: mol_type = other DNA
atgttccctttacgtgccttatggctggtgtgggcgctcctgggcgtcgccgggtcatgccccgagccctgcgcctgtgtggataaatacgcccaccagttcgctgattgtgcgtataaggaactgagggaggtaccggagggcctccctgcgaacgtcacaacattgagcttgtcagctaacaaaattacagtgctaagacgaggagcctttgctgatgtgacccaggtgacaagcttatggctggcccataacgaggtacggactgttgagcccggagcgctggctgtcctgagccaactgaaaaacctggatctgtcacataacttcatttctagttttccttggtcagacctccgaaatcttagcgccttgcagctgttaaagatgaaccataacaggctgggttccctacccagagatgccttaggtgccttaccagacctgaggtccttgcgcattaacaacaacaggttacgcacccttgcccctggcactttcgacgccctcagcgcactgagccatctgcaactttatcataacccctttcactgtgggtgcggtctggtgtggctccaagcatgggctgcctccacacgtgtgtccctgcccgaaccagactctatcgcatgcgctagtccacctgccctgcagggagtccctgtctataggctgccagctttgccttgtgccccaccatctgtccacctgtccgccgagcctcctctcgaggcacccggcactccacttagggcaggactggcctttgttctccactgcatagcagatgggcacccaaccccacggcttcagtggcagttgcagatccctggcggcacagtagtgctagagccccctgtcctaagcggcgaagacgacggagtgggcgcggaggaaggggagggtgaaggcgatggcgatctgctgacccagacccaagcgcagacacccaccccggcacccgcttggcccgcaccgcctgcaacccctcggtttcttgcccttgccaacgggtctctcctggttccactgctcagcgctaaggaggcaggggtttacacatgcagggcccacaatgagctgggtgctaactccacaagcatcagggttgccgtggctgccactggcccacctaagcacgcccctggcgctgggggagaacctgacggccaggcccctaccagcgaaagaaaaagcactgcgaaagggcggggaaactctgtcctgccctctaaaccagagggtaagataaaggggcagggccttgcgaaggtgagtatccttggagagacagagaccgagcctgaggaggacacgagcgagggtgaggaagctgaagatcaaatcctggctgaccccgcggaagaacagagatgtggcaacggagatccatctaggtacgtatcaaatcacgccttcaatcaatctgcagagctcaagccccatgtctttgaattaggagtgattgccctcgatgttgctgaacgcgaagcacgggtacagctgacaccgctggctgccagatgggggccaggacccggtggggccggcggggctccaagacctggccgacgacctttgcgcctcctgtatctgtgcccagccggagggggagccgcggtgcaatggtctagggtagaagagggcgtgaatgcttactggttccgaggtttgcgcccaggaactaactacagtgtgtgcctcgccctggccggagaagcgtgtcacgtccaagtggtattctccactaaaaaagagctgccatccctgcttgtcatcgtggccgtgagtgtttttttgctcgttcttgccactgttcccttgctgggcgctgcgtgttgtcacctcttagcgaaacaccccggcaagccttacagactgatcctaagaccccaggcgccagatccaatggaaaagcgcattgctgccgatttcgacccccgcgccagttacctggagtcagagaaaagctacccggcagggggagaggctggaggggaagagcccgaagatgtgcagggtgagggcctcgacgaggacgccgagcaaggcgaccctagcggcgatctgcagagagaggagtccctggctgcgtgctccctagttgaatcccagtccaaggctaaccaggaggagttcgaggccggttccgagtacagtgaccggctcccgctgggcgcagaggctgtcaacatcgcgcaggaaattaacggtaactatcgccagacagccggatag

SEQ ID NO: 120461 - DNA, 2238 bp, synthetic construct
  misc_feature 1..2238: note = Description of Artificial Sequence: Synthetic coding sequence
  source 1..2238: mol_type = other DNA
atgttcccccttagagcgttgtggctggtgtgggcactgttaggcgtggccggtagctgtccggagccatgtgcttgcgtcgacaagtacgcgcaccagtttgctgactgcgcctataaggaactgcgagaagtcccagagggattacctgcgaacgtcacgacgctttcactgtctgcgaacaaaattactgtcctgcgccggggcgcctttgcagatgtaacacaggttacatcactctggctagcacataacgaggtgcgaaccgtcgagcccggcgctctggccgtgcttagtcagctgaagaaccttgatctctcccacaatttcatatcctcctttccctggtcagacctccggaatctttctgctctgcagcttctgaagatgaatcacaaccggcttggaagcttgcctcgcgatgccctgggcgctctccctgacctgcgtagcctgcgtatcaataacaatcgcctccgaaccttggccccaggcacttttgatgccctaagtgcgctcagtcatctgcagctctatcataatcccttccattgtggctgtggcctcgtgtggctgcaggcctgggccgccagcacgagagtttcgctgcccgagccggatagcatcgcttgtgcttctccccccgccctccagggcgtgcccgtgtacaggttgccggcactgccctgtgcccccccttctgtgcacctgtccgccgaaccgccacttgaggcaccgggtacgcccctgagagccggactcgccttcgtcctccattgtatcgccgacggccacccaacaccccgccttcagtggcagctccagattcccggaggcacagtagtgctggagccgcctgtcttatccggtgaggatgatggcgtaggggcagaagagggggagggcgagggagatggagatttgctcactcagacacaggcacagacccccaccccagctccagcctggcccgctcccccagcaacacctcggtttttagctcttgccaatggctcattgcttgtaccacttctgagcgctaaggaagcaggggtgtatacatgtcgggctcataacgagctgggcgcaaacagcacttcgattcgcgttgcagtggctgcaactggcccccctaaacatgccccaggggccgggggagagccggatggccaggcccctacatctgagcgcaaatcaactgctaaaggacgcgggaattctgtgctgccatccaagcccgagggtaaaatcaaggggcagggccttgccaaagtctccatcctgggggagaccgaaacggagcctgaggaagacacctcggagggcgaggaggcggaagaccagatcctggcagacccagccgaagagcagcgttgcggtaatggcgatccatcaagatacgtgagcaatcacgccttcaatcagagcgcagaacttaagccccacgtcttcgagctcggtgtgattgcactggatgtggccgaaagagaggcccgtgtacagctgactccattggcagctcggtggggaccgggccccggcggggccggtggggcaccacgtcctggccgtagaccattacgtcttctgtacctgtgcccagccggcgggggggctgcggtgcagtggagccgggtggaggaaggtgtgaatgcttactggttccgcgggctccgtccagggactaattactcagtttgtttagccttagctggggaggcgtgtcatgtccaggtcgtgttctccaccaaaaaagagctgccctccctgctggtaattgtggccgtctccgtttttcttctggtgcttgcgactgtgcccttgttaggggccgcgtgttgccacctgctcgcaaagcacccggggaagccctatcgacttatactgcggccacaagctcccgatcccatggaaaagcgcatcgcagctgactttgacccgcgagcgtcatatctggagtcagagaaatcttatcccgcggggggagaggctggaggggaagagccagaagacgttcaaggcgaggggcttgatgaggacgcagagcaaggggaccctagtggagatctccagagagaggagagcctggcagcctgcagcctcgtcgagtcccagtccaaggccaaccaagaagaatttgaagctggaagtgaatattctgacagactaccccttggggctgaagcagtgaacatcgcccaggagatcaacggcaactatcgtcagactgcaggttag

SEQ ID NO: 120462 - DNA, 4011 bp, synthetic construct
  misc_feature 1..4011: note = Description of Artificial Sequence: Synthetic coding sequence
  source 1..4011: mol_type = other DNA
atgaccctggacagacccggcgagggggcaaccatgctaaagacctttactgtgttgctcttttgcattcgtatgtcgctgggcatgaccagcattgtgatggacccccagcccgagctctggatcgagagtaattatccgcaggccccttgggaaaacattacactctggtgtaggtctccttcccggatttcgtccaaatttctgctgctgaaagataagactcagatgacctggatacgtccttcccacaagacctttcaggtgagcttcctcataggtgcccttacagaatccaatgccgggctgtaccgttgctgttactggaaggagaccgggtggtccaaaccatctaaagtgcttgaactggaggcccctggccagctgcccaaacccatcttctggatacaagcagagactccagctctgcccggttgcaacgtgaacatactctgccatgggtggcttcaagacctggtcttcatgttgttcaaagaggggtacgctgaaccagtggactaccaggttcccaccgggacgatggcaatcttcagcatagacaacctgacccccgaggatgaaggcgtgtatatatgccgtacccacatccagatgctgccgacactctggagtgagccatctaaccctttgaagctcgttgtggcaggcctgtaccctaaaccgacgctaacggcgcacccagggcctatcatggccccaggagagtctcttaacctaagatgccaaggtccaatctacgggatgactttcgccctgatgagagtcgaagatctagaaaagtccttttatcataagaagacaatcaagaacgaagctaactttttcttccagtcactcaagatccaggacactggacattatctctgtttctactacgacgcgagttacagaggctctcttctctcagatgtcctgaagatctgggtcaccgatacctttccaaagacctggttgctggcgcgcccatctgccgtggtccagatggggcagaacgtatccctccgatgccggggccccgtggacggagtgggcctggcactctataagaaaggcgaagacaagccactgcagtttctggatgccacatcaatcgacgacaatacctcgtttttcctgaataacgtgacatactccgacacaggtatttactcgtgtcactacctcctcacttggaagacctcaattcggatgccttctcacaacaccgtggagctaatggtggtggacaaaccccctaaaccaagcctgagcgcatggccttccactgtgttcaaacttgggaaggcgatcacattgcagtgccgcgtaagccacccagtcttggagttctctttagagtgggaggagagagaaacgtttcagaagttcagcgtgaacggcgacttcattatctctaatgtggacggaaagggaacgggcacttacagctgttcataccgagtcgaaacacaccccaatatatggtcccaccgctctgaaccactaaagttaatggggccagctgggtacttgacttggaattatgtacttaacgaagccatcagactgtctctgattatgcagctggtggctctgctcctggttgtcttgtggattcgctggaaatgtcggcgtctgcgcataagggaggcttggctgctaggcacggcacaaggtgtcaccatgctgttcattgtaaccgccttgctttgctgcgggctctgtaacggcgtacttattgaggagaccgagatcgtcatgccgacgccaaaacctgaactgtgggccgagaccaactttcctctggctccctggaagaatctcactctgtggtgcaggtccccttcaggatccacaaaagaatttgtactgttaaaagatgggaccggatggatcgcaacaagacctgcaagcgagcaggtgcgagctgccttcccactcggcgccctgacgcagagtcatacaggcagctaccactgtcactcttgggaagaaatggcagtgagcgaacccagcgaagcactggagttagtaggcaccgatattctcccaaagccagtgatttccgcaagtcctaccatacgcgggcaggagctgcagctgaggtgcaagggctggttagccgggatgggtttcgctctgtataaggaaggggaacaggaacccgtccagcagctaggcgcagtgggcagagaggcgttcttcaccattcagcgaatggaggataaggacgaaggaaactatagctgccggacccatacggaaaagaggcctttcaagtggtctgagccctcagaaccgctggaattagtgataaaggagatgtaccccaaacccttcttcaagacatgggcctcgcctgtggttacgccaggagccagggtgacattcaattgctcaactccccaccagcatatgtcatttattctctacaaggacgggagcgagatcgcctcttcagatagatcgtgggccagccccggggcatccgcagctcatttcctcattattagtgtaggcatcggtgatggaggtaattacagctgccgctactatgatttcagtatctggtccgagccatctgaccccgtggaattggtggttaccgagttctatcctaagcccacgctgctggcgcagccaggccccgtcgtcttcccaggaaaatccgtgatcctccgttgtcagggaacatttcaaggaatgcgcttcgcactacttcaggagggagctcatgttccactgcagtttcgctcggtgtctggtaactccgcagatttcttacttcataccgtgggcgccgaggacagcgggaactactcatgtatatattacgagacgacgatgagcaatcgcggtagctatctgagcatgcccctgatgatctgggtgaccgacacatttcctaaaccctggctctttgcagagccgtcgagcgtggtacctatggggcagaatgtaactctctggtgcaggggtcccgttcatggggtcggctatattctacacaaggagggtgaggccacatctatgcagttatggggaagcacctctaacgatggtgccttccccatcacaaacatcagtggcacgagtatggggcgatactcatgctgttaccaccctgattggacctccagtattaaaatacagccatcaaacacgttggagctgctcgtgaccggattactacctaagccttccctcctagcacaaccaggccctatggtagcgcctggcgagaacatgacactacagtgtcagggcgaattacctgatagtaccttcgtgttacttaaggagggcgcccaggagcctctggaacagcagcgccccagcggctaccgggccgatttttggatgcctgccgttcgcggagaggactctggaatctattcatgcgtatactatttggatagcaccccattcgccgcgtctaaccactctgatagcctggaaatttgggtaaccgacaagccaccgaagccatccctgagcgcttggccctccacgatgttcaaactgggaaaggatattacactgcagtgtcgagggcccttacctggggtcgagtttgtgctggagcatgacggagaggaagcaccacagcaattctccgaagacggggacttcgtgatcaataatgtggaaggaaagggtatcgggaattattcttgtagctatcgactccaagcctatccagatatttggtccgagccaagtgaccccttggagcttgttggcgctgcagggcctgtcgcccaggaatgcactgtaggaaacatagtccggtcatccctcatcgttgtggttgtggtggccctgggcgttgtgctggccatcgaatggaaaaagtggccgcgactgagaactcgtggcagtgagactgatgggcgggatcagactatcgccctcgaggaatgcaaccaggagggagagccggggacaccagcaaattctccctccagcactagccaacgtatatcggttgagctgcctgtccccatttag

SEQ ID NO: 120463 - DNA, 729 bp, synthetic construct
  misc_feature 1..729: note = Description of Artificial Sequence: Synthetic coding sequence
  source 1..729: mol_type = other DNA
atgacattggacaggcccggcgaaggcgcgaccatgctaaagaccttcaccgtgctgctgttctgcattaggatgtcactcggcatgactagcatcgttatggatccacaacctgagctgtggatcgagtccaactatccacaggcaccctgggagaacatcacactttggtgtcgttccccctcaaggatctcatcgaagtttctcctgctgaaagacaaaacacagatgacctggattcgcccttcacacaagacctttcaggtgagtttcctcataggcgcgctaaccgaatcaaacgcaggcctttatcgctgctgctattggaaagaaaccggctggtcaaaaccttctaaggtactcgaactggaggctccaggacagctgcctaaacccatcttctggatccaggctgagactcccgcgctgcccgggtgtaacgtgaacattctctgtcacggttggctccaagatctagtgttcatgctgttcaaagaaggctatgctgagcccgttgactaccaagtccccaccggaactatggccatattctccattgacaacctcactccagaagacgagggggtttatatatgcaggactcatatccagatgttaccaaccctatggtctgagccatcaaacccactgaagctcgtcgtcgccgggggttgcggatacgggtgttggcacttggccattgtagtgcctggcattatggcaggctag

SEQ ID NO: 120464 - DNA, 729 bp, synthetic construct
  misc_feature 1..729: note = Description of Artificial Sequence: Synthetic coding sequence
  source 1..729: mol_type = other DNA
atgaccctggatagaccaggcgaaggcgcgacaatgctgaaaactttcaccgtgctcttgttttgtattaggatgtccttgggaatgactagcattgtgatggaccctcagccggagctttggattgagtctaactacccgcaggctccctgggagaacatcactctttggtgccggtcaccctcacgaattagtagcaaattcctcttgcttaaagacaaaacacaaatgacctggattagaccctcacacaagacattccaggtgtcattcctgattggagcactcacggagtcaaatgcaggcctatacaggtgctgctactggaaggagaccggctggtcaaagccaagcaaagtgctcgagttagaagctcctggccaacttcctaagcctatcttttggattcaggctgaaacgccagcattacccggttgcaatgtgaacatcctctgccacggatggctgcaagatcttgtgtttatgctgttcaaagagggatatgccgaacctgtcgactatcaggtcccgactgggacaatggccattttttccattgataatctaacccccgaggatgagggcgtatatatctgccgcactcatatccagatgcttccgacactctggagtgaaccctctaacccattgaagctagttgtcgccgggggctgcggctacggctgttggcacttagccatagttgtgccgggtattatggccggatag

SEQ ID NO: 120465 - DNA, 4026 bp, synthetic construct
  misc_feature 1..4026: note = Description of Artificial Sequence: Synthetic coding sequence
  source 1..4026: mol_type = other DNA
atgacgctggacagaccaggagaaggggccaccatgttgaagactttcactgtcctactcttctgcatcagaatgtctctcggaatgacaagcattgtcatggacccgcaaccagaactttggatagagtcgaactacccccaggctccttgggaaaatatcacgttatggtgccgctcaccctcacgaatctctagtaaatttctcctgctcaaggacaagacgcagatgacgtggattaggcccagccacaaaacatttcaggtttccttcttaataggggcacttacagagtcaaacgctggcctgtatcgttgctgctactggaaggagactgggtggagcaaaccctctaaagtgctcgaactagaagcccccggccaactccctaaaccgatcttctggatccaagccgagacacctgccctcccaggctgtaacgtcaacattctatgccatggctggttgcaggatctggtgttcatgcttttcaaggaagggtacgctgagcctgttgactatcaggtgcccactggcaccatggctatctttagcatcgataacctcacgcctgaggacgagggtgtgtatatctgtaggacacacatacaaatgctgccaacgttgtggtctgaaccctccaaccctcttaagctcgttgtggctggcctgtacccaaaacctacactgactgcacatccaggtcctatcatggcccccggcgaatctctgaacctgagatgtcaggggccaatctacggaatgacatttgcgttgatgcgggtggaggacctcgaaaagagtttctaccacaaaaagacaatcaagaatgaggcaaatttcttctttcagtcgctaaagatccaagacactgggcattatctgtgtttttattacgatgccagctatcggggtagtctgctatcggatgtgctcaaaatctgggtcaccgacaccttccccaagacatggctgttggccagaccctctgcagtggtccagatggggcagaacgtgtctctccgctgtcggggaccagtggacggtgtggggttggctctgtacaaaaagggtgaggacaaacccctccagttcttggacgcaactagtatagatgacaatacttctttcttcttgaacaacgttacatattctgacaccgggatctactcctgccactacctcctaacctggaagacttccatacggatgcccagtcacaacaccgtagagctgatggtggttgataagccccccaagccctccctttccgcctggcccagcaccgttttcaagctcggcaaggcaatcactctacaatgcagggtgtcacatcccgtgctcgagttcagcctggagtgggaggaacgtgagacatttcaaaaattttctgtgaatggtgacttcatcatctcaaacgtggatggaaaaggaactggaacgtattcttgcagctaccgcgtcgagactcaccccaatatatggagtcacagatcagaaccactaaagttgatgggccctgccggttatctgacatggaactatgtcctcaatgaggcaattcgcctgtctctgattatgcagctggttgccttgctacttgtggtgctgtggatccgctggaagtgtcgcagactgaggattcgggaggcttggctgctgggtacggcccagggggtgacgatgcttttcattgtcacggccttactctgctgtgctatttccttcgctggattatgcaacggagtgctcatagaagaaacagaaatcgttatgccgacccctaagcctgaactctgggcagagactaacttcccgctcgcgccttggaagaacctcacgctgtggtgccgctctccctcaggtagcacaaaggagtttgtcctcctgaaggatggtacagggtggatcgcaacccggcctgcttccgaacaggtacgtgccgctttcccactgggcgcactgactcaaagccacacggggtcatatcactgccactcctgggaagaaatggcagtttcggagccctcagaagcacttgagctcgtcgggactgatattttacccaaacctgtaatttctgcctcgccaacgattcgcggccaagaactgcaactgagatgcaaaggttggctggcggggatggggtttgctctgtacaaagagggtgaacaagagcccgtgcagcagctcggtgctgtgggcagggaggcattctttacaatccaaaggatggaggacaaagacgagggcaattactcatgccggactcatactgaaaaaaggccattcaagtggtcagagccctctgaacccctcgaactcgtgatcaaggaaatgtacccgaagcccttcttcaagacctgggcctcccccgtcgtgacaccgggagcaagagtcactttcaattgctctactccccatcagcatatgtcgtttatcctttacaaagatgggtcagaaatagctagtagtgaccgatcatgggcctcaccaggggcctctgccgcacacttcctgatcatttcggtgggaattggagatgggggtaattatagctgccgatattacgacttctccatctggtccgagccctcagaccctgtggagctggtggtaacagaattttacccgaagcccacactgctggctcagccaggaccagtcgtgtttccaggaaagtccgtgatcctgcgttgtcagggcaccttccagggaatgcggttcgcactgcttcaggaaggtgcacacgtgccgctccagtttcgttcagtctccgggaatagcgccgatttcctgctccatacggtcggagccgaagacagcggaaattattcatgtatctactatgagacaacaatgagcaacagggggtcatacctcagcatgccacttatgatttgggttacggacaccttcccgaaaccatggttatttgccgaacccagttccgtggtaccgatgggccagaatgttaccttgtggtgtagaggccccgtgcatggcgtgggatacatactgcacaaagaaggtgaggcaacttccatgcagctctgggggtcaacaagcaacgacggggctttcccaattaccaatattagcgggactagtatggggaggtactcctgctgctaccaccctgactggacgagtagtattaagatccagccgagcaacactctggagctcttggtgacgggtctgcttcccaagccgagcctgcttgcccagcccgggccaatggtcgcccccggagagaatatgactctccaatgtcagggcgagctcccggactcaacattcgtcctccttaaggagggtgcccaggagcctctcgagcagcagcgcccttccgggtacagggcggacttttggatgcctgccgtcagaggagaggactccggtatatacagttgtgtgtactacctggatagcactcccttcgccgcttcaaatcattccgactcactagagatttgggtcacagataaacccccgaaaccaagtctatctgcctggccaagcactatgtttaagctgggtaaggatataactctgcaatgtagagggccactgcccggtgtggagtttgttctcgaacacgacggagaagaagctccccagcagttttccgaggacggtgatttcgtaatcaacaacgtcgaggggaagggaatcggcaactattcctgcagttaccgtctccaggcctacccagatatttggagtgagccatccgaccccttagagctggtgggtgcagccggacccgtggcacaagagtgtactgtggggaacattgtgcgcagctccttgatcgtggtagtggtcgttgccctaggtgtagtcctcgcaatcgagtggaaaaaatggccgagactgcgtaccagaggctccgaaacagacggaagggaccagaccattgccctcgaggagtgtaatcaggagggggagccaggaacaccagcgaactcgccctcttccacctcccagcgcatttccgttgaactgccagttcccatttag

SEQ ID NO: 120466 - DNA, 3984 bp, synthetic construct
  misc_feature 1..3984: note = Description of Artificial Sequence: Synthetic coding sequence
  source 1..3984: mol_type = other DNA
atgacgcttgataggcctggcgagggagccacgatgctcaaaacatttaccgtgctgttgttctgcattctgatggatcctcaaccagagctgtggattgagtccaactatccccaggccccttgggagaatattacactgtggtgccgttcaccttcacgcatctcaagcaagtttctgctgcttaaggacaagacccagatgacatggatccgtcctagtcacaagacattccaggtttccttcctgattggagctctgaccgagagtaatgccggactctacagatgttgttattggaaggagacaggttggtcaaagccatctaaagtgcttgagttagaggccccagggcaactgcccaaaccaattttctggatccaagcggagactcccgccttgcctgggtgcaacgttaacatcctctgtcacggctggctgcaggacttggtgttcatgttgtttaaggaggggtatgctgagccagtggactaccaggttccaacaggcaccatggcaatcttctcaattgataatctgacccccgaagacgaaggggtgtacatctgtcggacacatatccagatgttgcccacattgtggtctgaaccgtcgaaccctctgaagttggtcgtagccggactctatcctaagcccaccttaactgcacatccagggcctataatggcgcctggagagtcattaaacctccggtgccaaggccccatctatggaatgaccttcgcacttatgcgggtagaggatctggagaaaagcttctatcacaagaagacgataaagaatgaggcgaattttttcttccagagcctgaaaattcaagacacaggtcattacctttgtttttattacgatgccagttatcggggcagtctgctgagtgatgtgctgaagatctgggtgacagacacatttccaaagacgtggctgctagctcgcccatcagccgttgtgcaaatggggcagaacgtatctttgaggtgtaggggcccagtggatggagtgggtctcgcgctgtataagaagggagaagataaacccctgcagtttttggacgctacatccatcgacgacaacacatccttcttcctcaacaatgttacctacagcgacacaggaatttactcctgtcactatctactgacctggaaaacatccatccggatgcccagccacaatacggtggaattaatggtggtggataaacctccaaagcctagtctgtccgcgtggccttccaccgtcttcaaacttgggaaagccatcaccctgcagtgccgggtatctcatcctgtgctggaattctcgctcgagtgggaggaaagggaaaccttccagaaattctcggttaacggcgactttatcatcagtaacgtggacggcaagggcacaggaacctacagttgctcttaccgggtggaaacccaccccaatatctggtctcaccggtcggaaccccttaagctgatgggacccgctggatatttaacctggaactacgtgcttaacgaagcgatacgcttgtcattaattatgcagctggttgctttgttgctggtggttctgtggatacgatggaagtgccgtagactccgaattcgcgaggcctggctcctgggcactgctcagggagtgaccatgctgttcattgtgaccgccctgctgtgctgcgggctgtgcaacggtgtgctcatcgaagaaactgagatcgtgatgcctacgcctaagcccgaactgtgggcagagaccaactttcccttagccccttggaaaaacctgacgctttggtgtcgatctccaagcggttccactaaggagttcgtacttcttaaggacggcaccgggtggatcgccacacgccccgcgtccgaacaggtacgggccgcctttcctctaggcgcactgactcagtcccacactgggtcctaccactgtcattcctgggaagagatggcggttagtgagccctccgaggcacttgaactcgtaggtaccgatattctccccaagcccgtgataagcgcttcccctacaatcaggggccaggagctgcagctgagatgtaaggggtggttggctggtatgggattcgcactatataaagagggtgagcaggaacccgtacagcagctgggggccgttggccgcgaggcgtttttcacaattcagcggatggaagataaagacgagggaaactattcctgtagaacacacacagagaagcgaccttttaaatggtcagagccttccgaacctttagaactagtgataaaggagatgtaccccaaacctttcttcaaaacatgggcctccccagttgtgactccaggtgctagggtcacgttcaactgcagcaccccgcaccagcatatgagcttcatactgtataaggatgggtccgagatcgcatctagcgacagatcctgggcgtcgcctggggcttcagccgcccacttcttgataatttccgtcggcattggggatggtggtaattattcctgccgatactacgacttctctatatggagcgaaccctcagatcccgtggaactggtcgtgactgagttctatcctaaaccaacgctgctggcccaacctgggccagtcgtattccccggcaaaagtgtcattctgaggtgccagggtacttttcagggaatgcggttcgcattgctccaggagggtgcgcacgtacccctgcagttcagatctgtgagcgggaatagtgcggatttccttttgcacactgtcggcgcagaggacagtgggaactactcctgcatctactatgagactactatgagcaatagggggtcttatcttagtatgcctcttatgatctgggttaccgatacttttcctaagccctggttatttgcggagccaagtagcgtggtgcctatgggccagaacgtgacactgtggtgtagaggcccagtccacggagtcggatacatccttcacaaagaaggcgaagccacttcaatgcagctctggggctcaacgtctaacgatggagctttccctattactaacatctctggcacttcgatggggaggtattcctgctgttatcaccccgactggacatcttcgattaagatccagccatcaaacaccctcgagctgcttgtgaccggtctgctccccaagcctagcttgctagctcaacccggaccaatggtagcccctggagagaacatgacactgcaatgccagggggagctccccgactctaccttcgtactcctcaaggaaggtgctcaagagcctcttgagcagcagcgcccttccggctatcgagccgacttttggatgcctgccgtccgaggcgaagatagcggcatttacagctgcgtgtactacctcgattccacaccttttgccgcaagcaatcattccgacagcttggagatctgggtgaccgacaaaccccctaaaccatcactgagtgcgtggccgtctacaatgttcaagcttggtaaagatatcactctccagtgtagggggcctctgccaggcgtcgagtttgttcttgaacatgacggcgaagaggctccgcagcagttcagcgaagatggcgatttcgtcattaacaatgtagaaggcaaagggattggcaactacagttgctcttaccggttgcaagcctaccctgatatttggtctgaaccttcagaccccctggagttggtaggtgccgccggaccagtagctcaggaatgcacagtggggaatatcgtgcgctcctccctcatcgtggtggttgtggtggcgctaggtgtagttcttgccatcgagtggaagaaatggcctagactgagaacacgaggctccgaaactgatggcagggaccagactatcgctctggaggagtgcaatcaagaaggagagccggggactccagctaattcaccaagcagcactagtcaacgaatttccgtcgaattaccagtaccgatctag

SEQ ID NO: 120467 - DNA, 3984 bp, synthetic construct
  misc_feature 1..3984: note = Description of Artificial Sequence: Synthetic coding sequence
  source 1..3984: mol_type = other DNA
atgacgttggaccgtcccggtgagggagcaactatgttgaaaacctttaccgttctgctgttttgtattttaatggatcctcaacccgaactgtggatcgaatccaactacccgcaagcaccctgggaaaacattacactgtggtgccgctctccctcccggatcagcagcaagtttctcctcctgaaggataagactcagatgacttggatccgccctagtcacaaaacttttcaggtctctttcctgataggggccctaaccgagtccaacgccggactctatcggtgctgctactggaaggaaaccggttggagcaagcccagcaaagttttagagttggaagcccctggccagttaccaaagcctatcttttggattcaagcagagacccctgctttgcctggttgcaatgtgaatatcttgtgtcatggttggctccaggacttggtctttatgttgtttaaagagggctatgcggagccagtagattatcaggtccctacaggaactatggctatcttctcaatcgacaatctgacccccgaagacgaaggagtatacatttgcaggacacacatccagatgctacccacactgtggtccgaacccagcaatcccttgaagctagtcgttgctggcttgtatcctaaacctacccttaccgctcatccgggacccatcatggctccaggggaaagtttgaatctgcgctgtcaaggccccatatacgggatgacctttgccctcatgcgggtagaggacttggagaagagcttctatcataagaagacgatcaagaacgaggctaacttttttttccaaagcttaaaaatccaggatacaggacattatctgtgcttctactacgatgcatcgtatcgagggtctctcctgtccgacgtgcttaagatctgggtgaccgacaccttccccaaaacatggctgctggcacgcccctccgcagtggttcagatgggtcagaacgtgtcattgcggtgtcgaggaccagtcgatggggtgggactggcattgtacaagaaaggtgaggacaagcccctgcagttcctggatgctacgtcaatcgacgacaatacttccttcttcctcaataacgttacatacagcgacactggaatttactcttgccattacctcctgacttggaagaccagcatccgcatgccctcccacaataccgtggaactgatggtcgtagacaagcctcccaaacctagcctgagcgcttggccatccaccgtgttcaaactagggaaagcaattactctccagtgtcgagtgtctcatcctgtcctggaattctcactcgagtgggaggaacgcgagacatttcagaagttttctgtgaatggggacttcataatttccaacgtggatggaaaaggcacaggcacctacagctgttcttatagggtggaaacacacccaaacatctggtcccaccgcagcgagccgttaaagctgatgggcccggccgggtatctgacctggaattatgtgttgaacgaagctattaggctcagcttaattatgcagctggttgcgctactgctggtggtactttggattaggtggaaatgcaggcgcctccgcatccgcgaggcgtggcttctgggcacagcccagggcgtgacgatgttgttcatagtgactgccttgctctgctgcggactgtgcaacggagtgctcatcgaggagaccgagatcgttatgccaaccccgaaaccggaactatgggcagagaccaactttcccctcgctccttggaagaacttaaccttatggtgtcggtcaccgtccggctcaaccaaagagtttgtgctgctgaaggacggaacaggctggattgccacccgccctgcaagtgagcaggttagggccgccttccccctgggggctctgacccagtcacacaccgggtcctaccactgccactcttgggaagaaatggccgtttctgaacctagcgaagccttggagttggtcggcaccgatatcttgccaaagcccgtgatatctgccagtcccaccatccgcggacaggaattgcagctccggtgcaagggctggcttgccggtatgggatttgccctttataaagagggagaacaggagcccgtgcagcagcttggggcagtgggccgcgaggcgttttttaccatccagcgcatggaggataaggatgagggcaattactcttgtcggacgcacacagagaagcgtccattcaaatggtcggaaccgagtgaaccactcgaactggttattaaggagatgtacccaaagcccttttttaagacctgggcttccccagtggtaacacccggcgctcgtgtaacttttaactgctctactccccaccagcacatgagctttatactgtataaggatggatcagaaattgcatctagcgatcggtcgtgggcgtcaccaggcgcaagcgccgcccactttctgataatctcggtgggcatcggagatggggggaactactcttgtcgctactacgacttctcaatttggtccgaaccctccgatcctgtggagctggtggtcacagaattttaccccaagcccacactcctcgcccagcctggcccagtggtctttcccggcaagagcgttatcttaagatgccaggggacctttcaggggatgcgctttgctctcttgcaagagggcgcccatgtgccactacaattcagatctgtaagcggcaactcggctgacttcctactccatacagttggggccgaggactccggtaattattcatgcatttactacgagactacaatgagcaataggggatcctacctgagcatgccacttatgatctgggtgacagatactttccccaaaccgtggctgtttgccgagccaagttccgttgtgccaatggggcagaacgtgacactgtggtgtaggggtcccgtccacggagtaggctatattttgcacaaagagggagaggccacatcgatgcagctctggggatccacttcgaatgacggagcttttcctattacaaatatttcgggcacaagcatgggacgatactcttgttgttatcaccccgactggacgtcatctattaaaattcagccttcaaatacgctagagttactggtcacaggcctgctgcccaaaccttccctgctggcccagcccggacccatggtcgcccccggggagaacatgacccttcaatgtcagggtgaactgcccgattccacctttgtcctccttaaagaaggcgcccaggaacccctcgagcagcagaggccatcaggctacagggctgacttctggatgcctgctgtccgcggtgaggacagcggtatatactcctgcgtctattacctggattccaccccctttgctgcctccaaccattctgacagtctggagatttgggtgacagataagccccctaagccgtccctgtccgcatggcctagcaccatgttcaagcttggaaaggatatcactttgcaatgccgaggccctctgcccggcgtggaattcgtcctggagcacgacggggaggaggccccccagcagttctctgaggatggtgactttgttatcaacaatgtggagggcaaaggaattggtaactattcgtgttcgtaccggctccaggcttacccagacatttggagtgaacctagcgatccactagaactcgtaggtgcagccgggcccgtagcccaggagtgtaccgtgggaaatatcgtccgatcgtcactcattgtggtagttgtagtcgcactcggagtggtcctggcaatcgagtggaagaaatggcctcgccttcggacaaggggctcggagactgacggccgcgaccaaactattgccttagaggaatgcaaccaggagggagagcctggaacccctgccaactccccctctagtacttcccagcgcatttctgtagagttacccgtcccaatttag

SEQ ID NO: 120468 - DNA, 3645 bp, synthetic construct
  misc_feature 1..3645: note = Description of Artificial Sequence: Synthetic coding sequence
  source 1..3645: mol_type = other DNA
atgaagtgtttctttcccgtactgagttgtttggccgtgctgggggtggtgtccgcccagcgacaggtaacagtgcaggaaggacccttatatcgtaccgaagggagccacatcacaatctggtgcaacgtgtcaggttaccagggcccaagcgaacagaacttccaatggagcatctacttgccttcctcaccagagcgggaagtccagatcgtcagtaccatggatagctccttcccatatgccatttatactcagcgggttagaggcggcaaaatcttcatcgagcgcgtccaggggaattcaaccctgctgcacattacggatttacaggcgcgcgatgccggcgagtacgagtgtcatactcctagtactgataagcagtattttgggtcttattccgccaaaatgaatctggtggtcattccggatagtcttcagacgaccgctatgccacagactctgcaccgcgtagaacaagacccactggaactcacttgcgaagttgcaagtgaaacgattcagcactctcacctctccgtggcctggcttaggcaaaaggtcggcgagaaacctgtggaggtaataagcctgtcacgagattttatgctccattcatcgagcgaatacgctcaaagacagtccctgggcgaagttcgtctggacaagcttggtcggaccacgttccgtcttacaatcttccatctgcagcccagcgaccagggggagttctattgtgaagcagcagagtggatccaggaccccgatggcagctggtacgccatgaccagaaagcgttccgagggcgccgttgtcaacgtccagcctaccgataaagaattcacagtaagactggaaaccgaaaaaaggcttcacacagtgggggagcccgtggagtttaggtgtattttagaagcccagaatgtgcccgaccggtatttcgctgtgagctgggcctttaacagctccctcatcgcgaccatgggccctaatgcggtcccagttctcaattcagagttcgcacaccgcgaggcacggggacagctgaaggtcgcgaaggagtcggattccgtgtttgtcctaaagatataccatctccgccaagaagatagtggaaagtacaactgccgcgttactgagagggagaaaaccgtaactggcgaattcattgataaggagtctaaaagacctaagaacatcccaataatcgttctgccactgactgataactgggtcgttaaggtgcctcagcatcaccagctgttatcccagggtcatctggaatcatcaatttctgtggaggtcgcctctaacgcctctgttattttggagggggaagacttgcggttctcttgtagcgtgaggacagcgggaagaccacaggggaggttttccgtgatatggcagttagtggacaggcagaatagaaggtctaatataatgtggctggatcgggacgggaccgttcagccagggagctcctattgggaaaggtcatccttcgggggtgtccaaatggagcaggttcagccaaattcattttcactcggaatattcaatagccggaaggaggacgaaggacaatacgaatgtcatgtgacggagtgggtgcgggccgtagatggtgaatggcagattgtgggggaacggagggcctccacccccatctctatcacggcacttgagatggggttcgctgttacagccatttcccgcaccccaggggtgacttattccgacagcttcgatctacagtgcatcatcaagccgcattatcccgcctgggtgccagtgtcagtgacctggagatttcaacccgtcggcaccgtggagtttcacgatcttgtgacattcactagagacggaggggtgcagtggggagaccgcagctcctcgtttcgcacgcgtacggccatcgaaaaagcagagtcctcaaataatgtgagactcagtatctctcgggcaagcgacactgaagcaggaaaataccaatgcgtggccgagctgtggcggaagaattataacaatacttggacgagactggcagagcgcacctctaatcttctcgagattagggtgctacagcccgtgactaaactgcaggtcagcaagagcaagaggaccctgactttggtcgagaataaacccattcagctcaactgttcggtgaagagccagacttcccaaaattcccattttgcagtgctatggtacgtgcacaagccatctgacgctgacggcaaattgattctgaaaactactcacaactcagccttcgaatacggaacttatgcggaagaggaggggctacgggccaggctgcaatttgaaaggcacgtatcgggtggcctgttcagccttacagtacagcgcgctgaagtaagtgattctggtagctactattgtcacgtggaagagtggctgctgagccctaattacgcttggtacaaactggccgaggaggtctctgggcgcactgaggtaactgtaaaacagcctgatagcaggcttaggttaagccaggcccagggcaacctgagtgttctcgagacccgccaagtgcagctggaatgcgtagtgctgaaccgaacctccattactagtcagctgatggtggagtggttcgtttggaaacctaaccaccccgaaagagaaactgttgcgagactgtcccgcgatgctacctttcactatggcgaacaggctgctaagaataatctgaagggaaggctccacctggagtcaccatcccctggcgtctatcgacttttcattcaaaatgtggccgtacaggacagcggtacttactcctgccatgtcgaggagtggttgccttcacctagcgggatgtggtacaagcgagccgaagacactgctggccagaccgcactcacagtcatgaggccggatgcatctctccaagtcgataccgtggtgccgaatgccacagtcagcgaaaaagccgctttccagcttgactgtagcatcgtcagtagatctagccaggacagccgattcgccgtcgcctggtatagcctcaggacaaaggccgggggtaagcgtagttctcctggacttgaggaacaggaggaggagcgcgaggaggaggaagaggaggatgatgatgatgacgatgatcctaccgaacggactgctctgctgagcgtcggccccgatgctgtgttcggaccagagggaagtccctgggaggggcgactgagatttcagcgactcagtcccgtactgtacaggttaaccgtgctgcaggcctctccccaggacactggaaattattcgtgccacgtcgaagagtggctgccatccccccagaaagagtggtataggctcactgaggaagaatccgccccaatcggaatccgggttctcgacacttccccaacactccagtccataatttgtagtaacgacgccctcttttactttgtgtttttctaccctttccccatctttggtatcctgatcataacaatactcctggtgcggtttaagtccagaaacagctccaagaacagcgacggtaaaaacggggttccccttctgtggatcaaggaaccacatttaaactacagccctacgtgtttggaaccaccagtcttaagtattcaccccggggcgatagactag

SEQ ID NO: 120469 - DNA, 3645 bp, synthetic construct
  misc_feature 1..3645: note = Description of Artificial Sequence: Synthetic coding sequence
  source 1..3645: mol_type = other DNA
atgaagtgtttcttcccagtactgtcctgtctcgctgtattgggggtcgtgagtgcacagaggcaagtgaccgtgcaggagggaccactctacaggacggaaggttctcatatcacaatctggtgcaatgtgtctggctaccagggccccagtgaacagaacttccagtggagtatttatctgccctcctcccctgaacgcgaagtgcaaatcgtgagcactatggattcaagcttcccatatgccatatatacgcagcgagtaaggggcgggaaaatctttatagaacgcgtgcagggtaacagcaccctcttgcatataactgacctccaggctcgagacgcgggtgagtacgaatgtcacacgccatccacagataagcaatattttggctcctactctgcgaaaatgaatctggtcgtgatacccgattccctgcagacgaccgctatgccacagacactccatcgagtggaacaggaccctctggaactgacatgcgaggtcgcttcggagaccatccagcattcccatctgagtgtggcttggctgagacaaaaggtcggggagaaacctgtggaagttatcagcctgagccgggacttcatgctccattcctcgtcagagtatgctcagcgccagtccctgggagaggtgcggctggataagctaggaaggaccactttccgcctcacaatattccacttgcaaccatccgaccaaggagagttctactgtgaagccgctgagtggattcaggacccggatggctcatggtatgccatgacccgtaagcgctcagagggggcagttgttaacgtacagccaaccgacaaagaatttaccgtgcgccttgaaacagaaaagcgactgcatacagtcggagagcccgtagaattccgttgcattttggaggcgcagaacgtgccggatagatattttgccgtgagttgggcctttaatagctccctcatcgcaacgatgggaccaaatgcagttccggtcctgaacagtgagtttgctcaccgagaggccaggggtcagctgaaagttgctaaagagtctgactctgtgtttgtactcaagatctaccacttgcggcaggaggacagtggaaaatataattgcagggtgaccgagagggagaagacggtaactggggaattcattgataaggagagcaaaaggcccaagaacatccctataatcgtgctgcctctgactgacaactgggtcgtaaaagtcccccagcatcatcagctgctgtctcagggccacctggaatctagcatttccgtggaggtcgcatcgaacgccagcgtgattttggaaggcgaggatctccgtttctcctgcagcgtcagaacagcaggtagaccgcaggggcggttcagtgtcatctggcagctcgttgaccgacaaaacagacggtctaacatcatgtggcttgatcgtgatggcacagttcaacccggcagctcttattgggagcgttccagcttcggaggagtgcagatggagcaggttcagcccaatagcttctcattgggcatcttcaatagtagaaaggaagatgagggccagtatgagtgccacgtaactgagtgggtacgtgcggtggacggcgaatggcaaattgtcggggagcggcgggcctctacccccatcagcattactgcactggagatgggttttgccgtgaccgctatttccaggactccaggggttacatactctgattctttcgatcttcagtgtatcataaaaccacactacccggcctgggtgcctgtgagcgtgacttggcgctttcagcccgtcggcactgtggagttccacgacctggtcacttttacgcgggatgggggagtgcagtggggagataggagctcctcctttaggacacgcaccgcgatcgaaaaggctgaatcctcaaataacgtacgactgtccatttcgcgcgcatccgatacagaagctggcaagtaccagtgcgtggccgaactctggagaaaaaattacaataatacctggactagactggccgaacgcacctccaatctactggagattagagtgcttcaaccagtgacaaagctgcaggttagcaagtccaaaaggacgctgacactggtggagaataagcccattcagctgaactgctctgtgaaatcgcagacaagtcagaacagccacttcgccgttctctggtatgtccataaaccatccgacgcagacggcaagcttatcctgaaaacaacacataacagtgcattcgaatatggcacctacgcggaggaggaaggacttcgagcacgactccagttcgagcgccatgtgtctggtggactgttctcactaacagtccaacgggctgaggtctccgactccgggtcatactattgtcatgtagaggaatggctgttgagcccaaactatgcatggtacaaactggccgaagaggttagcggtaggacggaggtcacagtcaaacaaccagatagtcggctgcgactgagccaagcgcaaggaaacctttctgttttggagaccagacaggtgcaactggagtgcgtggtgttaaaccgaacaagcatcacctctcagctgatggtggagtggtttgtgtggaagcccaaccatccagagcgcgagaccgtggccaggttgtctcgagacgcaaccttccactatggtgaacaagctgctaagaacaatttaaaagggcgcttacaccttgaaagcccatctcccggagtgtaccggcttttcatccagaacgttgccgtgcaagactctggtacatacagttgccacgtagaggagtggctgcccagtccttctggtatgtggtataaaagggcggaggacacagcaggccagaccgctctgacagtgatgaggccagacgcaagcttgcaagtcgatactgtcgtaccgaacgccacagtctccgagaaagccgcctttcagctggattgctcaatagtatctcgcagcagccaggattcccgctttgccgtagcctggtacagtctcagaactaaagcaggcgggaagcgcagctcaccagggctggaagagcaggaagaggagagggaggaagaggaggaggaagatgacgacgacgacgacgaccccaccgagaggacagcactgctttctgtcggcccagatgccgtgtttgggcccgaaggctccccctgggagggacgcctacgctttcagcgcctgagccctgtattgtaccgtctgaccgtgctacaagcctctccccaggacaccggcaactattcttgccacgtagaggaatggcttccgtcaccccagaaagagtggtatagactgacagaagaagaatccgcccccattggcattagagtgctggacacttctcccacgctgcagtctataatatgctccaacgatgccctcttttattttgtcttcttctatccatttccgattttcggcatcctgatcatcacaatcctgctggtgagattcaagtctcggaatagctcgaagaactccgacggaaagaacggcgtccctttactgtggattaaggagccacatctgaactattctcctacctgtctggagcctcccgtactgtctattcaccccggggccattgattag

SEQ ID NO: 120470 - DNA, 3585 bp, synthetic construct
  misc_feature 1..3585: note = Description of Artificial Sequence: Synthetic coding sequence
  source 1..3585: mol_type = other DNA
atgaagtgtttttttcctgtattaagttgcctagccgttctgggagtggtgagcgcgcagcgtcaggtgaccgttcaggaggggccattgtaccgaaccgagggtagtcacataaccatctggtgcaacgtatccggctaccagggcccgtccgagcagaacttccagtggagcatctatctgccttcctcgcctgaaagggaggtgcaaattgtaagtacaatggattcatcgtttccctacgctatttacacgcagagggtgaggggggggaaaatcttcattgaacgggtccaaggaaactctactttgttgcatatcacggacctgcaagcacgggacgcaggagaatacgagtgtcatacccccagtaccgataaacaatattttggtagttactctgctaaaatgaatttagtggtgatcccagacagtctgcagacaaccgctatgccccaaaccctccacagagtggagcaggacccccttgaattaacatgcgaggtcgctagcgagactattcagcactcacatctgtctgtagcgtggttgcggcaaaaggtgggggagaagcctgtggaggtcatctctctgtcccgcgatttcatgcttcacagctcctcagagtatgctcagcgtcagagcctgggagaggtgcgtttagacaagctgggtcgcaccacatttcggctcacaatctttcatctgcagccatctgatcagggagagttttactgcgaagcggccgagtggatccaggacccagacgggtcatggtatgcaatgactcgcaagagaagtgaaggtgccgtggttaatgtgcaaccgaccgacaaagagtttaccgtgcgcttagagactgaaaaaagactgcacaccgtgggcgaaccggtggaattcaggtgtattctggaagcccaaaacgtaccagacaggtatttcgctgtcagttgggcctttaatagtagcttgatcgccactatggggcccaacgccgtgcccgttttaaacagcgagtttgcacatagagaggcccgcggccagcttaaggtcgccaaggagtcggacagcgttttcgtgttgaaaatctaccacttaaggcaggaagattccggcaaatataactgtcgggtgaccgagcgtgagaaaaccgtgactggcgaattcatcgacaaggaatcaaagagacctaaaaatatcccgatcatagtcctaccattgaaatcctccatctccgtcgaagttgcatcaaacgcgtccgtcattctggaaggagaggacttgaggttttcatgcagcgtacgcactgccggccgcccccagggtcgcttttcagtaatatggcagctggtcgacaggcagaataggcgctccaatattatgtggctggatagggatggcaccgtccagcccgggtctagttactgggagcgctccagctttggaggagttcagatggagcaggttcagcctaatagcttctctctcggcatctttaactccagaaaggaggatgaaggccagtatgagtgccatgtcactgagtgggtgcgcgccgtggacggagagtggcagatagtgggagagaggagagcctccacacctatttccatcactgctctcgagatgggctttgctgtgaccgcgatttcccggaccccgggggtcacatattccgactccttcgatcttcagtgtatcatcaagccgcattacccagcctgggtcccagtcagcgtgacatggcgatttcagccagtgggcactgtcgagtttcacgatctcgttacattcaccagagacggcggcgtccagtggggcgatcgcagttcttcctttcggacccggacagccatcgaaaaggcagagagcagcaataatgtgaggctgagcatcagtcgagcttctgacacagaggccggcaagtaccagtgtgtcgccgaactatggcgcaaaaactataacaacacatggactcgacttgcagaacgcacctccaaccttttggagatacgcgtgctccagcctgtaaccaaactgcaggtgtccaagtcaaagaggacgctgaccctagtggaaaacaaacctatacagctgaattgttccgtcaagtcccagacttctcagaacagtcatttcgctgtcctctggtatgtgcacaaaccatccgatgccgatgggaagctgattcttaaaacaacccataactcggcttttgagtatggaacgtatgcggaggaggaagggcttagggccaggctgcagttcgagagacacgtgagtggtggtcttttcagcctgacagttcagcgcgctgaggtatccgattccggttcttattactgtcatgtcgaagaatggctgctgtccccaaattacgcctggtacaagctggcagaggaagtttccgggcgaaccgaagtgactgtgaagcagcccgactctcgattaagactgtcccaggcccaggggaacctgtcagtgttggaaacacggcaggtacagctcgagtgcgttgtgctcaacagaaccagtattaccagccagttaatggttgaatggtttgtatggaagcctaatcacccagagagggagactgtggcccgcttatctcgggatgccaccttccattatggtgaacaggcagccaagaataacctgaaaggtagactgcacctggagtctcccagtcccggcgtttaccggctcttcattcagaacgtggctgtccaggacagtggaacatacagctgtcacgtggaggagtggcttccgagtccatctgggatgtggtacaagagggccgaggatactgccggccagacggccctgacggttatgcggccagatgccagcctgcaagttgacaccgtggtgcctaacgccaccgtctcagagaaggccgctttccagctcgattgttcaattgtctcacggtccagtcaggactcccggtttgccgtagcatggtattccctgagaactaaggcaggtggcaagagatcgagcccgggactcgaagagcaggaagaggaacgggaagaagaagaagaagaggacgacgatgacgatgacgaccccaccgagagaactgcgttactgagtgtgggtcctgacgccgtttttggccccgagggttccccgtgggagggccgtctgaggttccagagactgtctcccgttctgtaccggctcacagtgttacaagcatctccccaagatacaggcaattacagctgccacgtcgaagagtggctgcctagccctcagaaggagtggtatcgcctgaccgaggaggagagtgcccccattgggattcgcgtgcttgacacatcccccactctccagtcaattatttgtagcaacgacgccctattttactttgtatttttttaccccttcccaatctttggcattctcatcattacaatcctgctggtgcgctttaaaagtcggaatagcagcaaaaactctgacggaaaaaacggcgtgcctctcctgtggataaaggagcctcacctcaactattctcctacctgcctcgaaccccccgtgctcagtatccatccaggcgctatcgattag

SEQ ID NO: 120471 - DNA, 726 bp, synthetic construct
  misc_feature 1..726: note = Description of Artificial Sequence: Synthetic coding sequence
  source 1..726: mol_type = other DNA
atgggaaccgcatctcgctctaatatcgctcgccacctgcagactaatctcatacttttctgtgttggagccgtgggagcgtgtactttatcggtgacacagccgtggtatctggaggttgattatacacacgaagctgtgactatcaagtgtacattcagtgccacgggttgcccaagtgaacagccaacgtgtctctggtttagatatggagcccaccagcctgagaatctctgtctcgatggctgcaaaagcgaagccgacaaattcaccgtgcgggaagccctaaaggaaaatcaggtgtcactgactgtcaatcgagtgacctctaacgacagcgcaatctacatctgtggtatagcgttcccgtccgtcccagaagcccgggcaaaacagaccggcggtggaaccacgttggtagtcagagagattaaactcctgtccaaagaactaagatcttttcttaccgccctagtgtcattgctctccgtgtatgttactggggtctgtgtggcatttatactgcttagcaagtccaagtcaaatcctcttcgtaataaagaaatcaaggaagatagccagaaaaagaagtctgcacgacgaatctttcaagaaatcgcccaggagctgtatcacaaacgacacgtggagaccaaccagcagagcgagaaggacaataacacctatgaaaaccgtcgcgttctatctaactacgagcgcccctag

SEQ ID NO: 120472 - DNA, 1842 bp, synthetic construct
  misc_feature 1..1842: note = Description of Artificial Sequence: Synthetic coding sequence
  source 1..1842: mol_type = other DNA
atgggcgcactaagacccacgctgctgcctccctctcttccattgttacttctgctgatgctaggcatggggtgttgggcacgcgaggttctggtaccagaagggcctctgtacagggtggccggcaccgctgtcagcatttcatgtaatgtgacaggctacgagggccccgcacagcagaacttcgaatggttcctctaccggccggaagctccggacactgcgctgggaattgtcagcacaaaggatacacagttctcttacgccgtcttcaagtcccgggtggtcgctggggaggttcaggtccagcgcttgcaaggtgacgctgtcgtgctcaaaatcgcacgcctgcaggctcaagacgcaggtatatatgagtgtcataccccctccaccgatactcggtatcttggatcttattcaggaaaagttgaactacgcgttttgccagacgtgcttcaggtctctgccgccccacccggcccccggggtagacaggctcctacgtctccgcccaggatgacagtgcatgagggacaggaattggctctgggttgcctagcaaggaccagtactcagaagcatacacacctggccgtctcatttggaagatctgtccctgaggctcctgtaggccgcagtacgctgcaagaggtcgtcgggatccgcagcgatctcgctgtggaggcaggcgccccctatgctgagaggctggcagccggagagttgcggttagggaaagagggaaccgataggtatcggatggttgttggcggggcccaggcaggagacgcagggacttaccactgtacggccgccgagtggatccaggacccagatggcagctgggcacagatagcagagaagcgggcagtgttagctcatgtggatgtccagacactgagctcccaattggcagtcaccgtcggacccggtgagaggagaatcggtccgggggaacctcttgagctcctttgcaacgttagtggggcactaccccctgcagggcgacatgcagcctattcggtgggatgggagatggccccagcaggcgcgcctggtcccggccgactggtcgctcaacttgatactgagggtgtgggttccctcggcccaggctacgagggccgacacattgctatggaaaaggttgccagcagaacctaccgcctgcggctggaagccgcacgaccaggtgacgctgggacttatcgctgtctagctaaggcctatgtccgtgggtcgggaacccgcctccgcgaagcagcttcagcccggtcccgtccactcccagtgcacgtgagagaagagggtgtggtgctcgaagccgtggcctggctggccgggggcactgtgtacagaggcgagactgcatccttgttgtgcaacatcagcgtgcgaggcggcccacctggcctgcgacttgccgcatcctggtgggtagagcgccccgaagacggtgagctttcttcagtcccagcacaacttgtcggaggcgtcgggcaggacggcgtggcagagttaggagtgaggcccggcggcggcccagtctctgtggagctggtgggccctaggtcccatcgcctgcggctccattcactgggacctgaagacgaaggggtgtatcactgcgccccatccgcttgggtgcagcacgccgattattcctggtatcaggcgggcagcgcacggtctggacctgtgaccgtttacccgtacatgcatgctcttgataccctatttgtccctttactggtgggaacaggggtcgccttggtgacaggtgcgacagtcctgggaactatcacctgctgcttcatgaaacgcttgcgcaagcgttag

SEQ ID NO: 120473 - DNA, 1581 bp, synthetic construct
  misc_feature 1..1581: note = Description of Artificial Sequence: Synthetic coding sequence
  source 1..1581: mol_type = other DNA
atgggtgctctgcgccctactctcttacctccatctctcccattgttactcctgctgatgctggggatgggctgctgggcaagggaggtactggtgccggaaggcccactttatcgcgtggccggaacagctgtgtcaatttcatgtaatgtgaccggatacgaaggccccgcccagcaaaacttcgagtggttcctctaccgcccagaagcccccgataccgcgctaggaattgtgtctactaaggacacacaatttagttatgcagtctttaaaagccgtgtggttgcgggcgaggtacaggtccaacggctccagggggatgctgttgtgctcaagattgctagactccaggcccaggatgcagggatatacgaatgccatactcccagcaccgacacacgatatctcggttcatactctgggaaggttgagctccgcgtgctgcccgatgttctgcaggtctcggcagcgccgccagggccaagagggaggcaggcacctaccagtcctcctcgcatgaccgttcacgaagggcaggaactcgccctcggctgcctagctcggacgtccacccagaaacacacgcacctggccgtgagtttcggtcgttccgtcccggaggcccccgtgggccgtagcacactccaggaagtcgtggggattcgcagcgatcttgctgtggaggccggcgccccttacgccgagagactcgccgccggggaattacgcctcgggaaggagggtactgaccgctataggatggtggttggaggagcccaggctggcgacgctgggacctatcactgtacagccgccgaatggattcaggatccggatggcagttgggcacagatcgctgagaagagagccgtgcttgcccatgtggatgtgcagaccctcagttcacagctggccgtcaccgtcgggccaggcgaaaggcgcatcggacctggggaacctctggaattactgtgcaacgtgtccggagccttgccacccgccgggcggcacgccgcatacagcgtgggatgggaaatggcaccagccggcgcccccgggccgggccgcttggtagcccaactggatactgaaggtgtgggaagcctgggccccggttatgagggacgccacattgcaatggaaaaggtcgcctcgagaacttatcggctgcgtttggaggctgcacgcccgggagacgcaggcacgtataggtgcttggctaaagcgtatgtgcgaggcagcggcacgcggcttcgggaagcagcgagcgcccgctccaggcctcttcccgttcacgtcagagaagagggagtagtcctggaggctgtggcatggctggcaggaggcactgtttatcgcggcgaaaccgcctctctgctgtgcaacattagtgtgagaggcggtcctcctgggctgcgatctgcaagatccgggcccgtcaccgtgtatccatacatgcacgctctggacacactgttcgtgcccctcctagtgggcaccggcgtcgccctggtgaccggcgctacggttctcggtacaattacctgctgtttcatgaagcgtctgcggaagcggtag

SEQ ID NO: 120474 - DNA, 1842 bp, synthetic construct
  misc_feature 1..1842: note = Description of Artificial Sequence: Synthetic coding sequence
  source 1..1842: mol_type = other DNA
atgggggctcttcgtcccactctcctgcccccctctctgccactgctgctgctcctgatgctgggcatggggtgctgggcaagagaggttctggtgcctgagggtccactgtatagagttgctgggaccgccgtgtcaatctcttgcaacgtgacaggttacgaaggtcccgctcagcagaactttgaatggtttttgtacaggcccgaggcacccgatacagccctgggcattgtgtccacaaaggacacccagttttcttacgccgtgtttaaaagccgtgttgttgctggggaagttcaggtgcagaggctgcagggggatgccgtcgtgcttaaaattgcacgcctccaggcccaggacgccggtatctacgaatgccatacgccttctacagatactagatacctggggagctattctggaaaggtggaactccgagtgctaccagacgtgctgcaggtatcggccgccccaccaggacccagggggcgacaggccccaacgtcccctccccggatgacagttcacgaaggtcaagaactggctctggggtgcctcgcacggactagcacccagaagcatacccatctggcagttagctttggccgtagtgtaccagaggcaccagttggaagatcaaccctgcaggaggttgttggaatacggagcgacctcgccgtggaagctggggcaccctatgccgaacggctggcagcgggggaactgcggctgggcaaagaaggtactgatcgctatcggatggtcgtaggaggagcacaggccggcgatgctggaacatatcactgcacagcagctgagtggattcaggatcctgatgggtcttgggctcaaatagccgaaaaaagagcagtgctggctcacgtggatgttcagacgttgtcttcccagttggcagttacggtaggccctggtgagagacgaatcggccctggcgagccactagagttattatgcaatgtgagtggcgctctgccacccgcaggtagacacgcagcctatagtgtgggttgggagatggcccccgccggcgcgccagggcctggtcgcttagtcgcacagctcgacactgaaggagtgggtagtttgggccctggctacgaaggccgacatattgctatggagaaagtagctagtcgcacgtatcgtttacggcttgaggccgccagaccaggcgatgccggaacataccggtgtcttgctaaggcctacgtgcgcggatcaggcactagacttcgggaagctgcttctgctcggtctaggccgctgcccgtacatgtgcgtgaagagggggtcgtgctggaggctgttgcatggcttgccggcggcacagtttatcgaggggaaacagcctccctcctctgtaatatctctgtccgtggagggccacccggactgcgcctagctgcatcatggtgggtggagcgccctgaagatggcgagctgagttccgtgccagctcaacttgtcggcggtgtgggccaggatggtgttgctgaactcggcgtacgcccaggcggcgggcccgtttcggtcgaactagtcggcccgagatctcaccgcctccggcttcactcactcgggcccgaagacgaaggagtataccattgtgctccaagcgcctgggttcagcacgctgactacagctggtatcaggctggtagtgcaagatcgggccccgtcacagtttatccatatatgcatgccctggacacactttttgttcccttgctggttggtaccggagtggcactcgtgactggtgcgactgtgcttggaaccattacctgttgtttcatgaaacgacttcgtaagcgctag

SEQ ID NO: 120475 - DNA, 906 bp, synthetic construct
  misc_feature 1..906: note = Description of Artificial Sequence: Synthetic coding sequence
  source 1..906: mol_type = other DNA
atgggagcattgcgacccactctcctgccgcctagtttacccttgcttttgttgctcatgctggggatgggctgttgggcccgggaggtactggtgcccgaggggcctttgtacagggtagcagggaccgccgtcagcatttcgtgcaacgtgactggctacgaaggaccagctcaacagaatttcgagtggttcctttaccgccctgaggccccggataccgccttgggaatcgtctctacgaaggatacacagttctcctatgctgtgttcaagagccgcgtcgttgccggcgaagttcaggtgcagaggctacagggagatgcagtggtgttaaagatagctcgcctgcaggcccaggatgctgggatatacgaatgtcacaccccttcaaccgacaccaggtacctgggttcttacagtggaaaggtggagcttcgggtccttcccgacgtgctgcaggtcagcgccgctccacctggaccacgaggccggcaggcccctaccagcccccctcggatgaccgtccacgagggccaggaacttgcactgggatgcctcgcccgcacctctactcagaagcacacccatctagcagttagctttggccgtagtgtgcctgaggcccccgttggcaggagtacactgcaggaggtcgtgggaatacggtccgatctcgcagtcgaggcaggcgctccatacgccgagagactcgcagccggcgaacttcgacttggcaaggaaggcacagatcgctacaggatggtcgtaggaggagcccaggccggggatgcagggacctaccactgcaccgcagcagaatggatacaggacccggacggttcatgggcacagatcgctgagaaacgggccgtcctcgcacacgtcgacgtccagacgttgtag

SEQ ID NO: 120476 - DNA, 2154 bp, synthetic construct
  misc_feature 1..2154: note = Description of Artificial Sequence: Synthetic coding sequence
  source 1..2154: mol_type = other DNA
atggtgtggtgtttggggctagccgttcttagtctggttatcagccaaggcgccgacggacggggaaaacccgaagtagtgtctgtggtgggccgggcgggggagtctgtggtgcttggctgcgatctgcttcctcccgccgggagaccaccactccatgttatcgaatggctccgctttggattcctgctgcccattttcatccagttcggactatattcgccccgaatcgaccctgattatgtcgggagagtgcggctccagaaaggcgcctctttacagattgagggcttgcgtgtggaggatcaggggtggtacgagtgtagagtgttttttttggatcagcacatacccgaggacgacttcgccaacggttcctgggtgcatctaactgtgaacagtccgccccagttccaggagactcctcccgccgtacttgaggtacaagaactcgagcccgtgacgctgagatgtgttgccaggggcagcccactccctcatgtgacctggaagttaagaggtaaggacctgggacagggccaggggcaagtgcaagtgcagaatggaacattaaggataagaagagtcgaacgcggatctagcggtgtctacacatgccaggcaagctcaacagaaggttcagctacacacgccactcagctcctcgttctgggaccgccggtaatcgtggtgccaccaaagaattcgaccgtgaatgcttcgcaggatgttagcctggcttgtcacgcagaagcctaccctgctaacctgacctattcttggtttcaggacaatatcaatgtgttccacatcagccggctgcagcccagagtcaggattctggttgatggctccctgcgcctgctggctacccagcctgacgacgccgggtgttatacctgcgtgccgagtaacggcctcctgcatccaccttcagccagcgcgtacttgaccgtcctctaccctgcacaggtgaccgcaatgccccctgaaacaccactgcccatagggatgccaggagtgatccggtgtcctgtgagagccaatcctccgctgctctttgtttcatggactaaggatggcaaggcgctgcaacttgacaagttccccggttggagtcagggtacagagggttcgctcattattgccttggggaatgaggacgccctgggcgagtattcgtgcactccatataactcccttggtacggctggaccgtcccccgtcactagagttctgctcaaggcccccccagccttcatcgaacgtccaaaggaagagtattttcaggaagtgggccgcgagctgctaatcccctgcagcgcgcaaggagatccacctccagccgcccccccttctcccttgcccggcccaggcccactgttgcaatacctgtctctgcccttttttagggaaatgaatgttgacggcgactggcctccactggaagaaccttccccagccgccccccccgactacatggatacccgtcgctgccccacgtcaagctttctcaggagtccggaaacccccccagtgtctcccagggagagcttacccggtgcagtggtcggggctggagccacagccgagccaccatacacggcccttgctgattggacgctcagagaaagactgctgcctggtctgctacctgcggccccacggggatctcttacatctcagagcagtgggcgtggttctgcctcgtttttgcgcccaccaagcactgccccaagcgccggaggttcatatttatcaccagcgcccggggatacaagcagctgggcctctggacctgagcgctggccacggcgcgagcacgtggtcaccgtttctaaacgtcgaaacactagcgtggacgagaattacgaatgggattccgaattcccaggggacatggaactgttggaaacccttcaccttggtctggcatcaagccgactacgaccagaagccgagcctgagcttggtgtcaaaaccccagaggaaggctgtctgttgaacaccgcacatgtcacgggacccgaggctcggtgtgcagcgctgcgggaggagttcctggcatttagacgacggagggacgctacaagggctcgactgcccgcctaccgtcagcctgtgccccatcctgagcaagccaccctcctatag

SEQ ID NO: 120477 - DNA, 3492 bp, synthetic construct
  misc_feature 1..3492: note = Description of Artificial Sequence: Synthetic coding sequence
  source 1..3492: mol_type = other DNA
atggtttggtgtctcggactcgccgttctcagtctcgtgatctcacagggagctgacggccgaggcaagcccgaggtagtgtcagtggtgggaagggcaggagagagcgtggtgctaggctgcgatttgctccctcccgctgggcggcctcctcttcatgtcattgaatggttgaggttcggcttcctactgcctatttttatccagttcggcctgtattcaccacggatcgatcctgattatgtgggccgagtgcgactgcagaaaggggcatccctgcagatcgaagggctacgtgtggaagaccaaggctggtatgaatgtagggttttcttcttagaccagcatatccctgaggacgattttgctaacggtagctgggttcacctcaccgtgaacagtcctccacagtttcaggaaacacccccagcggtcctcgaggtgcaggaattagagccggtgacacttcgctgcgtcgcaagaggctcacccctcccccatgtgacgtggaaattgcgagggaaggatctcggacagggacaaggacaagtgcaggtgcagaacggcacgctaagaattaggcgcgtcgagagagggagcagtggagtgtatacgtgccaggccagctccactgaggggagcgcaactcatgcgactcaactgcttgtactgggccctccggtgattgtggtcccacccaaaaatagtacagtgaacgccagccaggatgtgtctttggcctgtcacgctgaggcctaccccgccaacctgacctactcctggttccaagataatataaatgtgttccatatctctcgcttacagccccgcgttaggattcttgttgatggctccctgagactattggcaacccagcctgacgacgcaggctgttacacctgtgtaccatctaatgggttgctacatccaccctcagccagcgcctacctcaccgtgctgtgtatgcctggagttattaggtgcccagtccgagcaaatcccccattgttgttcgtgtcctggactaaggatggaaaagccctgcagctggacaaattccccggctggtcacagggaaccgagggctccttgataatcgccctgggtaatgaagacgccctgggagagtattcttgcacaccttacaactccctgggaaccgcagggcctagtcccgtgacccgggtactgttaaaggccccaccagccttcatcgaaaggcctaaagaggaatactttcaggaggtcggaagggagctgctgattccttgcagcgcccagggtgatccgccacccgtcgtgtcatggactaaggtggggagggggttgcagggacaagcccaggtcgactccaacagtagccttatactgcgccccctgacgaaggaggcccatggccattgggagtgctccgccagcaacgcagtcgctcgggtggcaacatctaccaacgtctatgtcctcggcacatctcctcacgtggtgacaaacgtctctgtcgtcgctctcccgaagggggccaacgtcagctgggaaccaggcttcgacgggggctacctgcagagattctcggtgtggtatacccctctcgcgaagagaccggatagaatgcaccacgattgggtgtccctggcagtgccagtgggggccgctcatctgctcgttccaggcctgcaacctcatacccagtaccagttttctgtgctggcacagaataaactcgggtctggacccttctccgagattgttctcagtgccccggagggcctgccgacaaccccggccgccccggggcttcctccaactgagattccccctcctctgagccctcccagaggccttgtggcagtccgaacaccgagaggggtgctcctgcactgggatccgcctgaactcgtacccaagcgcctcgacgggtacgtcctcgaagggcgacagggaagtcaaggatgggaggtgctggatcctgctgttgccggcacagagacggagttactcgtgccagggttgattaaggacgttttatatgaattccggctagtggcgtttgcggggagcttcgtctcagacccctccaatacagctaacgtatcaacaagcgggttggaagtatatcccagtaggacgcagctccccgggctgctgccacaacccgtgctggccggagtggtagggggcgtttgcttcctgggcgtcgccgtgctggttagtattctggccggatgcttactgaatcgtcgcagggctgcccggaggagacggaaacgtcttaggcaggatccaccgcttatcttctcaccaacaggcaagtctgcggctccatctgccctgggctccggcagcccagactccgtcgccaagctaaaactccagggtagccccgttccctccctgagacagagccttctctggggcgaccctgctggcactcccagtccacatcccgacccacccagttcccgcggaccgttgccactggagccgatctgtagagggcctgatggtaggtttgtcatgggccccacggttgccgctccacaggagcgctcagggagagagcaagcagagccccggacccccgcccaaaggttggccaggtcattcgattgctcatcgagttcacccagcggagctccccagcctctgtgtatcgaggacattagcccagttgcccctcctccggctgcaccaccttcacccctgcccgggccaggacccctgctgcaatatctctccctccctttcttccgcgagatgaacgtggacggtgattggccacctctcgaggagccctctccagcagccccaccagactacatggatactaggcgctgcccaacctcaagtttccttagatcacctgaaactcctcccgtctcacccagggagtcgttacctggagctgtggtgggtgctggagccaccgcagaaccaccctacaccgctctagccgactggacacttagagaacggttgttacctggcctgcttccggcggcaccaagggggagcttgacctcccagagttcgggccggggcagtgccagcttcctccgtccacccagtactgctccgtcagccggcggcagctatctcagccctgctccgggcgacaccagcagctgggcatccggcccagagcgctggccccggagagagcatgttgtgaccgtgtctaagcggagaaatacctctgtcgacgagaactatgagtgggattccgagttccccggcgatatggaactcctcgaaacacttcatctcggactagccagctccaggctgagacccgaggccgaacccgagctgggagtgaagacccccgaagagggttgtctcctcaataccgcccacgtcacgggtcctgaggctagatgcgctgccctaagagaggaattcctggcctttcgtcgaagacgcgacgctacccgcgcgcgccttcccgcttaccgccaaccagtgccgcaccctgagcaggccactctgctgtag

SEQ ID NO: 120478 - DNA, 3540 bp, synthetic construct
  misc_feature 1..3540: note = Description of Artificial Sequence: Synthetic coding sequence
  source 1..3540: mol_type = other DNA
atggtctggtgcctcggacttgcagttctgagcctggtgattagccagggtgccgatggacgcggtaagcctgaagtggtctcggtggttgggagagccggcgagtcagttgtgctcggatgcgacttgctcccgcctgctggcagaccacctctccacgtcatcgagtggcttcgattcggtttcctgctgcccatcttcatacagttcggcttgtatagtcctagaatcgatcccgattatgttggtcgcgttcggcttcagaaaggggcatctcttcagattgaaggattacgggtcgaagaccagggctggtatgagtgcagggtgttcttcctcgaccagcacattcccgaggacgattttgctaacgggtcttgggttcaccttactgtgaactcccccccccagtttcaggaaaccccccccgccgtcctggaggtgcaggaactggagcccgttacgctgcgctgtgtcgccagagggtctcctctgccccatgtgacctggaaacttagggggaaggacttgggacaagggcagggacaggtgcaagttcagaacggaacactgaggattaggagagttgagcgtggctcgtctggagtctacacttgtcaggctagctcaactgaaggatccgcgacccacgcgactcagcttctggttctcggcccccccgtcatcgttgtgccgcccaagaacagcacagtaaacgccagccaagatgtgagcctcgcctgccacgctgaggcctaccccgccaatctaacctattcctggttccaggacaatatcaacgtgtttcacattagcaggcttcaacctcgcgtgcgcatccttgtggatgggagcctgaggctgcttgcaacacagcctgatgacgctggttgctacacttgtgtgccttccaacggccttctgcacccacccagcgccagcgcttatctgacggtgctgtaccccgcccaggtgactgccatgccaccggagacacccttgcctatcgggatgccaggcgttattaggtgtcccgtgcgagccaatccaccactgctgtttgtgagctggacgaaagacgggaaggcactgcagctcgacaaattccctggctggtcacagggtaccgaaggttctctgatcatcgctctagggaatgaggacgccctaggagaatacagctgtactccctataattccctcggaacagccggtccttcccctgtgacacgcgtgctattaaaagcaccccctgccttcatcgaaagacctaaagaggagtactttcaggaggttggacgagagttactcatcccatgcagcgcacagggcgaccctccacctgtcgtgtcctggactaaggtcgggaggggcctgcagggccaggcccaggtcgacagcaattcctccctcattctgaggccattaacaaaagaggctcatggacactgggagtgcagcgcatcgaatgccgtggctcgtgtggctaccagcactaacgtatatgtgttaggcacctccccccacgtggtcacaaacgtgtctgtcgtggccttgcccaagggcgccaacgtgtcctgggagccaggatttgacggcggataccttcaacggttttccgtgtggtatacaccccttgctaaaagaccagacaggatgcaccacgactgggtgtccctcgctgttccggtcggcgcggctcatttgctggttccagggctgcagccacatactcagtaccagttttccgtcctcgctcaaaataaactgggctctggccctttcagcgagatcgtcctctcagctccggaaggccttccaactacaccagcggcacccggactgccccccacggaaatccctcctcctctcagcccacccagaggtttggtcgccgtccgaactcctaggggggttcttctccactgggatcccccagaactggtccctaaacgcctggacggatacgtgttggagggaagacagggaagtcaaggctgggaggtgcttgatccagcggtcgcaggaacagagactgaattactggtccccggcctcatcaaggacgtcctctacgagtttcggctggtggcgttcgccggcagctttgtgtcagatccatccaacacagctaacgtgtctaccagcggactggaagtgtacccctccagaactcaattgcctggcttactgccgcaacctgtgcttgctggagtagtggggggtgtctgcttcctcggcgtggcggtcctcgtgtcaatcctggcaggatgcctgctcaatcgaaggcgtgcggcccgtagaagaaggaagaggctgagacaggacccaccattaatctttagccccacaggaaagtcagccgctccctccgcccttgggagtggcagtcccgacagcgtcgctaagctcaagctgcagggatcccctgtcccttcactgcgacagtcgctgttatggggagacccggcaggcaccccatcccctcatcccgaccctccatcttcaaggggcccactacccctcgagcccatatgccgtggcccagacggccgcttcgttatggggcccacggttgcagctcctcaggagaggagcggtagggagcaggctgaaccgaggacccctgcccaacgtttagctcggtcgttcgactgttctagttcttctccaagcggcgctccccagccgttatgcattgaagacatttcccccgtggctcctccacctgcggcccccccgagccccctgcccggccccgggccacttctgcaatacctaagccttccctttttcagagagatgaatgttgacggtgattggccaccccttgaggagccctctccagcagctccaccggattatatggatactcgtaggtgccccaccagtagcttcctgcgctcgcccgaaaccccaccagtctcaccccgggaatccctgccaggtgcagtcgtgggagctggagccacagccgagccaccctacacagcactggctgactggaccttgagagaacgcctcctgcctggactgctcccagccgccccaagagggagcttaactagccagagctccggcagaggcagtgcttccttcctcagaccgccctccactgcacctagtgccggaggctcttacctctcccccgcccccggcgacacatcatcctgggcctcgggccccgaacggtggcctagacgagaacatgtagtgaccgtgtctaaacggcggaacactagcgtggacgagaactacgaatgggacagcgaattccccggcgacatggagctcctggaaaccctccatctgggcctagcctcgtctaggctgaggccagaggctgaacctgaattaggagtgaagacgcccgaagaagggtgcctgcttaatactgcacacgtgaccggacctgaagccaggtgtgcagccctgcgcgaagagtttctggcatttaggcgccgcagagatgctacacgggcacgcctccctgcttaccggcagccagttcctcatcccgagcaagcaactttgctctag

SEQ ID NO: 120479 - DNA, 4050 bp, synthetic construct
  misc_feature 1..4050: note = Description of Artificial Sequence: Synthetic coding sequence
  source 1..4050: mol_type = other DNA
atgatttggtacgtcgcaacgttcattgcctccgtcatcggcactcgggggctggccgctgagggtgcccatggactgcgagaagaacccgagttcgttactgcccgagcaggcgagtctgtagtcctgaggtgcgatgtcatccaccctgtgacagggcagccccctccttatgttgttgagtggtttaaattcggtgtgccaatccccatcttcataaaattcgggtactatcctccacatgtggatcctgaatacgccgggagagcctctctgcacgacaaggctagtcttagactagagcaggtgcgaagcgaggatcagggctggtacgaatgtaaagtattaatgctcgaccagcaatacgacactttccataatggctcttgggttcacctgactataaacgccccacctactttcaccgaaaccccaccacagtatatcgaagctaaagaagggggttcaattactatgacctgtactgcttttggcaatccaaagcccattgtcacctggttgaaagagggaactttactgggcgcctctggcaaataccaggtgagtgacggctctttaacagttacaagcgtcagcagagaggaccgaggcgcttacacgtgtcgggcctacagtatccagggggaggcggttcacaccacccatcttcttgtccaggggcccccatttatcgtaagccctcctgagaatattaccgtcaacatatcgcaggacgccctcctgacctgccgcgccgaggcttaccctggaaacctgacttacacatggtactggcaggacgaaaatgtttactttcagaatgatctcaagctgagggtaagaattttgattgacgggactctgattatttttcgggtgaaacctgaggactccggcaaatacacgtgcgttccaagcaactccctcgggcggagtccctctgctagcgcctaccttacggtccagtaccccgctagggttctgaacatgccccccgtcatttatgttcccgtgggcatccacggctacatacgatgccccgtggacgccgagccaccagctactgtcgttaagtggaataaagatggacgcccactgcaagtcgaaaagaatttgggatggacactgatggaagacgggtctatacgcatcgaggaggcgaccgaggaggctctgggcacctacacttgtgtgccttataacaccctggggacaatgggacagtccgcaccagcacggctcgtcctgaaggatcccccttacttcacagtcttacccggttgggagtaccgacaggaagccggccgcgaactgctcatcccatgcgcagcagccggtgatcctttccctgtcattacctggaggaaggttggtaagccgtcccggtccaaacacagcgcactgcccagtggatccttacagtttagggctctaagtaaagaagatcacggcgagtgggagtgcgtagccacaaacgtggtgaccagcatcacagcctcaacccacctgacggtgattggcacgtcgccccacgctccaggatcggtcagggtacaggtgtcaatgacaaccgccaacgtgtcatgggagccagggtatgatggcggctacgagcaaaccttcagcgtctggatgaagcgtgcccagtttggtccccatgactggctatctctgcccgtgccacccgggcccagttggctcttggtggacacactcgaaccagagaccgcttaccagtttagcgtcctcgcacagaacaagctcggaaccagcgcctttagtgaggtggtcacagtgaacacacttgccttccctatcactacacctgaaccacttgtgctggtgactcccccacgttgtctgatcgcaaatagaactcaacagggcgtgctcttatcctggctccccccagccaaccatagttttcctattgaccggtacattatggaattccgcgtggccgagagatgggagctcctcgacgatggcatccctggtactgagggcgagttctttgctaaagatcttagccaggacacgtggtatgaatttcgagtgttggccgtgatgcaggatctcatttctgagccgagtaacatcgctggcgtgagttctaccgacatctttccacagcccgacctgaccgaggatgggctcgccagacccgtgttggccgggatcgttgccactatttgcttcttggccgcagccatcctgtttagcaccttggcagcatgctttgtcaacaagcagcgaaaacgcaagcttaaacgtaaaaaggatccgccactatccataacgcactgtaggaagtcgttggagtcaccattaagtagcggcaaggtgtctccagagtccatccgtacactgagagctccaagtgaaagttctgatgaccagggccagcctgccgccaaacgcatgctttccccgacccgcgaaaaggaactgtctctgtacaaaaaaacaaaaagagctatcagctctaaaaagtatagcgtagccaaagccgaagcagaagcggaggcgacaacccctatagaactcatttcacgagggcctgatggtaggtttgtgatggacccagccgaaatggagccctctttgaaatccaggaggatagagggtttcccatttgctgaagagactgatatgtaccccgagttccgacagagtgacgaggaaaacgaggatccgcttgtgccgacaagcgtggctgctttgaagagccagctgacacccctgtcatcttcccaggaaagctatctgccccctcccgcctatagcccgagattccagcctcgcggccttgaaggtcccggcggattggaaggtcggttacaggcaactggccaggcccggcccccggctccaaggccttttcaccacggtcagtactacggatacctgagcagcagcagtcctggtgaagtggaacccccaccgttttacgtgcctgaggttggatcacccctctctagtgttatgtcctctccccctctgccaaccgagggacccttcgggcatcccacaattcctgaagagaacggggagaatgcgtctaactccaccctcccgttaacccagacccccaccggcggccgaagtccggagccatggggaagaccagaatttccctttgggggtctggagacaccagctatgatgtttccgcaccaacttccaccttgcgatgtcccagaatcactgcagcctaaagctggcctgccacgaggccttcctcctacctccctgcaagtgcccgccgcctacccagggatactctccttggaggcccccaaagggtgggctggtaagagcccaggccgcggacccgtccccgcccctcccgccgcaaagtggcaggaccgccccatgcaaccgctggtcagtcagggacagttacgacacacaagtcagggcatgggaatacctgtgctgccttatccggaacccgctgagcccggggcccacggcgggcccagcacgttcggattagacactagatggtacgagccacagcctagaccccgcccctctccccgacaggctcgccgcgcagagccttcactccatcaagtcgtgttgcagccatctcgattgtcgccacttacacagagccctttatccagtcgcacaggcagcccggagcttgctgccagggcaaggccacgccccggcctcttgcagcaagcggaaatgtctgagattacgctgcaacctccagcagcagtgtcttttagcaggaagtcaacacctagcactggaagcccatcccaatcctccagaagcgggagcccgtcctatcggcctgcaatgggatttactactttggctacaggttatccgtctcctccacccggcccagctcccgctgggcctggtgactctttggatgttttcggccagacaccatccccccgcaggaccggagaggagctcctgaggccagagacccccccccctacactgcctacgagcggcaagcttcagcgcgatcggcctgctcctgccacctccccacccgagcgggctctttctaagctgtag

SEQ ID NO: 120480 - DNA, 1509 bp, synthetic construct
  misc_feature 1..1509: note = Description of Artificial Sequence: Synthetic coding sequence
  source 1..1509: mol_type = other DNA
atggcatggccaaagctgccagccccgtggctgttgctatgcacgtggctgcccgctggttgtctgtctcttctcgtgaccgtccaacatacggaaagatatgtgactctgtttgcatccattatcttgaagtgcgactatacaacatcagcccagttgcaggatgtggtggtgacatggcggttcaagtctttctgtaaagacccaatcttcgactattattcagcctcctaccaggccgctctcagcctggggcaagatcctagcaatgactgtaacgataatcagagagaggtgcgcatcgtggcccagcgcagaggccagaatgaacccgtcctgggcgttgattatagacagaggaagattacgattcagaatagggcagatctcgtgattaacgaagtaatgtggtgggatcatggggtatattattgcacgatcgaggcgcccggcgatacctcaggcgatcccgataaagaggtgaagctgatcgttctgcactggttaaccgttatttttattatactcggtgcactgctgctgcttctgctcatcggggtctgctggtgtcaatgctgccctcagtattgctgctgctacattcgctgcccatgctgtccagctcattgttgttgtccagaggaagatctgtccctgccaagttccctgccccagatgcctatgacccagaccactaatcagcctcccattgcaaatggagtactagagtacctggagaaggaactgcggaacttaaacctcgcccagccacttcccccagatcttaaaggccgcttcggccacccatgttcaatgctgagcagtctgggatcggaggtggtcgagcgccgtattattcacctgccacctctgatccgggatctgagcagctcaagaaggacatctgatagcctgcaccaacagtggttgactcccattccctcaaggccctgggacctccgggaaggaagatcccatcaccactatcccgactttcaccaggagctgcaagatagaggacccaaaagttgggctttagagagaagagagctcgatccctcctggtccggtcgccatagaagctcccgcctgaatggaagcccgattcattggtccgaccgagactccctctctgatgtaccctcgagtagcgaggcgagatggcggcccagccatcctccctttagatccaggtgccaagaacggccaagaagaccatcccctcgcgagtcaacacagagacatggtcgacgacggcggcatcgttcttacagtccacctctaccttctgggctatcttcatggtcaagtgaagaagacaaggagagacagccgcagtcctggcgcgcccaccggcgtggatcacatagccctcattggcctgaggagaagcccccgagctaccggtcgttagatattacccccggaaaaaattctaggaaaaaaggctccgtcgaacggcggtccgagaaagattcatctcatagcggcagatccgtggttatttag

SEQ ID NO: 120481 - DNA, 1641 bp, synthetic construct
  misc_feature 1..1641: note = Description of Artificial Sequence: Synthetic coding sequence
  source 1..1641: mol_type = other DNA
atggcttggcctaagctgcctgccccatggctgcttctgtgtacttggctccctgccggctgtcttagtctcttggttaccgtgcagcacaccgaaaggtacgtgactctatttgcaagcatcatcctcaagtgtgattacacaacaagcgcacagctgcaggatgttgttgttacctggcgctttaagtctttctgcaaggatccaatattcgactattacagtgcatcttaccaagcagcactctccctgggtcaagaccccagcaatgactgtaatgacaatcaaagggaagtaagaatcgtcgctcagaggcgaggtcaaaacgagccagtcctgggcgtggactaccggcagagaaagataacaattcaaaaccgcgccgatttagtcatcaatgaagtgatgtggtgggatcacggcgtgtattactgtactatcgaggctcccggcgatacaagtggcgatcccgataaggaggtgaaactgatagtgctccattggcttacagtgatttttattatactgggcgcactcctgctgctgctcttaattggggtatgctggtgccagtgctgtccgcagtattgttgctgctatatcagatgtccttgctgccctgcacattgctgctgcccggaagaagcgctggcacggcaccgctacatgaagcaagcccaggcactggggccacaaatgatgggtaagcccctgtattggggagcagaccgcagcagtcaggtgtcatcctaccctatgcaccctctgctacagagggacttgtccctgccatcatctttaccccagatgcctatgacacagacaaccaaccagccaccaatcgcaaatggtgtcctggaataccttgagaaggaactgcgcaacctgaacctggcacagcctctcccaccagacttgaagggtcggtttggccacccgtgtagcatgctgagctccctaggttctgaggttgtcgaacgaagaatcatacatctgccacctctgattagagaccttagttcgtcacggcgaacctctgacagtttacatcagcagtggctcacaccaatccctagcaggccttgggacctaagagagggccgttcacatcatcattatcctgacttccatcaggaactgcaggatcgtggaccaaagagctgggctctggagcggagagagctggaccctagttggagtggtaggcacaggtctagccgcctgaatgggtcccctattcattggtccgacagggactcccttagcgatgtgccaagctcgtctgaggcgaggtggaggcccagccacccaccatttcgctcccggtgtcaggagcgtccccgtcgacctagtccaagggagtctacacagagacatggacggcgacgacgccataggagttattccccacccctcccaagcggcctttcttcgtggagttctgaagaagacaaggagcgccaaccgcagagctggcgcgctcataggagggggtcccatagcccccactggcccgaggaaaaaccaccatcataccggagcctcgatattacaccaggtaaaaattcccggaagaaagggtccgtcgagaggcgttcagaaaaggattcatcacactccggtaggagtgtggtgatttag

SEQ ID NO: 120482 - DNA, 639 bp, synthetic construct
  misc_feature 1..639: note = Description of Artificial Sequence: Synthetic coding sequence
  source 1..639: mol_type = other DNA
atggcttggccgaagctgcccgccccatggctcctcctgtgtacctggctaccagcaggctgcttgtcattgttggtcaccgttcaacacacagaacggtacgtgaccctatttgcgtccatcattttgaagtgtgactacacaacatccgcgcaactgcaggacgtagttgtcacatggcgttttaagagtttctgtaaggatccaatttttgactactacagtgcatcctaccaggcggcactgtccttagggcaggatccgagcaatgactgttgttgctgcccagaggaggcgctggcacgccatcgttatatgaaacaggcgcaggcactggggccccaaatgatggggaagcccctgtattggggggctgaccggtcaagtcaggtttctagctatcctatgcaccctctcctccagagagacctcagcttgccttcttcccttcctcaaatgccaatgacccagaccaccaatcaaccacctattgctaatggggtgctggagtacctggagaaggaactgagaaatctgaatttggcacagcctctccctcctgacctgaagggcaggttcggacacccctgttctatgctctcatctttgggaagtgaaaaccaaatagaagagttttag

SEQ ID NO: 120483 - DNA, 1374 bp, synthetic construct
  misc_feature 1..1374: note = Description of Artificial Sequence: Synthetic coding sequence
  source 1..1374: mol_type = other DNA
atggcatggccaaagcttcccgccccttggctcctcttgtgcacttggctgcctgccgggtgcctgtcacttctagtcacagtgcagcacaccgaacgctacgtgacactatttgccagcattattctcaagtgtgactacacaacatccgcacagctccaagacgtcgtggtgacatggcgattcaagtccttctgtaaagatcccattttcgactattactctgcctcttatcaggcggctttgagcctcggccaggacccctcaaacgactgtaacgataaccaacgcgaggtgcgtatcgtagctcagagacgcggtcagaacgagcccgtgctcggcgtggactaccggcagcgcaaaatcacgatacaaaaccccctggccaggcacaggtacatgaaacaagcgcaggccctgggacctcagatgatgggcaaaccgctgtactggggcgcagacagatcttcccaggttagctcttacccaatgcatccacttcttcagagagatctcagcctgcctagcagcttacctcagatgcccatgacgcaaaccaccaatcagcctcccattgccaacggagtcttggagtacctggagaaagagctgagaaacctgaaccttgcccagccactaccccccgatctgaaaggtagattcggtcatccctgcagcatgttatcatctctgggctcagaagtggtcgagagacggatcatacacttgcccccactcatccgggatctgagctcctccaggagaacatccgacagtctacaccagcagtggctcacacccattccaagccgcccttgggacttgcgggagggcagatcccatcatcattaccccgattttcaccaggagctccaggataggggaccaaagtcgtgggctctggagcgtcgggaattagacccctcgtggtctggaaggcatcgctcttcccgccttaatggctctcccattcattggtcagatcgtgactcactgtccgacgtcccatctagcagcgaggctagatggaggccctcacacccgcctttccggtcccgatgccaagagagacccaggcgacctagcccccgggagagcactcagagacacgggcggcgacgcagacatagatcttattcccctcccctccccagcggcctctcgtcctggagctctgaggaagataaagagcgtcaaccacagagttggcgggcacaccgtagagggagtcactctcctcactggcccgaggaaaagcccccatcatatcggagcttagacatcactcccggcaagaatagcagaaagaagggaagtgtggaacgcagaagcgagaaggacagtagccactctggacggtccgtggtgatttag

SEQ ID NO: 120484 - DNA, 1545 bp, synthetic construct
  misc_feature 1..1545: note = Description of Artificial Sequence: Synthetic coding sequence
  source 1..1545: mol_type = other DNA
atggcggggaacatcttttgcccattcgccctgttcttcttacccatgtcccgcgtcggtcacctgcagcactttctgttgctgcttgctctcggctgcctgtccctgctggtcacagtacagcataccgagcgctacgtgactcttttcgcctccattattctaaagtgtgattatactacatccgctcagctgcaggacgtagtcgtcacatggagatttaaaagcttctgcaaagaccccatttttgactactacagcgccagctatcaggctgccctttcactgggacaagatccatcaaatgattgcaacgacaaccagcgggaagtgcggatcgttgcacagaggcgcgggcagaatgagcccgttctgggcgtagactataggcaacgaaaaatcacgattcagaatcgggccgacctagtcattaacgaggtcatgtggtgggatcacggggtgtattattgcactatcgaggccccgggggacacttccggcgaccccgataaagaagtgaaactcattgtgctacattggctcacagtgatttttattattctaggggccctgttgttgttgcttcttataggtgtttgctggtgtcagtgttgtccacagtactgctgctgttatattcggtgtccatgctgtccagctcactgttgctgtccagaggaagacctatcactgccctcgagcttgccccagatgccaatgacccaaacaacaaatcagccaccgatcgcaaacggggtgctcgagtacctcgagaaggagttacggaacttaaatctggctcagcccctgcctccagacctaaagggtcggtttggtcatccctgctcaatgctgagtagcctggggtccgaagttgtggagcggcgtatcatccacttgccgccactgattcgcgacctcagcagtagcaggagaacgtctgactccttgcaccagcagtggcttacacctataccttcacggccctgggacctgcgtgaggggcgttcccatcaccattaccccgattttcaccaggagctccaagatcgcggtccaaagagctgggccctagaacggagagagctcgatccgtcctggtcaggccggcatcgcagctcacggctgaacgggagccccatccactggagcgaccgcgactcacttagcgacgttcccagcagcagtgaggctaggtggcgacctagccatccaccttttcggtctcgatgtcaggagcggccccggcggccctctccgcgggagagcacacagcgccatggcaggagaagaaggcatagaagctactcaccccctctgccatcaggtctgagctcatggtcaagcgaggaggataaggagaggcaacctcagagttggcgcgctcaccgccggggatcccacagcccccattggcctgaagagaagcctccctcatacagatccctagatatcacaccgggcaaaaactcccgaaaaaagggctccgtagaaaggaggtccgagaaggatagtagccactccggccgaagcgtggttatttag

SEQ ID NO: 120485 - DNA, 1800 bp, synthetic construct
  misc_feature 1..1800: note = Description of Artificial Sequence: Synthetic coding sequence
  source 1..1800: mol_type = other DNA
atggagggtccactcacccccccccccttacaggggggtggcgccgcagcggtgcccgagccaggagcaagacaacatcctgggcacgagacagctgcgcagcgatactctgccaggctgctccaagccgggtacgaacctgaaagccccagactagacctagccacccaccctaccacccctcgctcggaattatcctccgtggtgctgttggccggcgttggagtgcagatggaccgcctaagacgcgcgtctatggcggactatctgatttccggtgggaccgggtatgtgcccgaagacggcctcacggcccagcaactctttgcttccgcggacggtttaacatacaacgactttctcatcctaccagggtttattgacttcattgccgatgaagtagatctcacctctgctctaactcgcaagataactctcaaaacacccctcattagttcccccatggataccgtaacagaggccgatatggcaatcgccatggcgctcatggggggaattggatttattcaccataactgtacccctgaatttcaagccaacgaggttagaaaggttaagaagtttgaacagggcttcataaccgacccagtggttttgtcgccctcccacactgtcggtgacgttctcgaggccaagatgcgccatggcttctccgggattccgatcaccgagacagggactatgggctcaaaactggttggcatcgtgaccagccgcgatatagatttcctggccgaaaaagaccatacaacactgttgtctgaagtgatgactcctaggatcgaactggtggtagctcctgccggcgtcacccttaaggaggctaacgagatcctgcagaggtcaaaaaaagggaaacttcccattgtgaatgactgtgacgaacttgtggcaattatcgcgagaaccgatcttaagaagaatcgggactacccactggccagtaaggactcacagaaacagttactgtgcggagccgctgtcgggactagggaggacgacaaatataggttagatctcctcacacaagccggtgtagacgttattgtgcttgacagcagccaggggaatagcgtgtatcagatagccatggtccattacattaagcaaaagtacccgcacctccaggtgattgggggaaatgttgtaaccgcagcccaggccaaaaacctcatcgatgcaggagtagacggactccgcgtggggatggggtgtggctctatatgcattactcaggaggtgatggcgtgcggacgcccgcagggcaccgcagtttataaagtagccgagtatgcaaggcggtttggtgtcccgatcatcgcagacggggggatacaaacagtcgggcacgttgtgaaagcactggcgctgggggcatccactgtgatgatgggctccctccttgccgcaacgacagaggcccccggcgaatacttcttctctgacggtgtccgtctgaagaaatatcgaggcatgggttccctggatgctatggaaaaatcttcaagcagtcagaaacgctacttttccgagggcgacaaggttaagattgcccagggggtctctggtagcattcaagacaagggatcaatacagaagttcgtgccttacctgatagcaggcattcagcacgggtgccaagacatcggagccagatcgctgtccgttctccgctctatgatgtacagcggggaactgaagtttgaaaagcgcactatgagtgctcagattgagggtggggtgcacggtctccacagttacgaaaaaagactttattag

SEQ ID NO: 120486 - DNA, 1470 bp, synthetic construct
  misc_feature 1..1470: note = Description of Artificial Sequence: Synthetic coding sequence
  source 1..1470: mol_type = other DNA
atggcggattatctcatcagcggcgggacgggctacgtacctgaagatggcttaactgctcagcaattgttcgcttcagccgacggcctgacatacaacgatttcctcatactgccaggatttattgatttcatcgctgacgaggtcgacctgacgtccgctctcactcgcaagatcactctgaaaacacccctgatctcatcgccaatggacacagtgacagaggctgacatggccatcgccatggctaaattcgaacaaggattcattacggacccggtcgtactgtccccaagccacacggtcggagacgtgctggaagccaaaatgagacacggattctcagggattccgataacagagaccggcaccatgggctctaaattagtggggatcgtgaccagccgcgacatcgatttcctagcggagaaagatcacacgacactcctctccgaggtgatgacgccaaggattgagctcgtggtcgccccagccggggtcacacttaaggaggccaatgagattcttcagcggagtaagaaaggcaagctacccatcgtgaacgactgtgacgagctggtcgcaattattgcacgaacagatttaaagaagaatcgtgactatccactcgctagtaaggattcacaaaagcagctcctgtgtggagccgccgtgggaacaagggaggatgataagtacaggctcgatctattaacccaggcaggggtggacgttatcgtgctggattcatcccagggcaattccgtctatcagattgccatggtccactacataaaacaaaaatatccgcatctgcaggtgataggggggaatgttgtcactgccgcccaggccaagaatctcattgatgccggggtggatggcctgagagtgggaatgggctgcgggtcaatctgcattacacaggaagttatggcatgtggtagaccccagggaacggctgtgtacaaagtggctgaatacgcccggcggtttggagtgccaattattgccgatggcgggattcagactgtgggtcacgtggtgaaagcgcttgcgctgggggccagcactgtgatgatgggttccttgctcgcggccacaacagaggcacccggtgaatactttttcagcgatggggtgcggctgaagaagtacagaggcatggggtcacttgacgcgatggagaagtcttcctctagccaaaaacgatacttctccgaaggggacaaagtgaaaattgcccagggtgtgtctggctcgattcaagataaaggctcaattcaaaagtttgtgccttatctaatcgctgggattcagcacggatgccaggatattggagcaagaagtctctcggtgctgcgtagcatgatgtattccggtgagttgaaatttgaaaagcggacaatgagcgcccagattgagggcggtgttcatggtttgcacagctacgagaagaggctttactag

SEQ ID NO: 120487 - DNA, 1692 bp, synthetic construct
  misc_feature 1..1692: note = Description of Artificial Sequence: Synthetic coding sequence
  source 1..1692: mol_type = other DNA
atggagggtccacttacccccccgccactccagggcggcggcgcagctgctgtgcccgagcccggcgctcgccagcacccaggacatgagaccgctgcccagaggtacagcgcccgcctcctgcaggcaggctatgagccagagtccatggctgattatcttataagcggcggtactgggtacgtccccgaagatggcctcacagctcaacagttgttcgcgtcagcagacgggctgacctataacgattttttaatcctgcccggcttcattgatttcattgccgatgaggtcgacctcacttctgctttgactcggaagattacactcaagacaccccttatttcatctccgatggacaccgtgaccgaagctgatatggctatcgcaatggcactgatgggcgggatcggctttatccaccataactgcacccccgaattccaggccaacgaggtgagaaaggtgaaaaaattcgagcaggggtttattacagacccggtggtgctatctcctagtcacacggtgggagacgtgttagaagccaaaatgcgtcacggctttagtggcattcccatcacggaaacagggacaatggggtctaaactggtgggcatcgttacaagccgggacatcgacttcctagccgagaaagaccacaccacactactgagtgaggtgatgaccccaagaattgagctcgtggtggcgccagccggcgttactctcaaggaagcgaacgagatcctgcaaaggtccaagaaagggaaattacccatagtgaatgactgtgatgaactggtggcgattattgctcgcactgacttaaaaaagaatcgggattaccccctggctagtaaagattcacagaagcaactgctgtgtggtgccgcagttggtacaagagaggatgataagtatcgtcttgaccttctcacacaggcaggagtggacgtgatcgtgctcgactcttcgcagggcaactcagtttatcaaatcgcaatggttcactatatcaaacagaaatatccccacctacaggtgattggagggaatgtggttacagccgcacaagccaagaatctgatcgacgctggtgtggatggccttcgggtcgggatgggatgcggctccatatgcattactcaggaggtgatggcctgtggtaggccccaggggacagccgtatacaaagtagcagagtacgcccggcgcttcggcgttccaataatcgcagacggaggaattcagacagtggggcacgtggtgaaggccctcgctttgggcgcatctacagtcatgatggggagtcttctggcagccaccacggaggcacccggagagtatttcttcagcgatggcgtgcgcttaaagaaataccgcggaatgggctccctggacgcaatggaaaaaagctcctcgtcccaaaaaaggtatttttccgaaggagacaaagtcaagatcgcgcaaggtgttagcgggagcatacaagacaagggctccatacagaaatttgttccgtatctcatcgccggtatccagcacggctgccaggatattggggcccgctcactaagcgtcctacgatcaatgatgtatagtggcgaactcaaatttgagaaacgtacaatgtccgcccagatagagggcggagtgcacggattgcactcctacgagaaacggctctattag

SEQ ID NO: 120488 - DNA, 1770 bp, synthetic construct
  misc_feature 1..1770: note = Description of Artificial Sequence: Synthetic coding sequence
  source 1..1770: mol_type = other DNA
atggaaggacctttgacaccccctcccctccagggcggcggggcggccgcggtccccgagcccggggccagacagcaccctggtcacgagacagccgcacaacggtatagtgctcgcctgcttcaggcagggtatgagccagagtcctgttttctgctggagcttagcagcgttgtgcttctggccggcgtcggggtgcagatggatcgtctgagaagagcatctatggcagattacctaatttccgggggtaccggctacgtgccagaagatgggctgacggcccaacaactgtttgcctctgctgacggattgacttacaatgattttctgatccttccagggttcatcgattttatcgctgatgaggtggatctcacctcagcactgactagaaaaatcactctgaaaactccactgattagtagtcctatggatactgtgactgaggccgacatggccattgccatggcccttatgggcggcatcggcttcattcaccacaattgcaccccggaatttcaggcaaatgaggtcaggaaagtgaaaaagttcgagcagggatttattaccgatcctgtcgttctttccccaagccacacagttggggatgtactcgaagctaaaatgcgtcatggcttctctgggatcccaatcacagaaaccgggacaatggggtcaaagctagtagggattgtcacctccagggacattgactttctggcagagaaagaccacacaaccttgctgtccgaggtgatgactccacgtatcgagctcgtggtcgctcccgctggagtcacattgaaagaagccaacgagattctccagagatctaaaaaggggaagctccctattgtgaatgattgtgatgaactggtggccattattgcaagaactgatctgaagaagaatcgcgactaccctctggcgtccaaggatagccagaagcagttgctgtgtggcgctgccgtaggcacccgggaagacgacaagtataggctggatctgctgacacaggcgggcgtggatgtcatcgtattggatagtagtcagggaaattcagtttatcaaatcgccatggtccattatatcaaacagaagtaccctcacctgcaggtgatcggtggcaatgtcgttacagctgcccaggccaaaaacttaattgatgcgggagttgatggtctgcgggtggggatgggctgtggcagtatttgcattacacaggaggtgatggcctgtgggaggcctcaaggcaccgctgtgtacaaggtagccgagtacgccagacggtttggggtccctataatcgcagacggaggaatccaaacagtgggtcatgtggtgaaagccttggctctgggtgcatctaccgtgatgatgggctctttgttggctgctaccacagaggcccccggagagtatttcttttcagatggggttagactgaaaaaataccgtggcatgggcagcctggacgcaatggagaaatcctcgagttcccagaagcgatactttagcgagggtgataaagtgaaaatagcgcagggcgtgagcgggagcatccaggacaaggggagcatacagaagttcgtgccctatttgatcgccggtattcagcatggctgccaggacataggcgctaggagcctgagcgtgcttagatcaatgatgtacagtggggaattaaaatttgaaaagagaacaatgtcagctcagatcgaagggggagtgcacggtttacactcttacgaaaaaagactgtactag

SEQ ID NO: 120489 - DNA, 1593 bp, synthetic construct
  misc_feature 1..1593: note = Description of Artificial Sequence: Synthetic coding sequence
  source 1..1593: mol_type = other DNA
atggaaggccctctgacacctccgcccctccaaggagggggtgccgctgccgtgccagaacctggcgctagacagcatcccggccacgagacagcagcccagcgatactctgcacgactgctgcaggccggctacgagcccgagagcgattttctaattctgccaggattcattgactttatcgcggacgaagtggatctgaccagtgccttaacaagaaagatcacattaaagactcctcttatctctagccccatggatacggttaccgaagccgatatggccattgccatggcccttatgggcggcatcggcttcatccaccacaactgtacgccggaatttcaagcgaacgaagtcagaaaagtgaagaaatttgaacagggtttcataaccgatcctgtggtgctctccccatctcacactgtgggcgatgttctggaggcgaaaatgcggcatggcttttctggaatcccgattaccgagacaggaactatggggagcaagctggtgggtatcgtcacaagccgggacattgattttcttgctgaaaaggatcacaccaccctattatctgaggtcatgactccccgcatcgagttggtcgtggcccctgctggggtcactttgaaggaggcaaacgaaatacttcagcggtccaaaaagggaaagttgcctatcgtgaacgactgcgatgagctggtcgctatcatcgctcgtaccgacctcaaaaagaatcgcgattaccccctggcgtctaaagattcgcagaaacagctgctctgcggcgccgccgttgggacccgggaggatgataaatatcgcctggatctgctgacccaggcaggagtagacgttatcgtgctggattcctctcaggggaactcagtgtaccaaattgccatggtccattatatcaagcagaaatatccgcacttacaggtgatcggtggaaacgtggtgacggccgctcaggcaaaaaacctgatcgacgctggggtagacggcctgagggtgggaatgggttgcggatccatttgcattactcaggaagtaatggcttgtggtcgccctcagggcaccgccgtttacaaagtggctgaatatgctcgacggttcggtgtccctatcatcgccgacggcggcatccaaacagtggggcatgtcgttaaagcactggcattgggagctagcaccgttatgatggggagtctacttgcagccacaacggaggcaccaggagaatatttctttagtgacggcgtgagattgaaaaagtaccgaggaatggggtccctggatgcgatggaaaagtctagcagcagtcaaaagagatacttctcggagggagacaaggtaaagatcgcgcaaggagtgagcggcagcatccaggacaagggctccatccaaaaattcgtgccatacctgatagcaggtatccaacacgggtgtcaagatatcggagcaaggagcctgtccgtgcttaggagcatgatgtactctggcgagctcaagtttgaaaagcggaccatgagcgcgcagatcgaagggggagttcacggactacacagctacgaaaagaggttgtattag

SEQ ID NO: 120490 - DNA, 1701 bp, synthetic construct
  misc_feature 1..1701: note = Description of Artificial Sequence: Synthetic coding sequence
  source 1..1701: mol_type = other DNA
atggagggccctctaactccacctcctcttcagggaggaggggcggccgcagtgccggagcccggggcccggcagcatccggggcacgagaccgcggcccagcgatattccgcgcgccttctccaggctggatacgaacccgaaagtccaaggctagacctggccacacaccctacaacacctcggtccgaattaagcagcgttgtcctgctggccggcgtcggggtccagatggatcgtttgcgtagagcatcagactttctcatcttaccaggatttattgactttatcgccgatgaggtcgaccttacctcagctcttacaaggaagattaccctcaagacaccactcatcagttctcccatggatactgtgactgaggccgacatggctatagccatggctctgatgggggggatcggattcatccaccacaactgcactcccgaattccaggcaaatgaggttcggaaagtgaaaaaattcgaacagggatttattaccgatcccgtagtcttgagtccaagtcacactgttggggacgtcctggaagccaaaatgcggcatggtttcagcggcatccctatcaccgaaaccgggaccatgggatccaagcttgtagggattgtgaccagtcgggatattgacttcctcgcggaaaaggaccacaccactctgctgtcagaggtcatgacaccacgaatagagcttgttgttgctccggccggagtgaccctcaaagaggctaatgaaatactgcagagatcaaagaaggggaagcttcccattgtcaatgactgtgatgagctggtggccatcattgcgcggactgatttgaagaagaaccgcgactaccccttagcctccaaagatagccagaaacaactgctctgtggggctgctgtcggcaccagggaagatgacaagtaccgcctggacttgctcacacaggctggcgtggacgtgatcgtcttggacagtagccagggcaactccgtgtaccagatcgcaatggttcactatatcaagcagaaatatcctcatttacaggttatcggtggcaacgtagttacagccgctcaggctaagaatctgatagacgccggagtcgatggtctgcgagtgggaatggggtgtggcagcatttgcattacgcaagaggtgatggcctgcgggcggccccagggtaccgccgtgtataaggtggctgaatacgcccgccgtttcggcgtgcccatcatcgcagatggaggtattcagacagttggacacgtagtgaaggctctcgctttaggagcaagtacggtgatgatggggagtttactggccgcaaccaccgaagcaccgggggagtatttcttctccgatggggtaagactgaagaaatatcgtgggatgggcagtctggatgcaatggagaagagttcctctagccagaagagatacttctctgagggggacaaagtgaagatcgcacaaggagtctccggaagtatccaggataagggtagcatccagaagttcgttccatacctcatagctggcatacaacacggatgccaagacatcggcgctagatctttgagcgtactccgttcgatgatgtattctggtgagcttaaattcgagaagcggacgatgtcagctcaaattgagggcggagtacacggtctgcattcatatgaaaagcggctttattag

SEQ ID NO: 120491 - DNA, 1530 bp, synthetic construct
  misc_feature 1..1530: note = Description of Artificial Sequence: Synthetic coding sequence
  source 1..1530: mol_type = other DNA
atggctgattatctgatctccggtggcactggctacgtgccggaggacggtctgaccgcccagcagttgtttgccagcgctgacggattgacgtacaacgatttcttaatcctccctggattcattgacttcattgccgatgaggtggaccttacttctgcactgacccgaaagataacactcaagacaccgctgatatccagccccatggatactgtgactgaggccgatatggctattgctatggccctgatgggaggcattggcttcattcaccacaactgcactcccgagttccaagcgaatgagaagtttgagcagggtttcatcactgaccctgtagtgctgtctcctagccataccgttggcgacgtgctggaggccaaaatgcgacacggtttttccggcatcccaatcacagaaacaggtacgatgggaagcaaactggtcggcatcgtcacatcacgcgacatagatttcctcgcggagaaggaccatacgaccttgttgtcggaggtcatgactccacgcatagagctggtggtcgcccccgccggagtaacgctaaaggaagcgaatgagattttacaaaggtctaagaaaggtaagcttcccatagtgaatgactgtgacgaactcgttgcaataatcgctcgcactgacctaaaaaagaacagagactacccgcttgcctctaaagacagtcagaagcagctcctgtgcggcgcagccgtgggcacacgtgaggacgataagtataggcttgacctgttaacgcaggcaggagtcgacgtgattgttctggattctagccagggcaattccgtctatcagattgctatggtccactatatcaagcagaagtacccacatctacaagttattggagggaatgtggtgacagcagcccaggccaaaaatctgattgatgccggggtggatggcctcagagtgggtatggggtgtggttctatttgtatcacccaagaagttatggcctgtgggcgcccacaggggacggcagtctacaaggttgccgaatatgcccggcgtttcggtgtaccaatcatcgcagacggaggtatccaaactgtgggtcacgtggtgaaagcgttagcactcggcgctagcactgtaatgatgggatcattattagcagctacaaccgaggcccctggagaatacttcttcagcgacggtgtgcggcttaaaaaatatagagggatggggtctctcgatgcaatggaaaagagctcctcttcccaaaaaaggtactttagtgaaggcgacaaggtgaaaatcgcccagggggtgtctggcagtatccaggacaaaggatcaatccagaagtttgtgccatacttaatcgccggcattcaacacggttgtcaggacatcggggctaggtcgctgtctgtgctgagaagcatgatgtattctggggagctaaagtttgagaagaggactatgtctgcccagattgagggaggtgtgcacggtttgcattcctatgaaaagagactctactag

SEQ ID NO: 120492 - DNA, 1470 bp, synthetic construct
  misc_feature 1..1470: note = Description of Artificial Sequence: Synthetic coding sequence
  source 1..1470: mol_type = other DNA
atggcggactatctcataagcggaggcactggctatgttccagaagacgggctcaccgcacagcagctcttcgcaagtgctgacggattaacctacaacgatttcctgatcctcccgggcttcattgacttcattgccgacgaagtggaccttacaagcgcccttactcggaaaataaccctcaagacaccgcttataagctctccgatggataccgtgaccgaagccgacatggccatcgctatggcaaagtttgaacaaggcttcattacggaccccgtcgtcttatccccctcccacaccgtgggggatgtgttggaggccaaaatgagacatggcttctcaggtattcccattaccgagacagggaccatgggttccaagctggttggcattgtgacttctagagacatcgattttctagccgagaaggaccatacaacgctgctctccgaagtaatgacacctcgcatcgaactcgtggtcgcccctgcaggggttaccctgaaggaggccaatgaaatactgcaaaggagtaagaaaggtaagctgccaatcgtaaacgattgcgacgagcttgtggccattatagcaagaactgacttgaagaagaacagagattatccgcttgcgtctaaggactctcagaaacagctactgtgtggagccgccgtgggaacccgcgaagacgacaaatatcgtctggacctgctgactcaagccggtgtcgatgttatagtgttggatagcagtcaaggcaatagcgtgtaccagattgccatggttcactatataaaacagaaatacccacatctgcaggtaataggtgggaatgtcgtcacggccgcacaggccaagaatctgatcgatgccggagtcgacggattgcgagtgggcatgggctgcggctcgatttgtatcacacaagaggtcatggcttgtggacgaccacagggcacagctgtgtacaaggtggccgaatatgctaggagatttggggtgcccataatcgccgatggcgggatccaaaccgtgggacatgtggtaaaggcattagcactgggggcaagtacagttatgatgggcagtttgctggcggccacaacagaggctccgggagagtactttttcagcgatggggtacgactcaagaagtatcgggggatggggtcacttgatgccatggagaagtccagtagcagccaaaagagatacttctctgaaggtgacaaggtgaagatagcccagggcgtttctggatccatccaggacaagggctcaattcagaaattcgtgccgtatctgatcgccggtatccagcacggatgtcaagacattggggcacggagcctgtcagtgttgcgctctatgatgtacagtggggagctgaaatttgagaagcggaccatgtcagcccagattgagggcggagtccatggcctccacagttatgagaaaaggctttactag

SEQ ID NO: 120493 - DNA, 1545 bp, synthetic construct
  misc_feature 1..1545: note = Description of Artificial Sequence: Synthetic coding sequence
  source 1..1545: mol_type = other DNA
atggccgactacctcatctctggcggaacctcctacgtacctgacgatggactgaccgctcagcaactgttcaactgtggagacggtcttacatacaatgatttcttgatcttacctggatacatagacttcacagccgaccaggtcgacctaacttctgcacttactaagaaaatcacactgaagacccctctcgtctcaagccctatggacacagtcaccgaggcaggtatggcgattgcgatggctctgaccggcggtatcggattcatccaccacaactgcactcccgagttccaggcaaacgaggtgcgcaaagtgaaaaaatacgagcaaggattcattactgatcccgtggtgctctctcccaaagatcgggtgcgggatgttttcgaagccaaagcccgtcacggattctgtggaattcccatcaccgatacaggcaggatgggatccaggttggtgggtatcattagcagccgcgacatcgatttcctgaaggaagaagagcacgactgctttcttgaggaaatcatgactaagagggaggatctggtagttgcaccagctggcatcacactgaaggaggctaatgaaattcttcagaggtcgaagaagggcaaactcccaattgtgaatgaggacgatgagctggtggccatcattgccagaaccgatctcaagaaaaaccgggattatcccctcgctagtaaggatgccaagaagcagctactctgcggcgccgctatcggaactcacgaagacgataagtaccggctcgatctcctagcacaggccggtgtcgacgtggtggtgctggacagctcacagggaaatagcatcttccaaatcaacatgatcaaatacatcaaagacaagtaccccaatctacaggtgataggcggcaatgtggtgacggctgcgcaggccaagaatctcattgacgcgggcgtcgatgctctcagggtgggaatgggctcaggtagcatctgcatcacacaagaggtgctagcatgcgggcgaccccaggccacagccgtgtacaaggtgtccgaatacgccagacgctttggcgtccccgtgatcgctgacggcggcatacagaacgtgggccacatagccaaggccttggcacttggagcatcgacagtcatgatgggaagcctgctggctgcaaccaccgaggccccaggggaatactttttctcagatggaattcgactgaagaaatacagaggcatgggatctttggatgcaatggacaaacacctgtcatcgcagaataggtacttctctgaggcagacaagattaaagtggctcaaggggtgagcggtgcagtccaggacaagggctcaatccacaaatttgtcccatacctgatcgctggtatacagcacagttgccaagatataggcgctaagtcactcactcaggtccgcgcaatgatgtactcgggtgagcttaagttcgaaaaacgcacctcgagcgcccaggttgaaggcggagtgcattcactgcacagctatgagaagaggctcttttag

SEQ ID NO: 120494 - DNA, 1074 bp, synthetic construct
  misc_feature 1..1074: note = Description of Artificial Sequence: Synthetic coding sequence
  source 1..1074: mol_type = other DNA
atggccgactatctaatatccggcggcacttcctacgtgccagatgatggtttaacagctcagcagctctttaattgcggagacgggctgacctacaacgatttcctgattctcccaggttatatagatttcacagctgatcaggtggacttgaccagcgccctgacaaaaaagatcaccctgaagacacctctcgtatcctcacctatggacacggtaactgaagcgggtatggcaattgctatggcactcacaggagggatcgggttcatacaccacaattgtacgcccgaatttcaggccaacgaggttcggaaagttaagaaatacgagcaaggcttcattacagatccggtagtactgtctcccaaagacagggtgcgcgacgtctttgaggctaaagcaaggcatgggttctgcgggataccaattaccgacacggggaggatgggtagccggctggtcggcataatctcttcccgcgacatagacttccttaaagaagaagagcatgactgtttccttgaagagatcatgacaaaacgcgaggacctggtggtggcccccgcaggaattacccttaaggaggcaaacgaaattctacagagatccaagaaagggaagttgcctatcgtgaatgaggacgatgaactggtggccattatcgcacggactgacctgaaaaaaaatcgcgactacccgctggcatccaaggatgccaagaagcagctgctctgtggggccgctattggcacccatgaggacgataaataccgcctcgacttgctggcacaggccggagtggacgtggtcgtactggatagttctcagggcaacagcattttccagatcaatatgatcaaatacatcaaggacaagtaccccaatctccaggtgatcggagggaacgtggtgaccgccgctcaggcaaagaaccttatcgacgcaggcgtggatgcactccgggtcggcatgggatccgggtcaatttgtatcacacaggaggtgttggcatgtgggaggccccaagcaactgccgtgtgtacacagaagcagcacccacatttccagtag

SEQ ID NO: 120495 - DNA, 501 bp, synthetic construct
  misc_feature 1..501: note = Description of Artificial Sequence: Synthetic coding sequence
  source 1..501: mol_type = other DNA
atgctgcgaggtgttctgggaaagacctttcgcctggttgggtacactattcagtatgggtgtatcgcccattgtgcattcgagtatgtgggaggcgtcgttatgtgcagtgggccttccatggagcctacaattcaaaattcagacatcgttttcgccgagaatctgagtagacacttttacggcattcagcgcggcgacattgttatcgccaagagcccatcggaccctaagagcaatatttgtaagagggtaatcggcctggaaggtgataagatactgactacaagccccagcgacttctttaaaagtcacagctatgtccccatgggccacgtatggttggaaggcgacaatctgcagaatagcactgactcacgttgctatggacccatcccctacggtcttattcgaggtcgcattttttttaagatatggccactgtcagactttgggtttctacgggctagccccaacgggcatagattctccgatgattag

SEQ ID NO: 120496 - DNA, 324 bp, synthetic construct
  misc_feature 1..324: note = Description of Artificial Sequence: Synthetic coding sequence
  source 1..324: mol_type = other DNA
atgctgaggggggtgctgggcaagaccttccggctggtaggctacacaatacagtatgggtgcatcgcgcattgtgcgtttgagtacgtggggggcgtcgttatgtgttctggcccatctatggagcccacaattcagaattccgacattgtgtttgcggagaatttgtcgaggcacttttatggtattcagcggggtgacatagtgattgctaagagcccttccgacccaaagagtaacatttgtaagcgagtgatcggcctggaaggagacaaaattctgaccacgtcaccctctgatttctttaagtcacactcctactag

SEQ ID NO: 120497 - DNA, 291 bp, synthetic construct
  misc_feature 1..291: note = Description of Artificial Sequence: Synthetic coding sequence
  source 1..291: mol_type = other DNA
atgctgaggggtgttctgggaaaaacctttaggctggttgggtatacaattcaatatggctgcattgcacattgtgcatttgaatacgttgggggagtcgtaatgtgctctggccccagcatggaacctacaatccaaaacagcgatatcgtcttcgcagaaaacctgtctaggcatttctatggtatacaacggggagatatcgtcatcgcaaaatccccctcagatccaaagtcaaacatctgcaagagggtgatcgggttggaaggagacaagatcctgaccacatag

SEQ ID NO: 120498 - DNA, 501 bp, synthetic construct
  misc_feature 1..501: note = Description of Artificial Sequence: Synthetic coding sequence
  source 1..501: mol_type = other DNA
atgctgcgtggggttctcggaaagaccttcagactggtcggatacactatccaatacggatgtatcgcacactgtgcttttgagtatgttggaggcgtcgtcatgtgctctgggccttccatggagccgaccatccagaatagtgatatcgtgtttgctgaaaatctgtctcgccacttctacgggatccagaggggagatattgtgatcgccaagtcccctagtgacccaaaaagcaatatttgcaagcgagtgatcggcctggagggtgataaaatactgaccacctcgcctagtgacttttttaagtcacactcttacgttcccatgggccacgtttggctcgagggggataacctgcagaatagcacagactcccgttgttacgggcccatcccctacggactcatcaggggaaggatctttttcaagatctggcctctgtctgatttcggctttctccgcgcctcacccaatggacaccggttttccgatgactag

SEQ ID NO: 120499 - DNA, 528 bp, synthetic construct
  misc_feature 1..528: note = Description of Artificial Sequence: Synthetic coding sequence
  source 1..528: mol_type = other DNA
atggcccaaagtcagggatgggtgaagcgctacatcaaggccttttgcaagggttttttcgtggctgtccctgtggctgtgacatttctggatcgggtggcctgtgtcgccagggttgagggtgcaagtatgcaaccgtcgctcaatccagggggcagccaatcttccgacgtggtattacttaatcactggaaagttagaaattttgaggtccacagaggtgatattgtaagcctcgtcagtcccaagaaccccgaacaaaagatcatcaagcgggtgatcgccctggagggtgacattgtgcggaccattggacacaagaacaggtacgttaaagtcccaaggggacatatctgggtggagggagatcaccacggccactccttcgattccaattcattcgggcctgtgagcctcgggctgctgcatgcgcatgcgactcacattctctggcccccagaaaggtggcaaaagctggagagcgttctaccccccgagcgccttcctgtccaacgggaagaggaatag

SEQ ID NO: 120500 - DNA, 528 bp, synthetic construct
  misc_feature 1..528: note = Description of Artificial Sequence: Synthetic coding sequence
  source 1..528: mol_type = other DNA
atggcacagtctcagggctgggtgaagagatatattaaagctttctgcaagggctttttcgtagccgttccagtggccgttacgtttctggaccgtgttgcatgtgtcgcccgcgtcgagggtgcgtctatgcagcctagtctcaatccagggggtagccagagctctgatgttgtgctacttaaccattggaaggtccgaaacttcgaagttcaccgcggcgatattgtgtctctcgtgtcacctaagaatcccgagcagaaaattattaagcgagtgatagctctggaaggagatattgtcaggacgatcgggcataaaaacagatacgttaaagtgccccggggccatatttgggtggaaggagaccatcatgggcacagcttcgattccaatagcttcggacctgtgagcctaggtctgctgcatgctcatgccactcatatactgtggccccctgagaggtggcagaaactcgagtcagtgcttccaccagagcggctgccggtccagcgagaagaagaatag

SEQ ID NO: 120501 - DNA, 528 bp, synthetic construct
  misc_feature 1..528: note = Description of Artificial Sequence: Synthetic coding sequence
  source 1..528: mol_type = other DNA
atggcccaatcccaggggtgggtgaaaagatacataaaagcattttgcaaagggttttttgtagccgttccagttgccgtcacttttctggaccgggtagcctgtgtggctagagtggaaggggccagcatgcaacctagtctgaaccccggcggttctcagtcaagtgacgtggtgttattgaaccactggaaggtgcgcaactttgaggtccaccgcggagatatagtgtccctggtctcccccaaaaaccccgagcagaagatcataaagcgcgtgattgcacttgagggtgatatagtgcgaactataggccataaaaatagatacgtgaaagtcccccgcgggcatatctgggtggagggggatcatcatggtcactcctttgattcaaactcatttggtcctgtttcactggggctgttacacgctcatgctactcacatcttgtggccacccgagaggtggcaaaaactggagagcgttctcccccctgagcggctccctgtgcagagggaagaggaatag

SEQ ID NO: 120502 - DNA, 333 bp, synthetic construct
  misc_feature 1..333: note = Description of Artificial Sequence: Synthetic coding sequence
  source 1..333: mol_type = other DNA
atggcccaatcccagggctgggttaagcgctacatcaaggccttctgtaagggcttcttcgtcgccgtgccagtggcagtcacgttcttggatagagtcgcctgcgtggccagagtagaaggtgcctctatgcaaccgtcactgaaccccggcggaagtcagagctctgacgtagtcctcctgaatcattggaaagtgcgcaacttcgaagtgcaccggggcgacattgtcagtctcgtttctccaaagaaccccgaacagaagatcattaaacgggtcatcgcgctggagggggatatcgtgcgggacggacggaaattaaaaagaatttag

SEQ ID NO: 120503 - DNA, 240 bp, synthetic construct
  misc_feature 1..240: note = Description of Artificial Sequence: Synthetic coding sequence
  source 1..240: mol_type = other DNA
atggcacaaagtcagggatgggttaagcggtatatcaaggcattctgcaagggcttttttgtggctgtacccgtggctgttactttcctcgatcgtgtagcgtgtgtggcgcgagtggaaggagcttcaatgcagccatctctgaacccaggaggttcacagagctccgatgttgttctgctaaatcactggaaggttagaaattttgaagtgcaccggggggacattgtgtcactctag

SEQ ID NO: 120504 - DNA, 528 bp, synthetic construct
  misc_feature 1..528: note = Description of Artificial Sequence: Synthetic coding sequence
  source 1..528: mol_type = other DNA
atggcccaatcccaaggctgggtgaagcgatacattaaagccttctgcaaggggttttttgtagcagtccccgttgccgtgaccttcctagatcgagtggcctgtgttgcccgggtcgaaggtgcatctatgcaacccagtctcaacccaggaggatcgcagtcctctgacgttgtactcctgaaccattggaaagtgagaaactttgaggtgcacagaggagacatagtgagcttggtgtccccaaaaaaccctgagcaaaaaataattaagcgagttatagctctggagggggacatcgtgcgcactatcggacacaaaaaccgatacgtgaaagtgccacggggccacatttgggtcgaaggagaccatcatggacactccttcgattccaactccttcggcccagtgagtttaggattgttgcacgcccacgcgacccacatactgtggccgcccgagagatggcagaagttggagtcggtgctgcctcctgagcggctgccggttcagcgggaagaggaatag

SEQ ID NO: 120505 - DNA, 555 bp, synthetic construct
  misc_feature 1..555: note = Description of Artificial Sequence: Synthetic coding sequence
  source 1..555: mol_type = other DNA
atggtgagaaagctcaaatttcatgagcagaaactactgaaacaggtggactttttaaactgggaggttacggatcacaacctgcacgagttgcgcgtccttcgaagataccggctccagcgccgtgaggattacactcgctataatcagctgtctcgcgctgttcgcgaactggctaggaggctgcgggatctgcccgaaagggatcagtttcgagtgagggcctctgccgcgctccttgacaagctctacgccctgggcctggtgcccactaggggcagcttggagttatgcgacttcgtgaccgcaagctctttttgccgtagaaggctccccacagtgctgctaaagctcagaatggcgcaacatctacaagcagcggttgcttttgtggagcagggccatgtgagggtgggaccagatgttgtgaccgatcccgcatttttagtgaccagatccatggaggacttcgtcacctgggtcgattctagtaaaataaaaaggcacgtcctggagtataatgaagagagggatgacttcgacctcgaggcctag

SEQ ID NO: 120506 - DNA, 555 bp, synthetic construct
  misc_feature 1..555: note = Description of Artificial Sequence: Synthetic coding sequence
  source 1..555: mol_type = other DNA
atggtgagaaagttgaaattccacgagcagaaactgcttaagcaggttgacttcctgaattgggaggtgaccgatcataatctacacgaactgagagtgctccgcaggtacaggctccaaagaagagaagactacacccgatacaatcagctgtctagagcagtgagggagttggctaggagactcagagatctccccgaacgggaccagtttagagtgcgcgcaagcgccgcactactggataagttgtatgcgcttgggctggtgcccacaagaggttctcttgagctgtgtgacttcgtgacagcctcctcattttgccggcggcggcttccaacggtgttgttaaaactcaggatggcccagcatctgcaggctgctgtggccttcgtcgaacaggggcatgtccgcgttggccccgacgtggtgaccgacccagccttccttgtgacccggtcgatggaggatttcgtgacctgggtggacagctctaagatcaagcggcacgtgttggaatataatgaagaacgcgacgacttcgatttagaggcatag

SEQ ID NO: 120507 - DNA, 96 bp, synthetic construct
  misc_feature 1..96: note = Description of Artificial Sequence: Synthetic coding sequence
  source 1..96: mol_type = other DNA
atggaagacttcgttacctgggtggattccagcaagattaagcgtcacgtgctagaatacaacgaagagagggatgacttcgaccttgaagcttag

SEQ ID NO: 120508 - DNA, 876 bp, synthetic construct
  misc_feature 1..876: note = Description of Artificial Sequence: Synthetic coding sequence
  source 1..876: mol_type = other DNA
atgctgaggagagaggctagattgaggagagagtacctttataggaaagcacgcgaagaagcccagaggtctgcccaagaacgaaaagaacgcctgaggcgggctctggaagaaaatcgactcatccctacggaactgcgtcgggaggccctcgctctccagggatcattagagtttgacgacgccggtggtgaaggcgtgacgtctcatgttgatgatgagtaccggtgggctggtgtggaggatcctaaggtgatgatcaccactagccgagatccgagtagcaggctcaagatgttcgctaaggagctaaagctcgtgtttccaggcgcacagcgcatgaaccggggaaggcacgaggttggtgccctggtgagagcttgtaaggctaacggagttacggacctacttgtcgtgcacgagcatcgcggtacaccagtgggtttgattgtgtctcacctccccttcggacccaccgcctactttactctgtgcaacgttgtcatgcgtcatgacattcccgacttaggcacaatgtctgaagctaagccccacttgatcactcacggtttctctagcagactgggcaaaagggtttctgacatacttagatacttgttccctgtgccaaaggatgactcacatagggtgatcaccttcgcaaatcaagacgactacatttctttcaggcaccatgtgtataagaagacagaccacagaaatgtggagcttacggaggtgggcccacgctttgaattgaagctttacatgatccgacttgggacgcttgagcaggaggccaccgccgatgtggaatggaggtggcacccatacactaatacagccagaaagcgagtgttcctcagtaccgagtag

SEQ ID NO: 120509 - DNA, 2928 bp, synthetic construct
  misc_feature 1..2928: note = Description of Artificial Sequence: Synthetic coding sequence
  source 1..2928: mol_type = other DNA
atggatctgaactccgcgtccacagtcgttttacaggtgctgactcaggctacgtcacaggacactgcggttctcaaaccagccgaagagcaacttaagcagtgggagacacagcccggattctattcagtcctcctcaacatttttaccaaccacaccctggatatcaacgtcagatggctcgctgttctgtatttcaagcacggaatagaccggtactggcggcgggtggctccccacgcgctcagtgaggaggagaaaacaaccctgagagccgggctcatcactaacttcaatgagccaatcaatcaaatcgctacacagatcgcagttcttattgctaaagtggcccgcttggactgtcctaggcaatggcccgagctcatacccactctcattgagagcgttaaggtgcaggatgacctgcgccagcaccgcgccctgctgactttctaccatgtgacaaagacgctcgcgtcgaaacgattggctgccgaccgtaagctcttctatgacctagctagcgggatctataatttcgcttgctccctgtggaatcatcacacggacaccttcctgcaagaggtgagcagcgggaacgaggcagctatcctgagtagcttagagagaacgctgcttagtctgaaagttttgcgtaaattgacagttaacggctttgttgaaccccacaaaaacatggaagtgatgggcttcctgcatggcattttcgagaggctgaaacagttcctcgagtgctcgcggagcataggcaccgacaatgtttgtcgagaccgactcgaaaagacaatcattctattcaccaaagtgctgttggatttcttggatcagcacccattcagctttacgcccctaatccagagaagtcttgaattttctgtgtcttatgtgtttaccgaggtcggagagggtgttacttttgaaaggttcatagtgcagtgcatgaatcttatcaaaatgattgtgaaaaactacgcatataaaccgtcgaaaaattttgaggacagcagccccgagacgctggaagcgcacaagattaaaatggcttttttcacttaccctactctcaccgagatatgtcgacgcctggtatcccattactttttactaaccgaggaggagctcaccatgtgggaggaggaccctgagggtttcacagtggaggaaacaggaggcgatagttggaagtattcattacgcccatgcacagaagtgctttttatcgatatctttcacgagtacaaccagaccctcacacctgtgttactagagatgatgcagacactgcaggggccaacgaacgtggaggatatgaacgccctgctcattaaggatgctgtctataatgcagtgggtctggctgcatacgaactgtttgactccgtggactttgaccaatggttcaaaaatcagctgctgcccgaactgcaagttatccataacaggtacaagcccctgagacggcgcgtgatatggctcatcggtcagtggatttcggtcaagtttaaaagtgacctgcgcccaatgctttacgaagcgatctgtaacctgctgcaagatcaagacctggtggtacggatcgagaccgcaacaactctgaagttgactgttgatgactttgaattccggacagaccaattcctgccttatctcgagacaatgtttactctgctgtttcaactgctccagcaggttacggagtgtgatacaaagatgcacgtgttgcacgtcctgtcctgcgtaattgaacgcgtgaacatgcagattcgaccctatgtgggatgcctggttcagtaccttcccttgctttggaaacaaagtgaggaacataatatgctccgatgcgctatattaacgactctgatccacctggtccagggtctcggagcagactcgaagaacctgtatcccttcctcctgccagtgattcagctatcaaccgatgtgtctcagccccctcacgtatacttgctcgaagatggtctcgagctatggctcgtgacactggaaaacagcccttgtatcacccctgaactattacgaatttttcagaacatgtcccctctgctggagttgtcatccgagaacttacgtacatgctttaaaatcatcaacgggtacatatttctgagctccaccgagttcctgcaaacttatgccgttgggctgtgtcagagcttttgtgaattgctcaaagaaattacaactgaaggccaagtgcaggttctgaaggtcgtagaaaatgcactgaaggttaaccctatcctgggtcctcagatgttccaacctatcctcccttatgtgtttaagggaataattgaaggggaacgataccccgttgtgatgtcaacctatttaggtgttatgggccgggttttgctgcagaacacgtccttcttcagctccctattgaatgaaatggctcacaagtttaatcaggaaatggaccagctcttaggaaacatgatagagatgtgggtagaccgcatggataacataacgcagcccgagagaaggaagctgagtgctttagccttactgtccttgttaccatccgataactccgtcattcaggacaagttttgcggtattataaacatatcggtggaggggctccatgatgtgatgaccgaagaccccgaaacaggaacttataaggattgtatgctgatgagccatctcgaagaacccaaggtgaccgaggatgaagagcctcctacagaacaggataaacgcaagaaaatgcttgctttgaaggaccccgtacatactgtctcgcttcagcagtttatctacgagaagctgaaggcgcagcaagagatgttaggagaacaggggtttcaaagtttaatggagacagttgacacggaaatcgttacccagcttcaggagtttctgcagggtttctag

SEQ ID NO: 120510 - DNA, 3048 bp, synthetic construct
  misc_feature 1..3048: note = Description of Artificial Sequence: Synthetic coding sequence
  source 1..3048: mol_type = other DNA
atggtgcagccaatcatacatctgggttacgtcgtgtactctctgctttacctgggctataaacccgtccagcacgtgacggccctgaacaccgtatccagctgccacaagatggtgtctatggatctgaactcggcttcaacagtggttctgcaggtcctcacacaagcaacctctcaagatacagctgtcttgaagccagccgaagagcaacttaagcagtgggaaacccagccaggattctatagtgtgctccttaatatctttacaaaccacaccctggacattaacgtgcggtggctggctgtcctgtatttcaaacacgggattgacagatactggagaagagttgcccctcatgcactgtctgaagaggagaagacaactctccgggccgggcttatcaccaattttaacgagccaatcaatcagatagccactcagatcgccgtactcatcgcaaaggttgcccgactcgactgccctcggcagtggcctgagctaattcccaccctcatcgaaagcgtgaaggtgcaggacgacctgcggcagcacagagccctgctcacattttatcacgttacgaaaacgctggctagcaagagacttgctgccgaccggaagcttttctacgaccttgcttcgggaatctacaatttcgcttgcagcctttggaatcaccacaccgatacatttctccaggaggtgagcagcggcaacgaagccgccatactgagctctctggaacggacattgttgtccctgaaagtccttcgaaagttaaccgtgaatggtttcgtcgagccgcacaaaaatatggaggtcatgggcttcctgcacggcatcttcgaaaggctgaagcaattcctagagtgtagtcggtctattggaaccgacaacgtctgtagggataggctcgagaaaaccattattctgtttacgaaggtcctgcttgatttcttagatcagcaccccttcagtttcacgcctctcattcagcgaagtctggagttcagtgtgagctatgttttcactgaagttggcgaaggggtcacattcgagcgcttcattgtgcagtgtatgaatttaattaagatgatcgtgaagaattatgcatataaaccaagtaaaaacttcgaagattcaagccccgagactctggaggcacataagatcaaaatggctttcttcacctatcctacactcacagagatctgcaggagattggtgtcacattatttcctgctcaccgaggaagagctgacgatgtgggaggaagatccagaggggttcactgtcgaagaaacggggggagactcctggaagtatagcctgcgcccctgcaccgaggtgctcttcattgacattttccatgaatacaatcaaaccttgacacccgttctgctggagatgatgcaaacccttcaggggcctaccaacgtggaggatatgaacgccctcctcataaaagatgctgtgtataatgctgtggggctggctgcctatgaactcttcgactcagtcgatttcgatcagtggtttaagaaccaattactcccggagctgcaggttattcataatcgctacaagcccttacgacggcgggtcatatggctgatcgggcagtggatatcagtaaagtttaaatccgacctccgacctatgctctacgaggcaatctgtaacctgttgcaggaccaggatcttgtggttcgcatcgagacggctaccacgctcaagctgacggtggacgattttgagttcaggacggatcagtttttgccgtacctagaaaccatgtttaccctactttttcagttgctgcaacaagtgacagaatgtgacacaaagatgcacgtgctgcacgtgctctcatgcgtgatagagagggtgaacatgcagatccgcccctacgtcggatgtttagttcagtatttacctttgttgtggaagcaaagtgaagagcataacatgcttcgttgcgccatcctgacgaccctcatccatctggtgcaaggactgggggctgattctaagaatctgtatccatttcttctgcccgtcatccagttatcaactgatgtgtcgcagccaccccacgtctacttgctggaggacgggctggaattgtggctcgtcactctggagaacagcccttgcataacccccgagttgctgagaatatttcagaatatgtctcccttgctggagctctccagtgagaacttgcgaacctgtttcaagataatcaacgggtacatctttctgtcctccacagagtttcttcagacttacgcagtggggctgtgccaatcattttgtgaactactcaaagagataactaccgaagggcaggtgcaagtgctcaaggtggtagagaatgccctgaaggtgaatccaattttggggccccagatgttccagccgattctaccctacgtttttaagggtatcatcgagggcgaacggtatcccgtagtcatgtcaacctacctcggcgtgatgggcagggtcctccttcaaaatacctccttcttcagctcactgctcaacgaaatggctcataaatttaaccaggaaatggaccagctactcggcaacatgatcgaaatgtgggtcgaccggatggacaatatcacgcagccagaaaggcgcaagctgagcgcccttgcactgctttctctcctaccatctgataacagcgtgatccaagacaaattctgcgggatcatcaatatttcagttgaaggtctgcacgacgtcatgacagaagaccccgaaactgggacttacaaggactgtatgcttatgtctcacctcgaggagcccaaagtgacggaggatgaagaaccgcctacagagcaagacaagaggaagaagatgttagcccttaaggatcccgtgcacaccgtatcactgcagcagtttatttatgaaaaactcaaggcccaacaagaaatgctgggagaacaggggtttcaatcccttatggagacggtggacaccgagattgtgacccagctgcaagaattcctgcagggattttag

SEQ ID NO: 120511 - DNA, 195 bp, synthetic construct
  misc_feature 1..195: note = Description of Artificial Sequence: Synthetic coding sequence
  source 1..195: mol_type = other DNA
atggatctaaatagtgcgagtaccgtggttctgcaggtgctgactcaggccactagccaggatactgcagtgctgaagccagccgaagagcaactcaagcagtgggaaacccagccgggattttatagcgtgctacttaatatcttcaccaaccacacactggatattaatgtcaggtggttggctgtgttatag

SEQ ID NO: 120512 - DNA, 489 bp, synthetic construct
  misc_feature 1..489: note = Description of Artificial Sequence: Synthetic coding sequence
  source 1..489: mol_type = other DNA
atggatttgaattcagcttccaccgtggtactgcaggttttgacgcaggccactagtcaagacacagccgttctcaagcctgctgaggagcagctgaaacagtgggagacccagcccggcttctattcagtcttactcaatatctttacaaatcatacgcttgatattaatgtgcgctggcttgctgttctttatttcaaacatgggattgaccggtactggaggagggtagcaccccacgcactgtctgaggaggagaaaacaactttgcgggcgggcctgatcaccaattttaacgaacctatcaaccagattgccacacaaatcgccgttctcatagcaaaggtggcaaggctggactgcccacgccaatggccagaacttattccgaccctcatcgagagtgtgaaggtgcaggacgacttgaggcagcaccgcgccttgctgacattttatcacgtcacaaaaaccctggccagcaagaggtag

SEQ ID NO: 120513 - DNA, 450 bp, synthetic construct
  misc_feature 1..450: note = Description of Artificial Sequence: Synthetic coding sequence
  source 1..450: mol_type = other DNA
atggatttgaacagcgcaagtaccgttgtgctacaggtgctgactcaggccacgagccaggatacagccgtcctgaagcctgcagaggagcagcttaagcaatgggaaactcagccagggttctattcagtgttacttaacatttttacaaatcatacactggacattaacgtgcgctggcttgcggtcctgtactttaagcatggcatcgatcgatattggaggagagtggcccctcacgcactgtccgaagaggagaagacaacactccgcgctggactgattactaattttaatgagccaataaaccagatagcgacccagatcgccgtcttaatcgccaaggtggcccggctcgattgccccagacagtggccagagctgatacctaccttgattgaatccgtgaaagtgcaagatgatctccgtcaacaccgcgcccttctgtag

SEQ ID NO: 120514 - DNA, 1425 bp, synthetic construct
  misc_feature 1..1425: note = Description of Artificial Sequence: Synthetic coding sequence
  source 1..1425: mol_type = other DNA
atgatgcagaccctgcagggtccgaccaatgtggaggacatgaatgctttgcttataaaggacgctgtttataatgctgtcggcctggcagcttacgagctattcgattctgtggactttgatcaatggtttaagaaccagcttctgcccgaactgcaggtaattcacaatagatacaagccactgaggaggcgggtgatttggctgatcggtcagtggatctccgtcaagtttaagagtgatctcaggccaatgttgtatgaggctatctgtaatcttttgcaagatcaggacctggtggtccggatcgagactgctaccaccttgaagctcacagtggatgactttgaattccgtactgatcaatttctcccatacttggaaacaatgtttactctcttgttccagctgctgcagcaagttactgaatgcgatactaaaatgcacgtgcttcacgtcctgagctgcgttatcgaacgggtgaatatgcaaatacgaccatacgtcgggtgtttagtccagtacttgccgctgctttggaagcagtccgaggaacacaacatgctccgctgtgccatcctgaccaccctgattcacttggtgcagggattgggtgcagactccaagaatttgtacccctttttacttcccgttattcagctcagtaccgatgtctctcaaccacctcacgtttacttgctggaagatggcctcgagctttggctggtgaccctcgagaactcaccatgtataacacccgagctactaaggatttttcaaaacatgtcaccactgctcgaactgtctagtgagaatctgcgtacatgctttaagattataaatgggtatatcttcctttcaagcactgaatttctgcaaacttatgcagttggactgtgccagtccttctgtgaactgcttaaggagatcaccaccgagggtcaggtgcaggtcctgaaagttgtcgaaaatgcccttaaagtcaatcctatactggggccacagatgtttcagccgatactgccatacgttttcaagggcattatcgagggagaaagatatcctgtcgtcatgtcgacctacttgggtgtgatgggtagagtgttgttgcaaaacaccagcttcttctcaagcctcctcaacgaaatggcccacaagtttaatcaggaaatggatcagctcctggggaatatgatcgagatgtgggtggaccggatggataacatcactcagcctgagcgaaggaaactcagcgctcttgccttgttatccttgctgcctagtgacaactcagtaattcaggacaagttttgtgggatcataaacatatcagtggagggcctgcatgatgtcatgacagaggaccctgagacgggcacatacaaggattgcatgctgatgagccatctggaagaacctaaatag

SEQ ID NO: 120515 - DNA, 3117 bp, synthetic construct
  misc_feature 1..3117: note = Description of Artificial Sequence: Synthetic coding sequence
  source 1..3117: mol_type = other DNA
atggatccaaacacaataattgaggcgttacgtggcacgatggacccagcactccgggaggccgcagagcgacagctcaacgaggcacacaaatctctaaacttcgtttctactctgctccaaataactatgtccgagcaactggatctaccggttagacaggctggcgtgatctacctaaaaaatatgatcactcagtactggccggaccgagagaccgcacccggcgacatctcaccctataccattcctgaggaggacaggcattgtatacgggaaaatattgtggaagccattatacactctcccgaactgatccgggtgcagctgaccacctgtatccatcacataattaaacacgattatccctcaagatggacagctatagtcgacaagataggtttttatctccagtccgacaattccgcctgctggttaggtatcctgctgtgcctctaccagttagtgaagaactacgaatacaaaaagcccgaggaaaggtccccgttggtggctgctatgcaacatttcttgcccgtgctcaaagatagattcatacagttactgtctgatcagtcagaccagtcggtactaattcagaagcagatttttaagatattttacgcactagtccaatacacactgcccctggaactgattaaccaacagaacctgacagagtggatcgagatactgaagactgtggttaaccgggacgttcccaacgaaactctgcaggtcgaggaggacgatcgacccgaactaccttggtggaaatgtaagaagtgggcgttgcacatcctggccaggctgtttgagcgctatggatctcctggcaatgtgagcaaggagtacaacgagttcgccgaggtgttcctcaaggcgttcgccgttggagtgcaacaggtccttctgaaagttttgtaccaatataaagagaagcagtatatggcgccccgggtacttcagcagactctcaactatattaatcagggcgtttcccacgcactgacctggaagaatctgaagccgcatatccaagggatcatccaggatgtaattttccccctgatgtgttacaccgatgccgacgaagaactttggcaagaagatccatacgagtatattaggatgaagttcgatgtattcgaggatttcattagcccaacaactgcagctcagaccttgctattcaccgcttgctctaaaagaaaagaggtgctgcagaaaactatggggttttgctatcagattctgactgagcctaatgccgatccacgcaagaaagatggtgcccttcatatgatcggctcgctcgctgagatcttactaaaaaagaaaatctacaaggaccaaatggagtatatgctccagaaccacgtgttccccctgttctcttcagaactgggctatatgagagcccgcgcatgctgggtcctgcactacttttgtgaggtgaagtttaagtcagaccagaatctgcaaactgcccttgagctgacacggcgatgcttaatcgacgacagagagatgccagtgaaggttgaggcagcaatcgctctgcaggtgctgatatctaatcaggagaaagccaaagagtacataactcccttcattcggcccgtaatgcaggctctacttcatattattagggagacggagaatgacgatctgactaacgtcatccagaagatgatctgcgagtactccgaggaggtcacaccaattgccgttgaaatgacgcagcaccttgcaatgacttttaaccaggtaatccagactggccctgacgaggaggggtcagacgataaggctgtaacagctatgggtattctgaataccattgataccctgcttagtgtcgtggaagatcataaggaaattactcagcagctggagggaatctgtctgcaggtgataggcaccgtgttgcagcagcacgtcctcgagttctacgaggaaatcttctccctggctcattccctgacatgtcaacaggtctccccccagatgtggcagctgctccctttggtctttgaggtcttccagcaagacggcttcgactacttcaccgacatgatgcccttactacataattatgtgactgtggatacagacacgctgctctccgataccaagtacctggagatgatctactctatgtgcaagaaagtgctgaccggcgttgctggtgaggacgctgaatgccatgcagctaaacttctcgaggttattattcttcagtgtaagggacgggggatcgatcagtgtatccccctctttgtcgaggccgcactcgaaaggcttactcgggaagtcaagacatccgaactgcgaactatgtgtctccaagtggcgatcgccgcgctgtactataacccccacctcctactcaacacgctagagaatctgcggtttccaaacaacgtggagccggtcacaaatcactttattacccagtggctcaacgacgtcgactgtttcctaggccttcatgatcgaaaaatgtgtgtgctgggactttgcgctttgattgatatggagcagatcccacaagttctcaatcaggttagcggacagatacttccggccttcattctgctgttcaatggactgaagagagcctatgcctgccatgctgagcacgagaacgactcagatgacgatgacgaggctgaagacgacgacgagaccgaggagctgggctccgacgaagatgatatagatgaagatgggcaggaatatctggagatactggccaaacaggcaggagaggatggggacgatgaggattgggaggaagatgatgccgaagaaaccgcgctagaggggtactccacaattatcgacgatgaagataatccagttgacgagtatcaaatttttaaagccattttccaaactatacagaacaggaatcctgtgtggtaccaggccctgacacatggtctaaatgaggaacagaggaaacaattgcaggatatcgctactttggcagatcagcgaagggctgcacacgaatctaagatgatcgaaaagcacggggggtataagttctcagcgccagttgtgcccagttctttcaactttggcggccctgcccctggaatgaattag

SEQ ID NO: 120516 - DNA, 3114 bp, synthetic construct
  misc_feature 1..3114: note = Description of Artificial Sequence: Synthetic coding sequence
  source 1..3114: mol_type = other DNA
atggaccttaacagaataattcaggccctgaaggggacgatcgacccaaagctgcggattgctgcagagaatgagctgaatcagtcttataaaataatcaactttgcccccagcttgttaaggataatcgtttctgaccatgtggagtttcccgtcaggcaggcagccgctatttacttaaaaaatatggtgacccagtactggcccgacagggagccccccccgggagaagctatctttccattcaatatacatgagaatgacagacagcagattcgagacaatatcgtcgagggcattatccgatcacctgacttggtgcgcgtgcaattgaccatgtgcctccgggctattatcaaacacgacttccctggacactggccgggggttgtggacaagatcgattactacctgcagagccagtctagtgcatcatggttaggatccttactctgcctataccagctcgtgaagacatatgagtacaagaaagccgaggagcgcgagcccctgatcatcgccatgcagatattcctgcccaggatccaacaacaaattgttcagcttcttcctgattcaagttactactccgttctgctgcaaaaacagatactcaaaattttttatgcgctagtccagtacgcgttacctcttcagctggtgaataatcagacgatgacgacgtggatggaaatctttagaacgataattgacagaacagtccccccagagacactacatattgacgaggacgatcgacccgagctggtgtggtggaagtgtaagaaatgggctcttcatatcgtggcccggcttttcgagcgatacggtagtccagggaatgtgaccaaggagtattttgaattcagcgagttctttctaaagacctacgccgtgggtatacagcaagtactcttaaaaattctggatcagtaccgccagaaagagtatgtggcccccagagttttgcagcaggccttcaactatctcaaccagggcgtggtgcattccatcacctggaaacagatgaagccgcacatccaaaatatatctgaagatgtaatcttctcagttatgtgctacaaggatgaggacgaggagctctggcaagaggacccttacgagtatatccggatgaagtttgatattttcgaggactatgcctcgccaaccactgccgcccaaaccctattgtacaccgcagccaagaagcggaaagaagtccttcctaagatgatggctttttgctaccagatcttgactgatccaaatttcgacccccgcaagaaggatggagctctccacgtgattgggtcacttgccgagattctactcaagaaatcactctttaaagaccaaatggagctgttccttcaaaaccatgtgtttccactgctcttatccaatctgggatatctccgggcaagatcttgctgggtgctccatgcattctccagcctcaagttccacaatgagctaaatctgcgcaatgcagtggagcttgcaaagaaatcccttatcgaggataaagagatgccggtaaaggtggaggctgccctcgctctgcagagcctcatctccaaccaaatccaggccaaggagtacatgaaaccgcacgttaggcccatcatgcaggaactgctgcatattgtcagagaaacagaaaacgacgatgtgactaacgtgatccaaaaaatgatttgtgagtacagccaggaagtagccagtattgctgtcgatatgacacagcacctcgccgaaatattcggcaaggtcctacagtctgacgagtatgaagaggtagaggataagactgtgatggctatgggaattctgcacacaatcgataccatcctgaccgtggtggaagaccataaggagataacccagcagttggagaatatttgtctgcgcattattgacctcgtgctgcaaaaacatgtgattgagttctatgaggagatcctctcccttgcttacagcctcacctgccacagcattagtccacaaatgtggcagctgcttggcatcctctatgaggtgttccaacaagattgcttcgagtacttcacagatatgatgcctcttctgcacaactacgtgacaatagacactgacaccctgctgtcaaatgcaaaacatttggagatcttattcacaatgtgccgcaaggtgttgtgtggcgatgcgggcgaagatgctgaatgtcacgccgcgaaactcctggaggtgattatccttcagtgtaaaggccgtggaatcgatcagtgtatccctctgtttgtgcagctcgtgctggaaaggctcaccaggggtgtgaagacctccgagctccgtaccatgtgtctgcaggtggccatcgcggccctctattacaaccctgatctgctgctgcacacattagaacgcatacaactcccgcacaatccagggcccataacggtccagttcataaaccagtggatgaacgacaccgactgttttttgggtcaccacgatcgtaagatgtgcatcatcggtctgagcattctgttggagctgcagaaccggcctccggcagtggacgcggttgttggacagatcgttccctccatcctgtttctgtttctggggctgaagcaggtatgtgctactcggcaattagtcaaccgagaggacaggagcaaagccgaaaaggctgacatggaagagaatgaggagattagctcagacgaagaggagaccaacgtgaccgcgcaggccatgcaatctaacaacgggcggggcgaagatgaggaggaggaagatgacgattgggacgaagaagtgcttgaggaaacagcccttgaaggtttctccacacctttggacctggataattccgtggacgaatatcagttctttacacaggccttgataacagtccaaagtcgggatgccgcctggtaccagttgctgatggcacccctgagtgaggaccagagaacagcactccaggaagtttatacactcgctgagcaccggcggacagtggccgaggcaaagaagaagatcgaacagcagggcggtttcacctttgagaataagggagtgttgtccgcattcaacttcgggaccgtgccttcaaacaactag

SEQ ID NO: 120517 - DNA, 2499 bp, synthetic construct
  misc_feature 1..2499: note = Description of Artificial Sequence: Synthetic coding sequence
  source 1..2499: mol_type = other DNA
atggaaagcctgactctgaaaggatacgccctccccctgcagttagttaacaaccagaccatgactacttggatggaaatttttcggacaattattgacagaaccgtcccaccagaaaccctgcatatcgacgaagacgacaggccagagctggtctggtggaaatgcaaaaagtgggccctgcacatagtcgcccgactgttcgagaggtacggatcgccaggaaacgtaactaaagagtatttcgagttcagcgagtttttcttaaagacctatgcggtgggcattcagcaggtgctcctaaaaatacttgaccagtacagacaaaaggagtatgtcgcacctagagtgctgcaacaggccttcaattacctgaatcagggggtggtgcatagcatcacctggaaacagatgaagccacacattcagaatattagcgaggacgtgatcttctcagtgatgtgttacaaggacgaagatgaagagctatggcaggaggatccctatgagtatatcagaatgaaattcgacatcttcgaggattacgcttcccctacgaccgcagctcagaccttactttatactgctgccaagaagcgcaaagaggttctgccgaaaatgatggcattttgctatcagatccttaccgatcccaacttcgacccacgcaagaaggacggtgcactgcacgttattgggtcacttgctgagattctgctaaagaagagcctgttcaaagaccagatggagcttttcctacagaaccatgtgttccccttgttgcttagcaatctagggtacctgcgcgcccgtagttgctgggtgcttcatgctttctcttctctgaaattccacaacgagctgaatctgaggaatgcagtagaactggccaagaagagcctgattgaggacaaagaaatgccagtcaaggttgaagccgctttagctttgcagtccctgattagcaatcaaatccaggcaaaagagtatatgaaaccacacgtcagacccatcatgcaagaactgttacacatcgtgagagagacagagaacgatgacgtcacaaatgtcattcagaaaatgatatgcgagtattcgcaggaagtggcttccattgctgtggacatgacccagcacttagcggaaatctttggcaaagtgctgcagtccgatgaatacgaggaagtggaggataaaacggtgatggccatgggcatactgcataccatagatacaattctgacagttgtggaggatcacaaggagatcacccagcagctggagaacatttgtctcagaattattgatctcgtcctgcagaagcatgtgattgagttttatgaggaaattctgtccttggcctattcattaacctgtcactccatttcaccccaaatgtggcaattgctcgggatcttatacgaagtgtttcagcaggactgctttgaatattttaccgatatgatgcctcttctgcataattacgttacgatcgacaccgacactcttctgtccaacgctaaacaccttgaaattctgttcaccatgtgccggaaggtgctgtgcggcgacgctggggaggatgccgagtgtcatgctgctaagctcctagaagtgattatcctgcagtgtaagggacgaggcatcgaccagtgcattcccctgtttgtgcagcttgtcctcgaaagactaaccaggggggtcaaaacaagcgagctgcgcaccatgtgcctacaggttgccatagcggccctctattataatcccgatctcctgctccacactttggaacgcatacagctgccccataatccaggacccattacggtccaattcatcaaccaatggatgaacgataccgactgcttcttgggccaccacgacagaaagatgtgcattattggcctgagtatcttactggaactgcaaaatcgccctcccgccgtggacgctgtggttggacaaatcgtgccaagtatcttgtttttatttttaggcttgaagcaggtatgtgccacacgtcaactggtgaatcgggaagaccgctcaaaggccgaaaaggccgatatggaggagaatgaggagatatcatccgatgaggaggaaactaatgttacagctcaggcaatgcagtccaataatgggcggggcgaggatgaggaggaggaagatgacgactgggatgaagaggtactggaggagacagcccttgaaggattctccacgcctctggatcttgataacagtgtcgacgaatatcaattcttcactcaagccctcataacggtccagtccagggacgctgcttggtatcagcttcttatggctcccctctcagaggatcagcgcacagccctacaggaagtttacactctggcagaacatcggagaactgtcgctgaagccaaaaagaaaatagagcagcagggtggcttcacctttgaaaataaaggtgtgctttccgctttcaactttggtactgttccgagcaataactag

SEQ ID NO: 120518 - DNA, 1542 bp, synthetic construct
  misc_feature 1..1542: note = Description of Artificial Sequence: Synthetic coding sequence
  source 1..1542: mol_type = other DNA
ttgtcgagtggtcacgaactggcaaaagaatatatgaagccgcacgtgcgtcctatcatgcaagagctgcttcacatcgttcgcgagactgaaaacgacgatgtcactaacgtgatccaaaagatgatatgcgagtatagtcaagaggtggcatccatcgccgttgacatgactcagcatctagccgaaatctttggcaaagtgttgcagtcagacgaatacgaagaagtggaagataaaacggtaatggccatgggcatcctgcacactatcgatacaatccttaccgttgtggaagaccacaaagaaatcactcagcagctggagaacatctgtttaagaatcatcgacctggtcctgcagaagcacgtgattgagttctacgaagaaatcctcagccttgcctatagcttaacatgtcacagtataagcccgcagatgtggcagcttctgggaatcttgtatgaggtttttcagcaggattgctttgaatacttcaccgatatgatgcccctgcttcacaattatgtgacgatcgacacagacaccctcctgagcaatgctaaacatctggaaatcctttttaccatgtgcaggaaggtcctgtgcggggacgcgggagaggatgcggaatgccacgctgccaaactgctggaggtgatcatactgcagtgtaagggcaggggcatcgaccaatgtattcccctctttgtgcagttggttcttgaaaggctgacccgcggtgtgaaaacaagcgagctcaggacaatgtgcctgcaggttgccattgcagccctgtattacaatccggacctactacttcacacgcttgaacgcattcagttaccccataaccccggcccaattacagtccaattcattaaccagtggatgaacgatacggattgtttcttgggtcatcacgacaggaagatgtgcataattggcctttccatcctgctggaactccagaaccgcccaccggcagttgatgcagtggttggccagattgttccaagcatcctgttcctcttcctgggcctgaagcaggtgtgcgctacccggcaattggtaaatcgcgaagaccgatcaaaggccgagaaggctgacatggaggaaaatgaagaaatttcatcagacgaggaggagacaaacgtcaccgcccaggccatgcagtccaacaacggacgaggagaggacgaagaagaggaagatgacgactgggatgaggaagttttggaggagacagccctggaaggttttagcaccccgctcgatctcgacaacagcgtggacgaatatcagttcttcacccaggcactgatcaccgtgcaaagcagggatgccgcttggtatcaactgctgatggccccgcttagtgaggatcagagaactgctctacaggaagtgtacaccctagccgagcacaggcggactgtggcggaggcaaaaaagaagatagaacagcagggcgggttcactttcgagaacaaaggagtactgtccgcatttaactttgggacagtgccatccaataactag

SEQ ID NO: 120519 - DNA, 3546 bp, synthetic construct
  misc_feature 1..3546: note = Description of Artificial Sequence: Synthetic coding sequence
  source 1..3546: mol_type = other DNA
atgcctgaaaacccagctactgacaaactccaggtgctgcaggtgctggaccgcttaaagatgaaactacaggaaaagggtgatacatcccaaaacgagaagctttcgatgttctacgagacccttaaaagcccactattcaaccaaattttgactctgcaacagtccattaaacaactaaagggccagttaaatcatatcccctcagactgctctgcaaatttcgacttttctaggaagggtctcttggtgtttaccgacggctcaataaccaacggcaacgtccatcgtccaagcaataactcaacggtctccgggctgtttccctggacacctaaactgggtaatgaagacttcaatagtgtgatccagcaaatggcccaggggcggcagatcgagtatattgatattgagcgcccttccaccggcgggctgggtttctctgtcgttgcgctgagaagccaaaatctggggaaggttgatatcttcgtaaaagacgtacagcccggctccgtggctgacagagatcagcgtctgaaggaaaatgaccagatactcgcaattaatcatactccccttgaccagaacatctctcaccaacaggccatcgcattgctccagcaaactaccggtagcttgagactaattgtggccagagagccagtgcatacaaaatcctcgacttctagctccctcaatgacacaaccctccccgagacagtctgttggggacacgtggaggaggtggaattaattaacgatgggagcggattaggttttggtatcgtgggcggcaaaacgtcaggggttgtagttcgcacaatcgtccccggcggccttgccgaccgggacggccggctccagaccggtgatcacattttaaagatcggaggcacaaatgtgcaaggaatgacttcagaacaggttgcccaggtactccgtaactgcggcaacagcgtgagaatgctagttgcacgtgaccctgccggtgacataagtgtcaccccacctgcgcccgcggccctgcctgtggctctcccaacagttgcaagtaaggggccaggcagcgactccagcctgttcgagacgtacaacgtggaattggtccgcaaggatggccagtcattagggatcaggatcgttggttacgtggggacctcgcataccggggaggcttccgggatctatgtgaaaagcatcattccggggagcgcagcctatcacaacgggcatatccaagttaatgataaaatcgttgccgtggatggagttaatattcagggcttcgccaatcacgacgtggtggaagtgctgagaaatgctggtcaggtcgtgcacctcaccctagttcggcggaaaacaagtagttctacttctcctctggagcctccttctgatcggggcacggtcgtagagccattgaaacctccagcactgtttctgactggggccgttgaaacagagaccaacgtcgacggagaggacgaggagatcaaggaacgaatcgataccctgaagaatgataatatacaagctttggagaaactggagaaggtgccagactcaccagaaaatgagctgaaaagcaggtgggagaacctgctaggcccagactatgaagtgatggttgcaactctggacacgcagatcgctgacgacgctgagctacagaagtacagtaagttactgcctatacataccctgcgccttggggtagaggttgattcattcgatgggcatcattacatctcctctattgtgtctggaggtcccgtggacacactggggctattgcagccagaggatgagctgcttgaagtgaacggcatgcagctatacggcaagagcaggagagaagctgtcagctttcttaaagaggttccaccaccttttacactggtgtgttgcagacggctatttgatgacgaggcaagcgtggatgaacccaggaggacggagacgtccctacctgagaccgaagtggaccataacatggatgtaaataccgaggaggacgatgatggtgagctcgccctctggtcacccgaagtgaaaatcgtcgagttggtaaaggactgcaagggcctaggttttagtatccttgactaccaagaccccttggaccctacaagaagcgtgatagtaatccgctccttagtggcggacggagtggccgaacggtcaggcggtttactgcccggagatagacttgtctcggtcaatgaatattgtcttgataatactagtctggctgaagcagttgagattttgaaggctgtacccccagggttagttcacctcggcatctgcaagccgttagtcgaggacaacgaggaggagagctgttacatcctgcatagtagtagcaatgaagacaaaacagaattctctgggacaattcacgacattaattcctccctcatcttggaggcacctaagggtttccgggacgagccttactttaaagaggagctcgtcgacgaacctttcttggatttggggaagagctttcactcacagcagaaagaaatagagcagagcaaagaagcctgggagatgcacgaattcctgactcctaggctgcaggagatggacgaagaaagggaaattctggttgatgaggaatacgagctctatcaagatccatctcctagcatggaactctaccctctcagtcacatccaggaggcaacacctgttccttctgtgaacgaacttcatttcggcacccagtggctccacgacaacgaaccgtctgagtcgcaggaggcgcggaccgggcgcaccgtgtacagtcaagaggcccagccatatgggtactgcccggaaaatgttatgaaggagaacttcgtaatggaatccctgcccagtgttccatcgactgaggggaattcccagcaagggcgcttcgacgatctggagaacttgaactcactggcaaagacttcactagacctcggcatgattcctaatgacgtacaaggcccaagtctgctcatagacttgcccgttgtagctcagaggagggaacaggaggacctgcctttgtatcagcaccaagctaccagggttatatcaaaagcatctgcctacactggcatgcttagctctaggtatgcaactgacacatgtgagctgccagagagggaggagggggagggggaagaaacacccaacttcagtcactggggcccaccccggatcgtggagatcttcagagagcccaatgtcagtttgggaatatccattgttggggggcagaccgtgataaaaaggctcaaaaatggcgaggaattgaagggcatttttatcaagcaggtactggaagacagtcctgcaggcaagactaacgcgctcaagactggggacaaaattctggaagtgagtggggttgacctccagaacgcctcacatagcgaggccgtcgaggccatcaagaacgctggcaatcctgtggtgttcatagtccagtctctgagcagcacacctgcctgggtcacagagcaggacagcgtctctaaaaagaagaagaaccacgagggctag

SEQ ID NO: 120520 - DNA, 600 bp, synthetic construct
  misc_feature 1..600: note = Description of Artificial Sequence: Synthetic coding sequence
  source 1..600: mol_type = other DNA
atggtgcagggcggcttcccagaaaaaattagacagcgatacgccgacctgcccggtgaactgcatatcatcgaactggaaaaagacaagaatggcctgggacttagtctggctggaaacaaagatcggagcagaatgtccatatttgttgtcggaatcaaccccgagggacctgccgccgcagatggacggatgcggatcggtgatgaacttctcgagattaataaccagattttgtatggcaggagtcaccaaaatgcctctgcaatcattaagactgctccttctaaagtgaagctggtgttcatcagaaatgaagatgcggtaaaccaaatggctgtaacacctttccccgtacccagctcatcgccttcgtcaatcgaggatcagagcggcacggaaccaatttcatctgaagaagatggatctgttgaagtggggatcaagcagctcccggaaagtgagagctttaaactggctgtaagtcaaatgaaacaacaaaaataccctacaaaagtctcattcagcagccaagagattcctcttgctcccgcttcctcttaccacagtaccgatgccgactttaccggctacgggtag

SEQ ID NO: 120521 - DNA, 4746 bp, synthetic construct
  misc_feature 1..4746: note = Description of Artificial Sequence: Synthetic coding sequence
  source 1..4746: mol_type = other DNA
atgcccgaaaacccagccaccgacaaactgcaggtgctccaggtgctggaccgtttaaagatgaagctgcaagaaaaaggtgacacgtcccagaatgagaaactaagcatgttctatgaaaccttgaagtcccccttgttcaaccagattctgactctacagcagagcataaagcaactgaagggacagctaaaccatatcccttctgattgcagcgcgaatttcgacttctcaaggaaggggctgcttgtgttcactgatgggtccattacgaatggaaatgtgcaccgcccttcaaacaactctacagtgtctggtttgtttccgtggacaccaaaattggggaacgaggactttaacagtgtgatccaacaaatggcgcaagggcgccagatcgagtacattgatattgaaagaccttccactggaggactgggcttttccgtcgtggccctccgtagccagaatctggggaaggtggacatcttcgtcaaagatgtgcagcccggaagcgtggcagaccgggatcaacggctcaaagaaaatgatcagatcctggccatcaatcacacacctttagatcagaatatctctcatcaacaggctatagcactcttgcagcagaccaccggcagtctgcgactcattgttgctagggaacctgttcacacaaaatcatcaaccagcagttcccttaatgacactactttgcctgagacggtgtgttggggacacgtggaggaagtcgagctgattaacgatggcagtgggctaggcttcggcatcgtggggggtaaaacctctggcgtggtcgtacgaacaatcgtgccaggtgggctcgccgacagggacgggcggctccaaaccggcgatcacattctgaaaatcggcgggaccaatgtccagggcatgactagtgagcaggttgcccaggtgctgcgcaattgtggtaattctgtgagaatgctggtagcgcgcgacccagccggcgacatttctgtgactccccctgcccctgctgctctcccggtagccctgccaaccgtggcaagcaagggacccggtagtgacagcagtctatttgaaacctacaatgttgaactcgtccgaaaagatggccagagtctaggaataaggatcgtgggatacgtagggacaagtcatactggggaagctagcggcatctatgtaaaaagcatcattccgggaagcgccgcataccataatggacacatccaggttaacgataaaatcgtggcagtggatggagtcaatatccagggttttgcgaaccacgatgtcgtcgaggtactgcggaacgccggccaggtcgtgcatctcacactggtcaggcggaaaacttcaagctccacttcccccctggaacccccttcagaccgtggaaccgtggttgagcccctcaagcccccagcactctttttgactggagcagtcgagacggaaactaatgtggacggagaagacgaagagattaaagagcggatcgataccctcaagaacgataatatacaggcactggagaagcttgagaaggtaccggacagtccggagaatgagctgaaaagccgctgggagaacctgttaggacccgactacgaggtgatggttgccacacttgacactcaaattgctgacgacgcggaattacaaaaatattccaagcttctccccattcacacgcttcggctcggggtggaggttgattcctttgacggccatcactatatatcatccattgtgtcaggcgggcctgtagacactctaggcctgcttcagccggaggacgaactattggaagtgaacgggatgcagctctatggaaaaagcagaagggaagctgtctcatttctcaaagaagtaccccctcctttcacactagtatgctgtcgcaggctgtttgatgacgaggccagcgtcgacgaaccccgtcgcactgagacttcgttgccagagacagaggtagatcataacatggatgtgaacaccgaagaggacgatgacggagagctcgctttgtggtcaccagaagtgaaaatcgtggagctggttaaggattgcaaaggcttgggcttttcaatcctggattaccaggacccgctcgacccgacccgcagcgtcatcgtcatcaggagtcttgtcgccgacggcgtggcagagcgatccggcggcctcctgccaggagacaggttggtcagtgtcaatgaatactgtttagacaacacgtctctggccgaagctgtggaaatcctcaaggccgtgccacccggattggtacacctaggaatatgcaaacctctcgtggaagacaacgaagaagaaagctgctatatcctgcatagttctagcaatgaagacaagacagagttttctggtactatccatgacattaattcttcactgatcttagaagccccgaaaggtttccgcgacgagccctactttaaagaagaactggtggacgaaccattcctcgatttgggcaagtcatttcactcgcagcaaaaggagattgaacagagcaaagaggcatgggagatgcacgaatttctaacgcctagattacaggaaatggacgaagaaagagagatcttagttgatgaggagtatgagttgtatcaggacccctccccgagtatggagctatatcccctgtcccatatacaggaagccactccagtgccgagtgttaatgagcttcattttggaacccagtggctgcatgacaacgaacctagcgaaagtcaagaggccaggacagggcgcacagtgtatagccaggaagcgcagccttacgggtactgcccagagaacgttatgaaggagaattttgtcatggagtccctgccctccgtgcctagtacggaggggaactcccagcagggccgctttgacgatctggaaaacctcaattctctggcaaagacaagcctggatttgggaatgataccaaacgatgtacaaggcccttctctcctgattgacttgcccgtcgtcgcgcagaggagggaacaggaggacctacccttataccagcaccaggctacaagagtgatttctaaagcttccgcctatactggtatgctaagcagccggtacgcaacagacacgtgcgagctcccggaaagggaggagggggaaggggaggagaccccaaatttctcacactgggggccaccgcgaatagtggagattttccgcgaacctaacgtgtctctgggtatctccatcgtcggtgggcagacagtaataaaaaggctgaaaaacggggaagaactgaagggcattttcatcaagcaagtattagaggactcccccgccgggaaaaccaacgcattgaagactggcgacaaaatcttggaagtctccggcgtggacctgcaaaacgcgagccacagcgaggctgtcgaggcaattaagaatgctgggaatcccgttgtgtttatcgttcagtcactctcctcgaccccaagggtcatacccaatgtgcataataaggcaaacaagattaccggtaaccagaatcaagatacacaggaaaagaaggagaagcgccagggcacagcacctccccccatgaaactcccccctccttataaggccctcactgacgattctgacgagaacgaggaagaagacgctttcacagatcaaaagatacgacagaggtacgccgatctgcccggagagctccacatcatcgagctcgaaaaggacaagaatggacttggactgagccttgccgggaacaaggacaggagtcgcatgagcatctttgtggttggcattaaccccgagggccccgcagcagccgatggccggatgcggattggggacgaactgctggagatcaataatcagatcctctatggtcggtcacatcagaacgcctccgcaatcattaagactgcccctagtaaagtaaagctagttttcattagaaatgaagacgctgttaaccagatggccgtgacccccttcccagtgccttcttccagcccaagctcgatcgaagaccagtcaggcaccgaaccaatttcatcggaagaggatgggagcgtggaggttggcattaagcagctgccggagagtgagtcatttaagctagccgtaagtcaaatgaagcagcagaaataccccactaaggtttccttcagttcacaggagattccacttgcccctgcctctagttaccacagcacagacgcagactttaccggctacggtggctttcaggctcccctgagcgttgacccggcaacctgtcccattgtaccaggccaagagatgatcatcgaaatttctaaaggccgctcaggcctcgggctgtcgatcgtgggcgggaaagacactccccttttctggcgccttggaagtcccagagcctggtctcagcatctggtgagagcctttatgctccatcatccagtgacagaggtcgaaggtcagaatgccatcgtgatccatgaggtttacgaggagggagcagcagctcgggacggccgactatgggccggggatcaaatcctcgaagtgaacggggtggatctgagaaactcaagccacgaagaggccatcacagccttgcgtcagacacctcagaaggtcaggctggtggtgtatcgtgatgaggcccactatcgggatgaggaaaatctggaaatttttccagtggatctccagaagaaggccggacgaggtttaggcttgagtattgtgggcaagtag

SEQ ID NO: 120522 - DNA, 5406 bp, synthetic construct
  misc_feature 1..5406: note = Description of Artificial Sequence: Synthetic coding sequence
  source 1..5406: mol_type = other DNA
atgcccgagaacccagccactgataagctgcaggtgctgcaggtgttggaccgcctaaaaatgaaactgcaggaaaaaggtgataccagtcagaatgagaagctttccatgttctacgagactctgaagagccctctgttcaatcagattctgaccctgcagcaatccatcaagcagcttaagggtcaactgaaccatatacccagcgactgctccgccaatttcgatttcagccggaaaggattgctggtctttacagacggatccatcactaacgggaatgtccatcggccttccaataacagtaccgtttccggcctgttcccatggactccgaagctaggtaacgaagattttaacagtgttatccaacagatggcacagggacgccagattgagtacattgacatcgagagaccttcaactggaggtctcggattttccgtcgtagcgttgaggagtcaaaatctcggaaaagtagacattttcgtcaaagacgtgcagcccggaagtgtggccgaccgagaccagagactgaaggaaaatgaccagattctggcaatcaatcatacacctctggaccagaacatctctcaccaacaggcgattgcgctcttacagcagacgacaggatcgctgcggctgatcgtggcccgggagcccgtacatacgaaatcaagcacctcctcctcactgaatgacacaaccttaccagagaccgtatgctggggacacgtggaagaggtcgaactgatcaacgacgggagcggactgggctttggtattgtaggaggcaagaccagcggtgtggttgttagaacgatcgtgcccggagggttagccgaccgcgatggcagactgcagactggcgaccacatactgaagatcggtggcaccaacgttcagggtatgacctcagaacaagtggcccaggttctgcgcaattgcggtaattctgtgcggatgttagtggctcgggaccccgccggcgacatatccgtcaccccacccgcccctgccgccctcccagtggccttaccaactgtggcctctaaagggcccggctccgattcttcgttattcgagacatacaatgtggagctcgtaaggaaagatggccaatctttggggattaggattgtcggatacgtgggcacttcacatacaggagaggcaagcggaatatacgttaagagcattatacctggtagcgccgcttaccacaacggacatatccaggtgaacgacaaaattgtggctgtcgacggagtgaacattcaggggtttgccaatcatgatgttgtggaggtccttcgaaacgcaggccaggtggtgcacctcacccttgtgaggagaaaaacatccagctcgacctccccactggagcctccttccgatcgaggcaccgtggtggagccactgaaaccccctgctctgttccttaccggcgctgtcgagactgaaacaaatgtggacggcgaagacgaagaaattaaggagcggatcgatacactcaagaatgacaacatccaggccctggaaaagctcgagaaggtgccagatagtcccgagaacgaactgaagtcacggtgggaaaacctgctcggtcccgactatgaggttatggttgctaccctggacacacagatcgcagacgatgccgagcttcagaagtactcaaaattgctcccaatccacaccctgaggcttggggttgaagtggactctttcgacgggcaccattatatttcttccatagtcagcggcggcccggtggacacgttaggactcctccaaccggaagacgaactcctcgaggtaaacggtatgcaactctatgggaaaagtcgccgtgaagcagtcagctttctgaaggaggtccctccccctttcacactcgtgtgttgccgcagacttttcgatgatgaggctagcgtagacgagcccagacgcactgaaaccagtctgcctgagacagaagtggaccacaatatggatgtgaacaccgaagaagacgatgacggagagcttgctttatggtcccccgaagtgaagattgtagagctcgtgaaagattgcaaggggctgggcttctctatcttggattaccaggacccactggatcccacccgcagcgttatcgtcatccgatccctggtcgccgacggcgtggctgagaggagtggcggactgttgccaggagaccgactggtttctgtgaatgaatattgtttggataatacctcgctcgctgaggctgtggaaatcttgaaggccgttccccctgggctggtgcaccttggaatctgcaagccactcgtcgaagataatgaggaagagtcctgctatatcctgcactcctcttcgaacgaggacaagacagagtttagcggtacgatccacgatattaattcatcattgatcctggaagcccctaagggttttcgagacgaaccctactttaaggaagagttagttgacgaacctttcctcgacctcggtaagtcttttcattcacagcaaaaagagatcgaacaatccaaggaagcctgggaaatgcatgagttcttgacaccacgcctgcaggagatggacgaagagagagagatcctggtcgatgaagagtacgaactctaccaagacccttcaccgagtatggaattatatccgctgtcccatattcaggaggctactccagtcccgtcagtcaatgagcttcacttcgggacccagtggcttcacgacaatgagccgtcggagagccaggaggctagaactgggcggaccgtgtatagtcaggaggcccagccatatggctattgcccagagaacgtgatgaaagagaattttgtgatggaatccctgcctagtgtcccctcgacggaaggaaacagccaacagggccgttttgacgacttggagaatttaaacagcctggctaagacctccttggatctagggatgatccctaacgacgttcaggggccaagcctgctcattgatctgcccgtcgtggcgcagaggagggaacaagaagatctacctctctaccagcatcaggccacaagggtcatctcaaaggcttcagcttatacgggaatgctgagcagccggtacgccaccgatacctgtgagctgccggaaagggaagaaggagagggggaagagactcctaacttcagtcattggggccctcccagaatagtggagatcttcagagaacccaatgtgtcactcggcatctccatagtgggtggacagaccgtcattaaaaggttgaagaatggagaggagttgaaaggaattttcattaaacaagtccttgaagattcaccagctggaaaaactaacgcactcaaaacaggtgataaaattttagaggtgtccggagttgacctacagaacgcctcccactccgaggccgtggaagctataaaaaacgccggaaaccccgtggtgttcatcgtgcagagtctctcatcgacaccaagggtgatccccaatgtgcacaacaaagcaaacaaaatcactggaaatcagaatcaggacacacaggagaagaaagaaaagagacagggcaccgcgccccctcctatgaaacttcccccaccttacaaagcactcactgacgattcagatgagaacgaagaggaagatgcctttacagatcaaaagattcggcagaggtatgctgacctgcctggggagctgcatatcattgaactggagaaagacaaaaacggactgggcctgtctctggccggaaacaaggatcgttcacggatgtctatatttgtggttgggattaaccctgagggccccgcagctgctgacggacgcatgaggatcggcgacgaactgctcgagatcaataatcagattctgtatgggaggtcacatcaaaatgcaagtgcaattattaagaccgcacccagtaaagtaaagctggtcttcatcaggaacgaagacgccgtgaatcaaatggccgttactccctttccggtgccctcttcctctcccagcagcattgaggatcaatccggaacagagcccatcagctccgaagaagacggaagtgtggaggtgggaatcaaacaactacccgagtctgagagcttcaagctggcagtgagccagatgaaacagcaaaagtaccctaccaaggtgtccttcagctcccaggaaatcccactggcccctgcctccagttatcacagcacggacgctgactttacaggctacgggggcttccaggcccctcttagtgtggaccctgcgacctgcccgattgtacccggtcaggagatgatcatagagataagcaagggcagaagcggcttgggtttgtcgattgttggcgggaaagacacgcctctgaacgcaattgttattcatgaagtgtatgaggagggagcagccgctagagatggcaggttgtgggccggcgaccaaatcctggaagtcaacggtgtggacttgcgcaactcatctcatgaagaggcaattaccgccctgagacaaactccacagaaggtaagactcgtggtgtacagggatgaagcgcattaccgagacgaagagaatcttgagatctttcctgtcgatttacagaagaaagccgggaggggtcttggtctgagtattgtagggaagcgcaatggcagcggcgtctttatttcagacatcgtaaagggaggtgccgcagacttggacggtaggctgattcagggagatcagattttgagtgtgaatggggaggacatgcgcaacgcatcccaggaaacggtagcgactatccttaagtgtgcacagggcctagttcagttggagattggccgactgcgcgccggatcctggacctctgccaggaccacgagccagaactcccaaggctcccagcagtctgctcactcctcatgccacccaagctttgcaccagtgatcactggcctgcagaatctggtgggcacaaagcgcgtgtcggacccatcccagaaaaatagcggcactgatatggagcccaggacagtcgagataaatcgcgagttaagtgatgcactgggcatttccattgccggaggacgcgggtctcccctgggggatatacccgtatttatcgccatgatccaggcgtctggggtggctgctagaacccagaagctgaaggttggtgataggatcgtgtctatcaatggacagcctttggatggactgagccacgcagatgtggtgaacctcctgaaaaacgcctatgggagaataattctgcaagtggtcgccgatacaaatatttcagctattgccgcacagctagagaacatgagcacaggttaccacctgggaagcccgaccgcagagcaccatccagaagatactgaggaacaacttcagatgactgctgattag

SEQ ID NO: 120523 - DNA, 4572 bp, synthetic construct
  misc_feature 1..4572: note = Description of Artificial Sequence: Synthetic coding sequence
  source 1..4572: mol_type = other DNA
atgccagagaacccggccactgacaagcttcaggtgctgcaagttctggacaggttaaaaatgaagctccaggaaaaaggggacacctcccaaaatgagaagctcagcatgttttatgaaacactgaagagtcccctatttaaccagatcctcaccttgcagcagtcaatcaagcagttaaaaggtcagcttaatcatatcccttcagactgctctgctaacttcgatttctcacggaaagggctcctcgtgtttaccgatggctcaatcaccaatggcaatgtccaccgcccttcaaataacagcacagtaagtggactcttcccttggacaccaaagttgggcaatgaggactttaactctgtgattcagcagatggcgcagggtaggcagatagaatatattgacatcgaaaggccctctaccggtggcctgggtttttctgtggtggccttaagatcccaaaatcttggtaaagtggatatcttcgtcaaggacgtccagcctggctctgtcgccgaccgggatcagagattgaaggagaatgatcagatcctagctatcaaccacacacccctggaccaaaacatctcgcatcagcaggccattgctctacttcaacagacaactggcagtcttagacttatcgtcgccagggagccagtccatactaagagctccacatcgtcaagcctcaacgacaccaccctcccggagaccgtgtgctggggacacgtggaagaggttgagctcattaacgatggtagtggattaggctttggcatcgtgggcggcaaaacctccggtgttgtggtgagaactatcgttcccggcggcttggcagatagggacggcagactccagaccggcgatcacatcctaaagattgggggcaccaacgttcaggggatgaccagcgagcaagtcgctcaggtgctccggaattgtggcaatagcgtccgcatgcttgtggcccgagatcctgccggtgatataagcgtgacaccgcctgctcccgcagccctaccagttgccttacctacagtcgctagcaaaggccctggctccgattcctcactgttcgagacctacaacgtcgagctggtccgtaaggatggccagagtttgggaattcgcatcgtgggctacgtaggcacttcccacaccggcgaggcaagcggaatttatgtgaagtccatcatccccggaagcgctgcgtaccacaacggccatatccaggtcaatgataaaatagtggccgtcgatggagttaacatacagggctttgctaaccatgatgtggtagaagttctccgaaatgcaggacaagtggtgcatctcactctggtccgccgcaagacctcctcatccaccagcccattggagcccccttcagacaggggtaccgtggtggaaccactgaagcctccagcgttgtttctgaccggggccgtggagacagaaaccaacgtagatggagaggatgaagaaatcaaagagagaatcgacaccctgaagaatgacaacatacaagcactcgagaaactggaaaaagtacccgactcacccgaaaacgagctcaagtcgcgttgggagaacctgctcggacccgattacgaagtaatggtggcgacactggatacgcagattgccgatgatgctgaacttcagaagtattctaagctgttgccaatccataccctccgattgggcgtggaggtggatagctttgacgggcaccactacataagcagcatcgtcagtggtggacccgttgacaccttaggcttactgcaacccgaagacgagttactggaagtcaatggtatgcaactctacggtaaatcaagaagggaagccgtttcctttcttaaggaggtgccaccgccattcactctggtttgctgtcggaggctgttcgacgatgaggcaagtgtggacgagcctaggcggacagaaacatccctaccggagactgaggtcgaccataatatggatgtcaacaccgaggaagatgatgatggcgaactggcactgtggtccccggaggtaaaaatcgtggagctggttaaagactgtaaaggactcggattttcaatcctggattatcaagaccctctagaccccacgcgaagcgtcatcgtgatccggtccctagtggcggacggggtggcagaaagatctggtgggttgctccctggagatcgtctcgtctccgtgaacgaatattgcctcgacaacacctcccttgctgaggcagtggaaatactcaaggccgttccccctggcctggttcatctgggaatctgcaagccacttgtagaagacaacgaggaggagtcttgttacatcctacactcctcaagcaacgaagacaagaccgaattctctggaaccattcacgatatcaactcaagcttgatcttagaggcacccaagggcttccgagacgagccctacttcaaagaagagctcgtagatgagcctttcctagacttaggcaaaagctttcactcacaacagaaagaaatcgaacagtctaaggaagcctgggaaatgcacgagttccttacgccccggcttcaagagatggacgaggagcgtgagatccttgttgacgaggagtacgagctctaccaagaccccagccccagcatggaactttatcccctttcacatatccaggaggctacacctgtcccctcggtgaacgaactgcactttgggactcagtggctgcacgataacgagccaagtgagtcccaggaggccaggactgggaggaccgtctatagtcaagaggcccaaccctatggctattgtccagagaacgtgatgaaagaaaacttcgtgatggaaagccttccaagcgtcccgtcaacggaaggcaactctcaacaaggcaggtttgatgacttagagaacctcaattccctggctaaaacatccctggacctgggaatgattccgaatgacgttcagggaccgagccttctgatagacctacctgtggtagcacagagacgcgagcaggaggacttgcccctgtaccagcaccaggccactcgagtgatttctaaggccagtgcctacaccggcatgctgtcttcccggtacgctacagatacttgcgagctgccggaacgggaagaaggggaaggagaagaaacaccaaatttctctcattggggacccccacggattgtggaaatctttagagagcctaatgtttcgttgggcatctctatcgtgggagggcagaccgtaatcaaacgtttgaagaatggcgaggagctaaaggggatattcattaaacaggttctggaagacagcccagccgggaaaactaacgcattaaagacaggggataaaatactcgaggtttccggagtcgacttacagaacgcgtcccatagcgaagctgtagaagctatcaaaaacgctgggaatcctgtggttttcattgtgcagtctctgtccagtacccccagagtgatccccaacgttcataacaaagcaaacaaaatcacaggcaaccagaatcaagatacccaagaaaagaaggagaagcggcagggtaccgcccctccaccaatgaagctgcctccaccctacaaagcgctaactgacgacagtgatgagaatgaggaggaggatgcgttcacggaccagaagattcgccagcgctatgctgatctccccggggaactgcatataatagagctcgagaaggacaaaaacggcttggggctgagcctggctggcaataaggatcgttcgcgtatgagtatatttgtagttggtatcaaccctgagggccctgccgctgcagacggcaggatgcgcattggagacgagctcctggaaattaataaccaaatactgtacggtagatcccatcagaatgccagcgctattattaagacagcaccgtctaaagtgaagctggtgtttatccgaaacgaggatgcagtgaaccaaatggcagtgactccattccccgtgccgtcgagctcaccatcctctattgaagaccagtcgggcacagagcccatttcgtccgaggaggatgggtctgtggaggttggtattaaacaactaccagaatccgagagtttcaagctcgccgtgtctcagatgaagcagcaaaagtatcctacaaaagtgtctttctcctcccaggagattccattggccccagccagtagctatcattccactgatgctgattttaccggatacggtggattccaggcccctctgagtgtggaccccgccacatgtccaattgtgccaggccaagagatgatcatcgagatatccaagggaaggagtgggttgggtctgtcaattgtggggggaaaggatacgccactcgtcaatggtgtggatctacgaaacagctcccatgaagaggctattaccgccctccggcagacaccacagaaagtgagactggtagtctaccgtgatgaggcccattacagagacgaggaaaacctggaaatttttcctgtcgacttgcagaaaaaggctggccggggcttggggctgtccatagtggggaaatag

SEQ ID NO: 120524 - DNA, 1359 bp, synthetic construct
  misc_feature 1..1359: note = Description of Artificial Sequence: Synthetic coding sequence
  source 1..1359: mol_type = other DNA
atggtgcagggtgggttcccggagaagatccggcaacggtacgctgatctgccgggcgagctgcatatcatcgaactggagaaggataagaatggattgggattgagtctcgccggtaataaagaccgttcacgaatgagtattttcgtggtggggattaaccctgaggggcctgctgccgctgatggacgcatgaggattggtgacgagttgcttgagattaataatcagatcctgtacgggcggagtcatcagaatgcatcagccattattaaaacggcgccttctaaagttaagttggtatttatccgtaacgaagacgctgtcaaccaaatggctgtgaccccttttccagtccccagcagctccccttctagcattgaagaccagtccgggactgagcctatctcctccgaggaggacggcagtgtggaggtgggtattaaacagctcccggagagcgaatccttcaagttagcggtaagccagatgaaacagcagaagtaccccactaaggtgtccttctcaagccaggaaatccccctcgctcctgccagctcttatcacagcactgacgccgactttactggctacggtggatttcaagccccactaagtgttgacccagctacttgtcccatcgtgcccggtcaggaaatgattatcgagatttccaaaggacgtagcggtctaggcttatctattgtaggaggcaaagacacgcctttattctggcggctcggcagccccagagcttggtctcagcatctcgttcgggcctttatgctgcaccaccctgtgaccgaggttgaagggcagaatgccatcgtgattcacgaggtttacgaagagggagcggctgccagggatggacgactctgggcaggggatcagatcctcgaggtgaacggcgtggatctgcggaactcgagccatgaggaggccatcacggccctccgtcagaccccgcagaaagtgagactggtggtgtaccgggacgaggcgcactatagggacgaggaaaacctcgaaatatttcctgtggatttacaaaaaaaggcagggcgtgggcttggactctcaatcgtgggcaagagaaatggaagcggtgtgtttatctctgacattgtgaaaggcggcgcagccgatctggacgggcgactgatccaaggcgaccaaatcttatccgtgaacggagaggatatgcggaatgccagccaagaaaccgtggctaccatcttgaagtgcgcccaaggtctcgtgcagcttgaaattgggcgcctccgcgcaggttcttggacctctgcgcggactaccagtcagaattcacaggtggtcgatggatttagtagcgattag

SEQ ID NO: 120525 - DNA, 594 bp, synthetic construct
  misc_feature 1..594: note = Description of Artificial Sequence: Synthetic coding sequence
  source 1..594: mol_type = other DNA
atggcggtgacccctttccccgtgccatcttcttcccctagctccattgaagaccagtccggcactgagccgatcagctctgaagaggacggctccgtagaagtggggatcaagcagctccccgaatccgaaagtttcaagcttgcagtcagccagatgaaacagcaaaagtatcccaccaaggtcagcttctcgtctcaagagatccctctggcaccggccagctcttaccatagtacggacgccgattttactggttacggcggcttccaagccccactcagcgtcgatcctgctacatgccccatcgtgcccgggcaggaaatgattatagagatctccaaaggccggtcagggctggggctttccattgtcggcggcaaagacacacccttggtgaacggggtggacctgaggaattcctcccacgaagaggcaatcaccgcgctcaggcagacaccacagaaggtgaggttggtagtgtacagagatgaagctcactaccgcgacgaagaaaatctggagattttccccgtcgatctccaaaagaaggcgggccgagggcttggattgtcaatagtcggcaagcgatag

SEQ ID NO: 120526 - DNA, 1236 bp, synthetic construct
  misc_feature 1..1236: note = Description of Artificial Sequence: Synthetic coding sequence
  source 1..1236: mol_type = other DNA
atgagccccgctaggcttcggcctcggttgcacttctgtctggtgctgttgttactactggttgttccagccgcctggggatgtggaccaggccgagtcgtgggatcccggcggcgaccacctcggaagctggtgcccctggcctacaagcagttcagccctaacgtgcccgagaaaacccttggggccagtgggaggtacgagggaaagatcgcccggagcagtgaacggttcaaggaattaacacctaactataaccctgacatcatttttaaagacgaggagaatactggagcagataggctgatgacccagaggtgtaaggacaggctgaactccctagccatcagcgtcatgaaccagtggccaggagtgaagttacgcgtaacggagggatgggatgaggatggccaccattctgaggaaagcttgcattacgagggtcgggcggtcgatatcacgacctcagaccgggacaggaataagtatggcctactggcccgacttgccgtggaagctggatttgactgggtctattacgaaagcaaggcccacgtgcactgttcagttaagtctgaacatagtgcggccgcaaagaccggtggatgttttcctgctggcgcacaggtgagactggaatccggggctagagtggctctgtctgctgttagaccgggagaccgtgttctggccatgggcgaggatgggagtcccaccttcagcgatgtccttattttcctggaccgtgaaccccaccgcctgcgggcattccaggtgattgagacccaggatccccccagacggctggccctgacccccgcccacctactgttcacggctgacaatcacactgagccggctgcccggtttcgggctactttcgcctctcatgtccagcccggacagtacgtgttggtagccggagtgcctggccttcagccggctagggtagcagccgtcagtacacatgttgctctgggggcctatgccccactgacaaagcatggtaccctggtggtggaagacgttgtcgcatcatgcttcgcggcagtagccgaccaccacttggcacaattggccttctggcccctgaggctgtttcactctctggcttgggggagctggacccccggagaaggcgtgcactggtatccccagctgctctacaggctgggacggctgctgctcgaagaggggtctttccaccctctgggaatgtccggtgccgggtcttag

SEQ ID NO: 120527 - DNA, 1212 bp, synthetic construct
  misc_feature 1..1212: note = Description of Artificial Sequence: Synthetic coding sequence
  source 1..1212: mol_type = other DNA
atggctcatgctatggagaattcatggacaatcagcaaggagtaccacatcgacgaggaggttggattcgccctgcctaacccacaggagaaccttccagacttttacaacgactggatgttcattgccaagcacctgcccgacctgatcgagtcaggccaactccgggaacgggtcgagaaacttaatatgctaagtattgatcacttgaccgatcataagtcgcaaagactggcgaggctggtattaggatgtattaccatggcctatgtctgggggaaaggtcacggtgacgtgcggaaggtcctcccgcgaaatatcgctgtcccttattgtcagctctcaaaaaaacttgagttgcctccaattctggtttatgccgattgcgtattggctaactggaaaaagaaagacccgaataagcccctgacatacgagaacatggatgtactattctcatttagagacggagactgctcaaagggtttttttctcgtttcactgctggtggagattgcagcggcctcggctatcaaagtcataccaacagtgtttaaggccatgcagatgcaagaacgagatactttacttaaagctctgttggaaattgcctcttgcctcgaaaaagccctgcaggtgttccaccagatccacgatcacgtcaatcccaaggccttcttttccgtgcttcgtatctatctgtcaggttggaaaggaaatccccagctgagcgatggactggtctatgagggtttctgggaggatccgaaggagtttgctggtggctcagctggacagagttccgtgttccaatgtttcgatgtgttactcggaatacagcagaccgccggaggcggccacgcagctcaatttctccaggacatgcggcgctatatgccacctgcccaccggaacttcctgtgttctttggaatctaacccgtccgtgagggaattcgtactttccaaaggggatgccggattgcgagaggcctatgacgcatgcgttaaagccctggtgtccctcagatcttaccatcttcagatcgttacgaagtacattcttataccggcgtcacaacagcctaaggagaataagactagcgaggacccaagcaaattggaagccaagggcacaggcggaaccgatctcatgaatttcctgaagacggttcggtctaccaccgaaaagtccctgctaaaggagggatag

SEQ ID NO: 120528 - DNA, 237 bp, synthetic construct
  misc_feature 1..237: note = Description of Artificial Sequence: Synthetic coding sequence
  source 1..237: mol_type = other DNA
atggctcatgctatggaaaacagctggaccataagcaaggagtaccacatcgacgaagaggtgggattcgctctgcccaatccccaggagaacctacccgacttctataacgactggatgtttattgcaaagcacctgcctgacctcatcgagtccggacaattgcgggaaagagtggagaagctcaacatgctgagtatcgaccacctcactgatcataagagtcagaggctttag

SEQ ID NO: 120529 - DNA, 543 bp, synthetic construct
  misc_feature 1..543: note = Description of Artificial Sequence: Synthetic coding sequence
  source 1..543: mol_type = other DNA
atggcccatgccatggaaaattcctggaccataagcaaagagtaccacatcgacgaagaagtaggtttcgcgttgccaaacccgcaggagaacctacccgacttttataacgattggatgtttatcgcgaaacaccttcctgatttaatcgagtccgggcaactgagggagcgcgtggagaagctgaacatgctgagtattgaccacctcaccgaccacaaatcacagcggctcgcccgcctagtgcttggttgcatcactatggcctatgtttgggggaaggggcacggcgacgtgagaaaagtcctcccccggaatatcgctgtgccttactgtcagctaagcaaaaagctcgagttacctccgatactggtttacgccgattgtgtgctggccaactggaagaaaaaagatcctaataagcctttgacatacgagaatatggacgtactgttttctttccgagacggagactgttcaaaaggcttttttttggtttctctactggttgaaattgccgccgcaagtgccatcaaagtatag

SEQ ID NO: 120530 - DNA, 1212 bp, synthetic construct
  misc_feature 1..1212: note = Description of Artificial Sequence: Synthetic coding sequence
  source 1..1212: mol_type = other DNA
atggctcacgctatggaaaattcctggaccatcagcaaggagtaccacatagacgaggaagtgggattcgccctgcccaacccacaggagaacctgcccgatttctacaatgactggatgttcatcgcaaagcacctcccggacctcatagagtccggccaactgcgcgaaagagtcgagaagctaaacatgctgtccattgatcacctgacagatcataagtcacagagactggccaggctcgtgctgggctgcatcacgatggcctatgtctggggtaagggacacggcgacgtcagaaaagttctcccgcggaatatcgccgtcccctattgtcaactgtccaaaaagttggaattgcccccaatacttgtctatgctgactgtgttctggccaattggaagaaaaaagatcccaacaaaccgctaacctatgaaaacatggacgttctcttctcttttagggacggcgactgttctaaaggattctttctggtgtccctgctggtggaaatagctgctgctagcgcgataaaagtgatccctacggtctttaaggccatgcagatgcaggaacgggatacgctgcttaaggccctcttagaaatcgcgtcatgcctcgagaaagcactgcaggtattccatcagattcacgaccatgttaatcctaaggcctttttttctgtcctaagaatctaccttagcggctggaaaggcaacccccagttgagtgacggcctggtttacgaggggttctgggaggaccccaaggagtttgcaggagggagcgccggtcagtcaagcgtgttccaatgtttcgatgtacttctggggattcagcagacggccggggggggccacgctgctcagttccttcaagatatgcgtaggtatatgcctccagcccacagaaactttctttgttcactggagagtaaccccagcgtgagagagtttgttctgagcaaaggagacgcaggtctgcgtgaagcttacgatgcatgcgtgaaagccctggtatccctgcggtcctaccatttacagatagttaccaagtatatcctcatacctgcgtcccagcaacccaaagagaacaagacttcagaggacccttctaaactggaggctaaaggcacaggtggcactgatctcatgaacttcctcaagacggtgcgttcaacgaccgagaagagcctcctcaaagaaggctag

SEQ ID NO: 120531 - DNA, 144 bp, synthetic construct
  misc_feature 1..144: note = Description of Artificial Sequence: Synthetic coding sequence
  source 1..144: mol_type = other DNA
atggctcatgctatggagaactcttggacaatcagcaaggagtaccacatcgatgaagaggttggcttcgctctaccaaacccacaagagaatctcccagacttctacaacgactggatgttcatcgctaaacacctgccgtag

SEQ ID NO: 120532 - DNA, 1224 bp, synthetic construct
  misc_feature 1..1224: note = Description of Artificial Sequence: Synthetic coding sequence
  source 1..1224: mol_type = other DNA
atggagcctcatcggcccaatgtgaaaaccgccgttccgctgtctctggagtcataccacatctcagaagaatatggcttcctgttgcctgattccctcaaggagcttcccgaccactacaggccatggatggagatcgcaaacaaattgccccagctgatagatgcccaccagctccaggcccacgtcgataagatgcccctattgagctgtcaattcttgaagggacacagagagcagagactggcccacctggtcctgagtttcctcacaatgggttatgtttggcaggagggggaagcccagccggcggaggtgctgccaaggaacctagcattaccctttgtcgaggtctcgaggaacttgggtctgcctcctatcctggtgcattccgatctggtgcttactaattggactaaaaaggatcccgatggttttctggagatcggaaatttggagactattatcagttttcctgggggcgaatctctccacggatttatcctggtgactgccctagtggaaaaggaggccgtgcctggcattaaggcgctcgtccaagccactaacgctatcctgcagcccaaccaggaagccctgctgcaggccctgcagagactacgcctcagtatccaggatatcactaaaactcttggccagatgcacgattacgtggacccggacatcttctatgctggtatacgcatattcctctccggatggaaggacaatccggcaatgccagccggcctcatgtacgagggggtgagccaggagcccctcaagtattcaggcggaagcgctgctcagtcaacggtgctgcatgcatttgacgaattccttggcattaggcacagcaaggagtccggggattttctttaccggatgcgggactacatgccgccatcccacaaagccttcattgaggatattcattctgccccatccctgcgcgattatattctgagttctggccaggaccatctactgactgcttataaccagtgcgtgcaagccctcgcagaacttaggtcataccacatcactatggtgaccaagtatctgattactgcagctgccaaggctaagcatgggaagccaaatcacctgccaggtccacctcaggcactcaaggatcgcggcaccggtggtactgccgtcatgagctttctaaaaagtgtccgggataagactctcgaaagcatcttacacccccggggctag

SEQ ID NO: 120533 - DNA, 1263 bp, synthetic construct
  misc_feature 1..1263: note = Description of Artificial Sequence: Synthetic coding sequence
  source 1..1263: mol_type = other DNA
atgttgcacttccactattatgatacatctaataaaattatggaaccacacagaccgaacgtcaagacggcagttcctcttagtctggagagctaccatataagcgaggagtatggattcctgttgcctgatagtctgaaggagctcccagatcactataggccctggatggaaatagcaaacaagttgccgcagctgatagacgcgcatcagctgcaagcccacgtggataaaatgccacttctgtcttgtcagtttttgaaaggccacagagagcagcgtctcgcacatctcgtgctgtcttttctgacaatggggtacgtgtggcaggaaggtgaagcacagcccgcggaggttcttcctaggaacctcgctctccccttcgtggaagtgtcacggaacttgggactgcctcccattctcgttcacagcgacttggtgctcacaaattggaccaagaaggatcccgatgggttcctggaaatcggaaatctggagaccatcatttcctttccgggcggagagtctttgcacggtttcattctggtgacagcactcgtggagaaagaggcagttccagggatcaaggctctagtgcaggcaacgaacgcaattctgcagcctaatcaggaggcactgcttcaagccctgcaaaggttgaggttgagtatccaggatatcacaaaaacacttggacagatgcatgactacgttgaccctgatatcttctacgcgggtatccggatatttctctccggctggaaggacaacccggcaatgccagcaggccttatgtacgagggcgtcagccaggagccccttaaatatagtggggggagtgctgcacagtccaccgtgctacatgccttcgatgaatttctcggcatccggcattccaaagaaagtggtgacttcctgtatcgtatgagggattatatgccacccagccataaagcgtttattgaggacatccactccgcaccttcccttcgcgactacatcctctctagcggacaggatcatctcctgaccgcatataaccagtgtgtgcaggcattagcagagctgcgctcttatcacattaccatggtgactaagtaccttatcactgcagctgccaaggcgaaacacggcaaacctaaccacctgccaggtccaccccaggccctcaaggatagaggtacgggcggaacagcggttatgtcctttctgaaatctgtgagggataagacacttgaaagcattctgcaccctaggggctag

SEQ ID NO: 120534 - DNA, 792 bp, synthetic construct
  misc_feature 1..792: note = Description of Artificial Sequence: Synthetic coding sequence
  source 1..792: mol_type = other DNA
atgaagggaggattcactgggggagacgagtatcaaaaacacttcctaccgagagactacctggccacatactactcatttgacggcagccccagccccgaggcagagatgctaaagtttaatctggagtgcctccacaagacttttggccccgggggactccaaggagatactcttattgacatcgggtcgggccccaccatctaccaggttctggccgcgtgcgactcttttcaagatatcaccctgagtgatttcacagatcggaaccgcgaagaattagagaagtggttgaaaaaagaacctggtgcatatgactggactcccgctgtaaagtttgcctgtgaattggagggcaatagcgggagatgggaagaaaaagaagaaaaactgagggctgccgtcaagcgggtcctcaaatgtgacgtgcacctcggtaaccctctcgcgcctgctgtgctgcccttggctgactgcgtcctgacattgttagcaatggaatgcgcctgttgcagcctcgacgcctatagagcagctctctgtaatctagcatcactgctgaagccaggtggccacttggtgactactgtgactctccggctgccctcatatatggttggcaagcgcgaattctcttgcgtcgccctggaaaaagaggaggtcgagcaggctgtgctcgacgcgggcttcgatattgagcagctcctccactctccacagtcctactccgtgacaaacgccgctaacaacggagtgtgctttatcgtcgctcgtaaaaagcccgggccttag

SEQ ID NO: 120535 - DNA, 789 bp, synthetic construct
  misc_feature 1..789: note = Description of Artificial Sequence: Synthetic coding sequence
  source 1..789: mol_type = other DNA
atgaaaggtggcttcaccggtggagacgagtaccaaaaacacttcttgcctagagattacctagctacatactattccttcgacggctctccgtcacccgaggcggaaatgctcaagttcaacttagaatgcctccacaagacattcggccctggcttgcagggtgataccctgatcgacatcggatccgggccaaccatttatcaggtgttagccgcttgtgattcgtttcaagatatcacattgagtgacttcaccgacagaaaccgggaagagctcgaaaagtggttgaaaaaggaaccaggcgcctatgattggacccccgctgttaagttcgcttgtgaattagagggcaactctgggcgctgggaagagaaggaagagaagctgcgagcagctgtcaaacgggtgctgaaatgtgacgttcacctgggaaaccccctcgcgcctgccgtactccctctagccgactgcgtgctgacattgctagccatggaatgcgcatgttgctcgttagacgcctaccgggctgctctgtgtaacttggcgtccctgcttaagcccggcggtcacctggtgaccaccgttacactccgactcccctcttacatggtgggtaaaagagaattttcttgtgtcgcactggagaaggaggaagtcgaacaggcggttttggatgccggctttgatattgagcagctgttgcacagcccgcagagctatagcgtgacgaacgccgcaaataatggcgtgtgctttatcgtggctagaaagaagcctggcccttag

SEQ ID NO: 120536 - DNA, 600 bp, synthetic construct
  misc_feature 1..600: note = Description of Artificial Sequence: Synthetic coding sequence
  source 1..600: mol_type = other DNA
atgaaaagtgggctgtggtactttttcctgttctgcctgagaatcaaggtgctcacaggcgagattaatgggtccgctaattacgagatgtttattttccacaatggaggtgtgcagatcttatgtaagtatccagacatcgtgcagcagttcaagatgcaacttctgaaaggcggacaaattctgtgtgacctgacaaaaacgaaaggatcaggcaacacggtaagtattaagtctcttaaattctgccacagccagttgtcaaacaactctgtgtcgtttttcctgtataacctggatcactcgcatgccaactactacttctgcaatctctccatcttcgatccccctcccttcaaagtgacactcacaggcggatatcttcatatctatgaatcacagctgtgttgtcagctgaaattctggctcccgattggctgcgctgcatttgttgtcgtctgcatcttgggctgtattctgatttgctggctgaccaagaaaaaatatagcagcagtgtgcatgaccctaatggcgaatatatgtttatgcgcgccgtgaatactgccaaaaaaagtaggctaacagatgtcacgttgtag

SEQ ID NO: 120537 - DNA, 507 bp, synthetic construct
  misc_feature 1..507: note = Description of Artificial Sequence: Synthetic coding sequence
  source 1..507: mol_type = other DNA
atgaaatccggtctgtggtactttttcttgttctgcctgcgaattaaagtgctgaccggcgagattaatggatcagccaattacgagatgttcatctttcataacgggggcgtccagatactctgtaagtacccagacatcgtccagcagtttaaaatgcaactgttaaagggagggcaaatcttatgcgaccttaccaaaactaaaggcagcggaaacaccgtctcgattaagtcactgaaattctgccacagccaactgtcgaacaatagcgtgtccttttttctgtataacctggaccattcacatgctaactactatttctgcaatctgagcatctttgacccaccacccttcaaggtgaccctcacagggggctacctccatatttatgaaagtcaattatgttgccagctgaagttctggctgccaatcggatgcgccgcctttgtagtggtgtgcatcttagggtgtatcctgatttgttggctcactaagaagatgtag

SEQ ID NO: 120538 - DNA, 930 bp, synthetic construct
  misc_feature 1..930: note = Description of Artificial Sequence: Synthetic coding sequence
  source 1..930: mol_type = other DNA
atgcgcctcggatcaccggggctgctgttcctcctcttttcctctctccgcgctgacacgcaggagaaggaggttcgcgccatggttggcagcgacgtggagctcagctgcgcatgtcctgagggtagtcgctttgatctgaacgatgtgtacgtatactggcagaccagcgagagcaagactgtcgtcacataccacatcccacaaaactcttccctcgagaatgttgattcaaggtaccgcaatagggctctgatgtcccctgcaggtatgctgcgtggggatttctccctcagattgttcaacgtgaccccgcaagatgaacagaaattccattgtctcgtcctgagccagagccttggcttccaggaagttctctcagtcgaggtcactctgcacgtcgcggcaaacttctccgtgcctgtggtgtccgctccacactctccaagccaagacgagcttacgttcacctgcacatccatcaatggctatccaagacctaacgtctactggattaataagaccgacaactctcttctcgaccaggccttgcagaacgacaccgtattcctgaacatgagagggttatacgatgttgtgtcggtgctaagaatagccagaacccctagcgtgaatattggctgttgtatcgaaaacgtgctgttgcagcagaacctgaccgtgggcagtcagacaggaaatgacataggtgagcgcgataagattaccgagaatcctgtcagtactggagagaaaaacgccgccacctggagcatacttgccgtgctttgtctgttggtggtggtcgctgttgctattgggtgggtgtgtagagaccgatgcctgcaacatagctatgcaggggcctgggccgtgtcaccagagactgagctgactgaatcctggaacttgcttctcctgttgtcgtag

SEQ ID NO: 120539 - DNA, 558 bp, synthetic construct
  misc_feature 1..558: note = Description of Artificial Sequence: Synthetic coding sequence
  source 1..558: mol_type = other DNA
atgagactggggagccctggactgttgttcctgcttttttcgtcgctgcgggctgccaatttttccgttcctgtggtgtcagctccacattctcccagccaggatgagctgacttttacctgcacgtccatcaacggctatccacggcccaacgtctattggataaataagacagataactcccttctggatcaggccctccagaacgatactgtgtttctgaatatgcgtggtctttacgatgtcgtgagcgtgttaagaatcgcgagaaccccgtccgttaatatcgggtgctgtatagagaatgttctgctgcagcagaatctgacagtggggagccagaccggtaatgatattggggagcgtgacaagattactgaaaaccctgtgagcaccggcgagaagaatgccgccacttggagcattttggctgtgctgtgcttacttgtcgtggtcgctgttgctatcggctgggtttgtcgcgatcgctgtttgcagcactcatacgccggagcctgggcagtgtctccggaaactgagctgaccggtcatgtgtag

SEQ ID NO: 120540 - DNA, 909 bp, synthetic construct
  misc_feature 1..909: note = Description of Artificial Sequence: Synthetic coding sequence
  source 1..909: mol_type = other DNA
atgaggcttggctcacctggcctcctgtttctcctgttttcctctcttcgcgcggatactcaggagaaggaagtgagagctatggtgggctctgacgtcgaactctcatgtgcctgtcccgagggatctcgttttgatctgaatgacgtgtacgtttactggcaaacttcagagtccaaaactgtggtgacctatcatattcctcaaaacagttcacttgaaaacgtcgattcaagatacaggaaccgggccctgatgtctcccgccgggatgcttcggggcgattttagtctccgattgttcaatgtaacgccacaggatgagcagaagttccactgtctcgtactctctcagagcctgggctttcaggaggtgctgtcagtcgaggtgactttgcacgttgcggccaatttcagcgtgccagtcgtgagcgctccccatagcccgtcacaggacgagctcaccttcacctgcaccagcattaatggttatcccaggcccaacgtctattggatcaacaagactgacaactccctcttagaccaggctcttcaaaacgataccgtgttcctgaatatgaggggcttgtatgacgtcgtttccgtcctccgtattgcccgcacaccaagcgtgaatattggctgttgtatcgaaaacgtcttgctgcagcaaaatctcactgtagggtcacaaactgggaatgacatcggggagagagacaaaataactgaaaatccagtctctactggcgaaaagaatgcagctacatggtccatattggcggtgttgtgcctgcttgttgtcgttgcagtcgctataggatgggtgtgccgcgacagatgtctgcaacacagctatgcaggcgcctgggccgtgagcccggagacagagctaacgggccatgtttag

SEQ ID NO: 120541 - DNA, 1101 bp, synthetic construct
  misc_feature 1..1101: note = Description of Artificial Sequence: Synthetic coding sequence
  source 1..1101: mol_type = other DNA
atggtgctccatctcctcctgttcctgctcctgactcctcagggcggacactcgtgccaggggctcgaattggcacgagagctagtcctagccaaagtgcgggccctgtttcttgacgctttaggacctcccgctgttacccgggagggaggtgatcctggagtcaggaggctgcccagacgtcacgctctgggtggctttacacatcggggatcagaacccgaagaggaagaagacgtgtcccaggcgatcctatttccggccacagatgctagctgcgaagataaaagcgccgcgagagggctggcccaagaagctgaagagggccttttcaggtacatgttcagaccttcccagcacacacgcagccgacaggtgacaagtgctcagctatggttccacacgggactggaccggcagggaaccgccgcatcgaattcgagtgaacctctgctcggactcctcgccctttctcctggcggccccgtggctgtccccatgagtctgggccatgctcctcctcattgggctgtgctgcatctggccactagcgccctgtctctgttgactcaccctgtgcttgtgctgttgctgaggtgccccctgtgtacttgctcagcccggccagaagcaacgccctttctggtcgcgcataccagaacaagacctcccagcgggggcgaacgcgccaggcgcagtaccccactaatgagctggccttggagcccaagtgccctccggcttctgcagaggccccctgaggaacctgcggcacacgccaactgccaccgtgttgctctaaatatttcttttcaggaattgggctgggaaagatggattgtgtatcccccctccttcattttccattattgccacggcggttgcggactgcatattcctccgaatctttctttaccagttccaggagccccacctacacccgcacagccatattccctgctgcccggcgcccaaccttgttgtgcagcccttccaggtaccatgaggccccttcacgttagaaccacctctgatggcggctattccttcaagtacgagactgttcctaatctgctcactcagcattgtgcctgcatctag

SEQ ID NO: 120542 - DNA, 1281 bp, synthetic construct
  misc_feature 1..1281: note = Description of Artificial Sequence: Synthetic coding sequence
  source 1..1281: mol_type = other DNA
atgccccttctctggctgagaggttttctcttggcatcctgctggattattgtgcgctcttcccccacacccgggagcgagggccattccgcggctcctgattgcccctcttgtgccctggcagctttgccaaaagatgtgccaaactctcagccagagatggtggaggcggtgaagaagcacatcctgaacatgctgcatctcaagaagagacctgatgtcacccagcctgttccaaaggccgctctcctcaacgcaatccgcaaattgcacgtgggaaaagtcggcgagaacggctatgtggagatcgaagacgatattggtcgaagagccgagatgaacgagctgatggaacaaacgtccgagattattactttcgccgaaagtggaaccgctcgaaaaacactgcatttcgaaatctcaaaggagggcagcgacctaagcgtcgtggagcgggccgaggtctggctgtttctcaaagtgcctaaagccaaccggactcggacaaaagtaaccataaggctgttccagcagcaaaagcatccccaaggatctctggacaccggagaggaggccgaggaggtcggcctaaagggagaaaggtccgagttgttactgagtgaaaaggttgtggatgccaggaagagtacctggcatgtcttccctgtatcttctagcattcaacgacttttagatcagggaaaatctagcctagacgtcaggatcgcctgtgagcagtgtcaggaaagtggggctagcctggtgctcctgggcaaaaagaagaagaaagaagaagagggcgaagggaagaagaagggagggggtgaaggcggggccggcgctgatgaggagaaagaacagagccataggcctttcttgatgctgcaggcacgacagagcgaggatcaccctcaccgcaggagacggaggggactggaatgcgacggcaaggtgaatatctgctgcaaaaaacagttcttcgtgagttttaaagatattgggtggaacgactggatcatcgcgcccagtggttaccatgcaaattactgtgaaggtgagtgtccatcgcacatagccggcaccagtgggtctagcttgtcatttcattccactgtgatcaatcactatcggatgcgggggcactctccgttcgctaacctgaagtcttgttgcgtgcccacgaagctgcggcccatgtctatgttgtattatgacgatggacagaatatcattaaaaaggacattcaaaacatgatcgtagaagagtgtggctgctcttag

SEQ ID NO: 120543 - DNA, 1281 bp, synthetic construct
  misc_feature 1..1281: note = Description of Artificial Sequence: Synthetic coding sequence
  source 1..1281: mol_type = other DNA
atgcctctgctgtggctccgcggctttttactagccagctgctggattatcgtacgatcttctccaaccccaggctccgaaggacactcagctgcccctgactgtcccagctgtgctctcgctgccttgccgaaggacgtccccaacagccagcccgagatggtagaggctgtgaagaaacacatcctaaacatgctccatcttaaaaagaggcctgatgtgacacaaccagtaccaaaggccgccttacttaacgccattcgaaagctccatgtaggcaaggttggggagaatgggtatgtagagatcgaagacgacataggtcggcgggctgagatgaacgagttgatggagcagacttccgagataattacctttgctgaaagcggcacagcccggaagaccctgcattttgaaatttccaaggaaggcagcgatctgagcgtagttgaacgggcggaggtctggctgtttctcaaagttcccaaggctaatcgtactaggactaaagtcactattagactttttcaacagcagaagcaccctcagggctccctcgacacgggagaagaggccgaagaggtgggacttaagggtgagagatcggaactgctgctcagcgaaaaggttgttgatgcccggaaaagtacatggcacgtgttcccagtgtcatctagcattcagcggcttctcgatcaaggtaagtcgtctctcgacgtgaggatcgcctgtgaacagtgtcaggaatccggggcaagcctcgttctcctcggaaagaagaaaaaaaaagaagaagagggggaagggaaaaaaaagggcggtggcgagggcggcgccggcgccgatgaggagaaggaacaatcccaccgaccattcttgatgctgcaggctaggcagtccgaagatcatccccaccgtcggcgtcggagggggctggagtgtgatggtaaagtcaacatatgttgtaagaagcaattcttcgtaagtttcaaggacataggctggaacgattggatcatcgcacccagtggataccatgctaattactgcgagggcgaatgcccttctcacatagccgggaccagtggaagtagtctctctttccattccactgtgatcaaccactatcggatgcgggggcactcgccattcgccaaccttaaatcatgctgtgtgcctaccaagttacgaccgatgagcatgctgtactatgacgatggacagaacataatcaagaaagacattcagaatatgattgtggaagagtgcggctgtagctag

SEQ ID NO: 120544 - DNA, 1224 bp, synthetic construct
  misc_feature 1..1224: note = Description of Artificial Sequence: Synthetic coding sequence
  source 1..1224: mol_type = other DNA
atggacgggcttcccgggcgcgccctgggcgctgcatgcctcctgctcttagccgccggatggctgggtcctgaggcctggggtagtccaactccccctccaacacctgcagctcctccccctccccctccccccggtagtcccggcggctcacaggacacctgcacttcctgtggaggcttccggcgcccggaagagctggggagggttgacggggactttttagaggcagtcaagaggcacatcctgagtcgccttcaaatgaggggaaggccaaacatcacgcacgcagtccctaaagctgcaatggtgaccgccctccgcaaactgcacgcaggcaaagtgcgagaagatggcagggtggagattccgcacctggatggccatgcgtcccccggcgcggatggccaggaaagagtatcagaaatcatatcattcgcagaaaccgacggacttgcctccagcagagtgcgactgtacttcttcatttccaacgaggggaaccagaatctcttcgtggtgcaagcctcactgtggctgtacttgaagttacttccttacgtattggaaaagggctctagaagaaaggtgcgtgtgaaggtgtattttcaggaacagggccatggggatagatggaacatggtggaaaagagggtggatttgaagcgttcaggctggcacacttttccattgacagaggctatccaggcgttgtttgagaggggcgagcgtcgtttgaatctggatgtgcagtgcgatagctgccaggaactcgccgtggttcccgtgtttgtggacccgggtgaggagtcacacaggccatttgtggtggttcaggcaagactgggggacagccggcatcggataagaaagcgcggactggagtgcgacggacgcaccaatctgtgttgcaggcaacaattcttcattgacttccgattaatcggttggaatgactggatcatagccccgaccggctattatgggaactactgtgagggttcttgccccgcttacctggctggagtaccgggaagcgcttcttcctttcacacagccgtggtaaaccaatatcggatgcggggcctgaaccctggtaccgtgaatagctgttgcatacctacaaagctcagcactatgagcatgctctatttcgatgatgaatataatatcgtcaaacgggacgttcccaatatgatagtggaggagtgcggctgcgcatag

SEQ ID NO: 120545 - DNA, 1059 bp, synthetic construct
  misc_feature 1..1059: note = Description of Artificial Sequence: Synthetic coding sequence
  source 1..1059: mol_type = other DNA
atgacatccagcctgctcctggccttcttgctcctggcacccaccactgtggcaactccacgcgcaggaggtcagtgccccgcttgtggcggcccaacgttagaattggaatctcagcgagaactgctgctggacctagccaaacgcagcattctggacaaacttcatctgacgcagaggcccacgctgaaccggcctgtatcgagggctgctctgagaactgcccttcagcatctccacggtgtgccacagggtgccctcctggaagataatcgcgaacaagaatgcgaaattattagttttgccgaaactgggttgtcaaccatcaaccagactcgactcgacttccattttagctccgaccgcacagccggagatcgagaagtacagcaagcatcactgatgtttttcgtccagttaccgtccaatacaacatggaccttgaaagtgcgcgtactggttctgggcccccacaacaccaacttaactctcgctacacagtatctgctggaagtcgatgcttccggttggcaccagctccccctcggacccgaggctcaagccgcctgtagccagggacatcttactctggaactggtactggagggtcaggtggcccagtcctccgttattcttggtggtgctgcccaccgccctttcgttgcggctagagttcgtgtcggtggcaagcaccagatccacagaagaggaatcgactgccagggtgggtctcgcatgtgctgccggcaggaattcttcgtagatttccgtgagatcggttggcacgactggattattcagccagagggctacgccatgaacttctgtattgggcagtgtcccctgcatattgccggaatgccaggtattgccgccagcttccataccgcagtgctgaacttgctcaaagcaaatactgctgccgggacaacaggagggggctcctgctgtgtgccaacagcaagacgccctttaagcctgctctattacgatcgggatagcaacattgtcaagactgacatccccgatatggtcgtggaagcttgtgggtgttcatag

SEQ ID NO: 120546 - DNA, 1053 bp, synthetic construct
  misc_feature 1..1053: note = Description of Artificial Sequence: Synthetic coding sequence
  source 1..1053: mol_type = other DNA
atgcgcctgcccgatgtgcagctatggctggtactgctctgggcactggtcagggcacagggtactgggagcgtgtgcccgtcttgcggcggcagtaagctcgctccccaggccgaacgggccctggtgctcgaacttgccaaacaacaaattctggatggactgcatctcactagtcgcccccggattactcaccccccccctcaggcagctctgacccgtgctctacgacgcctccagcctggctccgtcgctccagggaacggagaggaagttatttcgtttgctactgtgaccgactccacttctgcttactcatctctgttaaccttccatctgtctactccgcggtcacaccatctttatcacgcgcgactctggcttcacgtactgccaactcttcctgggaccctctgcttaagaatcttccgatgggggcctcgccggagaagacagggctcccgcactctactcgcagaacaccacatcacaaatctgggatggcatactctgactctaccttcgtctggactcagaggcgaaaagtcgggggtgctcaagctacaactggactgtcgccctctcgaaggcaatagcaccgtcacaggccagccccgaaggctgctggataccgccggacaccagcagccctttcttgaactcaaaattcgggccaacgaacccggcgccggtcgggccaggaggagaacccctacatgtgagccagcgacccccctgtgctgccggagggatcactatgttgattttcaggagctgggctggcgtgattggattctgcagccggaggggtatcaactgaactattgttctggccagtgtccaccccatcttgcgggttcacccggcatagcagctagcttccattcagccgtgtttagccttttgaaggcaaataacccctggcccgcaagtactagctgttgtgttcctacagcccgcagacctctgagcttactgtacctggatcataacgggaatgttgtgaaaacagatgtcccggacatggttgtcgaagcttgcggatgttcctag

SEQ ID NO: 120547 - DNA, 4062 bp, synthetic construct
  misc_feature 1..4062: note = Description of Artificial Sequence: Synthetic coding sequence
  source 1..4062: mol_type = other DNA
atgagttcccccatgcccgattgtacttcaaaatgccgatccttaaagcacgccctggatgttctttccgtggtaacaaaggggtctgagaaccagatcaaggccttcctatcgtcccactgctacaacgcagctaccataaaggatgtgttcgggagaaatgcccttcatctggtcagtagctgcggcaaaaaaggcgtacttgactggctgatacaaaagggcgtggacctcctggtcaaagacaaggaaagtgggtggacggccctccaccggagcattttttacggtcacattgactgtgtgtggagcttgcttaaacatggggtctccttatatatacaagataaggagggactgtcagccctggatctagtaatgaaggataggcccacccacgtggttttcaagaacaccgatcctaccgacgtatatacttggggggacaataccaatttcaccctcggccatgggtcacaaaattctaaacatcacccagagctcgtcgatctgttcagcaggagcggcatatatatcaagcaggtcgttttgtgtaaatttcattctgtttttcttagccagaaaggccaggtgtacacctgcggtcacggaccgggcggcagacttggccacggggacgaacagacctgtcttgttccacggctcgtggagggtcttaatggtcacaattgttctcaggtggctgcagccaaagaccacacagtagtcctcacagaggacggatgtgtgtatacattcgggctgaacattttccatcagctgggtataattccccctcccagtagctgcaatgtgcctaggcagattcaggccaaatacctcaaaggtcggacaattataggcgtcgcagcgggacggtttcatactgtgctgtggacacgcgaggccgtatatacgatgggcctaaacggagggcagctcggatgcttattggaccctaatggagaaaagtgcgtaacagctccaaggcaggtcagcgcactccatcataaggatatagccttgagcctggtggctgccagtgatggggccacagtctgtgtcacaacgcggggtgatatatacctgctcgccgactaccagtgcaagaaaatggcttccaaacaactgaacctgaagaaggttctggtctctggcggtcacatggaatacaaggtggatcccgagcatctgaaagaaaatggaggccaaaagatctgcattctggcaatggatggtgcgggcagggttttctgctggcggagcgtcaacagttccctgaagcaatgcagatgggcctatccccggcaggtctttatctcggacattgcgttgaataggaacgagatcttattcgtcacgcaggacggggagggtttccgcgggcgttggttcgaagaaaaaaggaaaagcagtgaaaaaaaagagatactgtccaatctgcataatagtagctcggacgtttcatacgtgagtgatatcaattctgtctatgagagaattcgcctagaaaagctgacatttgcacaccgtgctgtctccgtgagcacagatccctctggttgtaatttcgcaatcctgcaaagtgacccaaagacttccttgtatgagattcccgcggtttcctcgtcctcattctttgaagaattcggcaagctgctcagagaagccgacgagatggacagcatccatgacgtaacattccaggtgggcaatcggctctttcccgcacataaatatatactagcggtgcacagtgatttcttccaaaaactgttcctgagcgacggaaacacgtccgagttcacagacatttatcagaaagatgaggactccgctggttgccatctgtttgttgtcgagaaagtccaccctgacatgtttgagtatcttctgcagtttatctatactgacacatgcgatttcttgacccatggctttaaaccacgaatacacttgaataagaatccggaagagtatcaaggaactctcaattcacacctgaacaaggtgaatttccatgaggacgataaccagaagtctgcgttcgaagtctataaatccaaccaggctcagacggtcagtgaacgacagaagtcaaagcctaaatcctgtaaaaagggcaagaatattcgggaggatgatcccgtgcggatgctccagaccgtggccaagaagttcgacttttcgaatcttagttcaaggctcgatggcgtgcgttttgaaaatgaaaagatcaacgtgattgccaaaaatactggcaacaagctgaaactttcccagaagaagtgctcttttctgtgcgacgtcactatgaaaagtgtggatggcaaagagttcccctgtcacaaatgtgtcctgtgcgcaagactggagtattttcattccatgctgagttcttcctggatcgaagccagttcatgcgccgcattagaaatgcccattcactcggatattctgaaggtgattctggactatttatacacggacgaagccgtggtaatcaaggagagccagaatgtggatttcatatgtagtgtgttagttgtggccgatcaattgctaatcaccagattaaaagagatatgtgaagttgccctgacggaaaaactgacactgaaaaatgccgcgatgcttctggagttcgccgctatgtattcagcaaagcagctaaagctatcttgcctacagtttataggcctcaacatggccgctctgctggaggcaaggtcattggatgtgttgtctgatggggttctgaaggaccttagtgaattctatcgcaaaatgatccctgccatggatcgccgggtcattactccttatcaagatgggccggacatctcgtacttggaggtcgaagacggagatatttttctcaaagaagaaataaatatggagcagaatcacagtgaaacaatgtttaaaaaggccaaaactaaagcaaagaagaagcctcgaaaaaggagcgactccagtggaggatataatctcagtgatattatccagtccccctcatcgacagggcttctgaagagtggaaagacaaatagcgttgaaagtctgccagagctgttaactagcgactccgaaggctcatatgccggggtgggaagccctcgtgaccttcagtcccctgatttcacgactggcttccatagtgacaaaatagaagccaaagtaaagccctacgttaacggcacgtcccctgtgtattctcgcgaggatttgaagccgtgggaaaagtcaccaatactgaaaatctccgcaccacaaccgataccttccaacagaatagataccaccagctctgcctcttgggtggcaggaagcttttcacctgtgagtcctccagtagtcgacctccgcacaattatggaaattgaggagtctcggcaaaaatgcggcgcaactcccaagtctcacctggggaagaccgtctcccacggggtgaagttgtcgcaaaagcagcgtaagatgattgcgctgactaccaaagaaaataattcgggaatgaatagcatggaaacggttctgtttacgccatcaaaggcacctaaacccgttaatgcatgggcctcctctcttcattccgtgtccagcaagtcattccgtgacttcttactcgaggagaagaagagtgttacaagccatagcagcggagatcatgtcaaaaaagtgtcattcaaggggatcgagaattcccaggccccaaaaatagtccggtgtagcacacacggcactccaggacctgaagggaatcacattagcgacctgccgttgctggacagccctaatccatggctaagtagcagtgtgacagccccttccatggtggcgcctgttacctttgcatccattgtcgaggaggagctccaacaggaggctgctctgattaggtctcgagagaagccgcttgctttgattcagattgaagaacatgccatacaagacctgctggtgttctacgaggcttttggcaacccagaggagtttgtgattgtggagaggacaccccaagggcccctcgccgttccaatgtggaataagcatggctgttag

SEQ ID NO: 120548 - DNA, 1386 bp, synthetic construct
  misc_feature 1..1386: note = Description of Artificial Sequence: Synthetic coding sequence
  source 1..1386: mol_type = other DNA
atgtggcaactaacttcattgctgctattcgtcgcaacctggggcatctcaggaacccccgcacccctcgacagcgtgtttagcagttctgagcgcgcgcaccaagtattaagaatccgcaaacgggcaaatagtttcctggaggaactcaggcacagttcccttgaacgggaatgcatcgaagagatctgtgactttgaagaggcgaaggagatattccagaacgtggacgacactttagcgttttggtccaagcatgtggacggtgaccagtgtttagttctgcccctcgaacacccatgcgcttctctgtgctgtgggcacggcacgtgcatagatggaatcggaagcttctcatgtgactgtcgatccggatgggaagggcgcttttgtcagagggaggtttcgtttctgaattgctcactagacaacggcggttgcacccattattgtttggaagaggtgggatggagaaggtgtagttgtgctcccggctataaactcggagacgacctgttgcagtgccatcccgctgttaagttcccatgtggacgtccatggaaaagaatggaaaagaaacgttctcacctcaagagagatactgaggatcaagaggaccaagttgatcccagactaatcgacggaaagatgacaaggagaggcgatagtccttggcaggtcgtgctcctggactctaagaagaagctggcttgcggggcagtactgatccatccaagctgggtgttaacagctgctcactgcatggatgaatcaaaaaagcttctagttcgcctcggtgaatacgatttacgacgctgggaaaaatgggaattggacctggacattaaggaggtatttgttcaccccaattacagcaaaagtacaacagataacgacattgccctgcttcacctggcccaaccggctaccttgagccaaacaatcgttccaatctgcttgcctgacagcggtctggctgaaagagagcttaatcaagcaggtcaagagactctggtcaccggatgggggtaccatagctcccgcgaaaaagaagccaaaaggaataggacattcgtgctgaacttcattaagatccctgtggtaccgcataacgaatgttcagaagtcatgtcaaatatggtgagcgagaatatgctgtgtgccggtattctgggagatcggcaagacgcgtgtgagggtgactccggagggcctatggtcgcttctttccatgggacctggtttttggtcgggctagtgagctggggggaaggatgcggattacttcataattacggtgtgtacaccaaggtgtcccgataccttgactggattcacggccacatcagagacaaagaagccccccagaagtcctgggcaccttag

SEQ ID NO: 120549 - DNA, 405 bp, synthetic construct
  misc_feature 1..405: note = Description of Artificial Sequence: Synthetic coding sequence
  source 1..405: mol_type = other DNA
atgaaggcattttcaccagtacgaagtgttaggaagaattccctctctgatcacagcttggggatctcgagatccaagacccccgtcgatgatcctatgtccctcctctacaacatgaacgactgttattccaaacttaaggaactcgttccatcgatccctcagaacaagaaagtgagcaagatggagattcttcaacacgtcattgattatattctcgatctgcagatagcattggatagccatcccacaatcgtcagcttgcaccatcagcgacccggtcagaaccaagcaagcagaaccccacttacaacactaaataccgatatcagtatcctctctctccaggcctctgaattccctagcgagctgatgtctaacgattcaaaagccctgtgtggctag

SEQ ID NO: 120550 - DNA, 405 bp, synthetic construct
  misc_feature 1..405: note = Description of Artificial Sequence: Synthetic coding sequence
  source 1..405: mol_type = other DNA
atgaaggccttcagtcccgtccgctctgtccggaagaacagcctcagcgatcattcccttggaatttctcggtctaaaacacctgtcgatgacccgatgtcgttgctctataacatgaatgattgctactcaaagctaaaggagctcgtgccaagtattcctcagaacaagaaggtgtctaagatggaaatattgcagcatgtgatcgactatattttggacctgcagattgccctggatagtcacccaaccattgtcagtcttcatcaccagaggccgggacagaaccaggcctcacgaacacccctcacaactctaaataccgatatttccatcttgtctcttcaggcatcagaattcccctccgagttaatgtcaaacgattccaaggctctgtgtgggtag

SEQ ID NO: 120551 - DNA, 360 bp, synthetic construct
  misc_feature 1..360: note = Description of Artificial Sequence: Synthetic coding sequence
  source 1..360: mol_type = other DNA
atgaaggccctgtcccccgtcaggggctgttatgaggcagtgtgttgcctttccgagcgaagccttgcgatagctcgtggtcgggggaagggacctgcagccgaagaacccttgtccctgctcgatgacatgaaccactgctattctcggctccgagagctggtgcctggtgtgccccgagggacgcagcttagccaggtggagatcttgcagcgtgtgatcgactatatcctcgatttgcaggtcgttctggctgagcctgctcccggcccacccgacgggccgcaccttccaattcagacggccgaactaactcctgaattagtcatctctaatgacaagagaagtttttgtcactag

SEQ ID NO: 120552 - DNA, 486 bp, synthetic construct
  misc_feature 1..486: note = Description of Artificial Sequence: Synthetic coding sequence
  source 1..486: mol_type = other DNA
atgaaggccgttagcccggtgagaccttcaggacgcaaggctccgagcgggtgcggagggggggagctcgccctgagatgcctggccgagcatggtcactctttaggaggatctgctgccgccgcggccgccgccgcggccgctcggtgcaaggccgccgaggcggctgctgacgagccggccctgtgcctccagtgtgacatgaacgactgttacagccgcctgcgacggttggtccccaccatccccccaaacaaaaaggtatcaaaggtggagatcctacagcatgttatagattacattctggacctacagctggcgctcgagacccaccccgctcttctccgccagcctccaccacccgcccctccccaccatcctgcagggacctgccccgcggcaccacctagaaccccactgaccgctcttaacacggaccctgctggcgccgtgaacaagcaaggtgacagcattctgtgtcggtag

SEQ ID NO: 120553 - DNA, 843 bp, synthetic construct
  misc_feature 1..843: note = Description of Artificial Sequence: Synthetic coding sequence
  source 1..843: mol_type = other DNA
atgctgggtcagcagcagcagcagttatattctagcgccgccctgctaacaggggaacgatcaagactgctcacttgctatgtgcaggactacctggaatgtgtggaaagtctgcctcacgacatgcagcgaaacgtgtcggttctccgcgaacttgacaacaaatatcaggagacattaaaagagatagacgacgtgtacgaaaaatacaagaaggaggatgatctgaaccagaagaagcggctgcagcagctccttcaaagggcactgattaactcccaggaactgggggatgaaaaaatacagattgtgacacagatgctggagcttgttgaaaatagagcgcggcagatggaactgcacagccagtgctttcaagatcctgcagaatccgagagggcgagcgataaagcaaagatggactcgtctcagcccgagcgctcaagcaggagaccgcggagacagcggacgagcgagagtagagacctgtgtcatatggcgaacgggatcgaggattgcgacgatcagcccccaaaggaaaagaagtcaaagagtgccaagaaaaaaaagcgctcaaaggcaaagcaggagcgcgaagcctcgccggttgagtttgccatcgatccgaacgagccaacctattgcctgtgtaaccaggtctcatacggggagatgattggctgcgataatgagcaatgtcctatagaatggttccatttttcttgcgtgtccctgacttacaaaccgaagggaaaatggtactgccctaagtgcagaggagacaacgaaaagaccatggataaaagcaccgaaaaaacaaaaaaagaccgtcgctcgcgttag

SEQ ID NO: 120554 - DNA, 723 bp, synthetic construct
  misc_feature 1..723: note = Description of Artificial Sequence: Synthetic coding sequence
  source 1..723: mol_type = other DNA
atggatcaggatggtgatcagcaactggggcccagcagaattctggcaccccagaccctgaaagagatcgacgatgtatacgagaaatataagaaggaggatgacctgaatcagaagaaacgtctgcagcagttactgcagcgggccctgatcaatagtcaagagctgggagatgaaaaaatacagattgtcacccagatgttggagctggttgagaatcgtgctcgccaaatggagcttcatagccaatgcttccaggaccctgctgagtccgaacgcgcttcagataaggcaaagatggactctagtcaacctgagaggtcctcccgaagaccacggcggcagcggacttccgagagtagggacctttgtcatatggctaatggaattgaagactgtgatgaccagcctcccaaggagaagaaatctaagtcagcaaaaaaaaaaaagagaagcaaggctaagcaggagcgagaagcctcgcctgtggaattcgccatagaccctaatgagccgacatactgcctatgtaaccaggtgagctacggagaaatgataggttgtgacaatgagcagtgtcccatcgagtggttccatttcagctgtgtgtctctaacctacaagcccaaggggaagtggtactgccccaagtgccggggggacaacgagaagactatggacaagagcaccgagaagaccaagaaggaccgcagaagtaggtag

SEQ ID NO: 120555 - DNA, 1257 bp, synthetic construct
  misc_feature 1..1257: note = Description of Artificial Sequence: Synthetic coding sequence
  source 1..1257: mol_type = other DNA
atgctgtacttggaggactatctcgaaatgattgagcaacttcctatggaccttcgggatcgttttaccgagatgagggagatggacctgcaggtgcagaatgcaatggatcagcttgagcaaagggtcagcgagttctttatgaacgccaagaagaacaaacccgaatggagggaagagcagatggcctctattaagaaggactactataaagccctggaggacgcagacgaaaaggttcagctggccaatcaaatttacgatctggttgacagacatttgcgaaaactggaccaagaactcgccaagttcaagatggaattggaagctgacaacgccggcattactgagattctggaaagacgctccctggagcttgatacgccatcacagccagtaaacaaccatcacgcgcattcgcacaccccagtggagaaaaggaaatacaatccgactagtcatcacacaacaaccgaccacatccctgagaagaaattcaagtctgaagccttactgtcaaccctgacatcagatgcgtccaaggagaacacactggggtgcagaaacaataatagtactgcatcttcgaacaatgcgtacaacgtgaacagtagtcaacctctgggaagctacaacatcggttcactgtcaagtgggacaggagcaggggccataacaatggctgctgcacaggctgtgcaggctaccgctcaaatgaaggaaggtagaagaacttcgtctttgaaggccagttacgaggcctttaaaaacaatgacttccaactaggcaaagagttcagtatggcgcgggaaacagtggggtacagcagctccagcgccttgatgaccaccctgacccagaacgcctcaagctcagcggccgattccaggagcggaaggaaatccaagaacaataataaaagttctagccagcagtcttcaagtagctcttcctcttcttcgctgagcagttgcagtagttcctccactgtagtccaagagatctcacagcagacaacagtcgtgcccgagtccgattctaactcccaggtcgattggacctacgatcccaacgagccccgttactgtatctgcaatcaggtttcttacggggagatggtcggctgcgataatcaggactgccctatcgagtggtttcactacggctgtgttggcctcacggaagcccctaagggcaagtggtactgtccgcaatgcaccgccgccatgaaaagaagaggcagcagacacaaatag

SEQ ID NO: 120556 - DNA, 279 bp, synthetic construct
  misc_feature 1..279: note = Description of Artificial Sequence: Synthetic coding sequence
  source 1..279: mol_type = other DNA
atgctctacttggaggactacctcgagatgattgagcaattgccaatggatctccgtgatcgcttcactgagatgagagagatggacttgcaggttcagaacgctatggaccaattagaacaacgagtgtcagagttctttatgaatgccaaaaagaacaagccagagtggcgcgaagagcaaatggctagcatcaagaaggattactataaagctctggaggacgcagatgagaaagttcagctagccaatcagatttacgacttacaacacttctag

SEQ ID NO: 120557 - DNA, 723 bp, synthetic construct
  misc_feature 1..723: note = Description of Artificial Sequence: Synthetic coding sequence
  source 1..723: mol_type = other DNA
atggccaccgctatgtatctggagcattacctggatagcattgaaaacctgccctgcgagctgcaacggaatttccagctgatgagggagctcgatcagaggacagaagacaagaaggcagagatagacatcctcgctgctgagtacatctcgactgtgaaaaccctgtcgccggatcagcgagtggaacgactgcagaagatccagaatgcatattctaagtgtaaagagtacagtgatgataaggtccagttggccatgcagacatatgaaatggtggataaacacatacggcgtctcgacgcagatttggcccggttcgaagccgacctcaaagacaaaatggagggatctgatttcgagtcttccggaggccgcggcttgaagaaggggaggggacaaaaagagaagagaggaagccgtgggcgaggaaggcggacttctgaggaggacacacctaagaaaaaaaagcataaggggggcagcgaatttactgatacgattctttcggttcacccgtctgatgttctggacatgcccgtcgatcctaacgagcccacctattgcctgtgtcatcaagtgagctatggagaaatgattggatgcgataacccggactgtcctatcgaatggtttcatttcgcttgcgtggacttgacgacaaagccgaaggggaaatggttctgtcctcggtgcgtgcaggagaaacgcaaaaaaaaatag

SEQ ID NO: 120558 - DNA, 681 bp, synthetic construct
  misc_feature 1..681: note = Description of Artificial Sequence: Synthetic coding sequence
  source 1..681: mol_type = other DNA
atggcaactgctatgtaccttgaacattacctggatagtatcgagaacttgccatgcgagctccagcgcaactttcagctcatgagggagctggatcagcgaaccgaggacaagaaggcagagatcgatatactggccgccgaatacatcagcactgtgaagactctctcgcctgaccaaagagttgagaggctgcaaaagatacagaacgcatacagcaagtgtaaagagtattcagatgataaagtccaattagcaatgcagacctatgaaatggttgataaacatatccgccgcttagacgcagacttagctagatttgaggctgatttaaaggacaagatggagggctcagactttgaatctagcgggggacgcgggcttaagaaagggcgcgggcaaaaggagaagcggggttctagaggaagagggcgccgaacttctgaagaggacacacccaaaaagaaaaaacataaaggtggctccgagttcactgacacgattctcagtgtacatccatccgatgtgctcgatatgccagtggaccccaacgaacccacatattgtctgtgccatcaggtgagctatggagaaatgatagggtgtgataatcctgattgtccgattgagtggttccactttgcttgtgtggaccttacgactaaaccaaaggggaagtag

SEQ ID NO: 120559 - DNA, 2265 bp, synthetic construct
  misc_feature 1..2265: note = Description of Artificial Sequence: Synthetic coding sequence
  source 1..2265: mol_type = other DNA
atgttttctggagggtgtcacagtccgggctttggcagaccaagcccagccttccctgcacctggctcacccccccctgcgcctaggccctgccggcaggaaacaggagagcagatagctattaagcaatgtaggcaagagctgtcaccccgcaaccgggagcgctggtgtttggagattcaaattatgcgccgcctcacccatcccaacgtggtcgccgcccgcgacgtgccagaagggatgcaaaacctggctcctaatgatctaccactcctcgccatggaatactgtcaagggggcgatctcaggaagtatctgaaccaattcgaaaactgttgtgggctgcgcgaaggcgctatcctgacactgctcagcgatatagcgtcagctctccgctatctccacgagaacagaatcatccaccgtgatctcaaacccgagaacatagtccttcagcaaggggaacaacgactcatacataaaattattgatctgggctacgccaaggagcttgatcaggggtcgctttgcacatctttcgtggggacactccagtaccttgcccccgaactgctggagcagcagaaatacacagtcaccgttgactattggtccttcggaacacttgctttcgagtgtattaccggcttccgccctttcctccccaactggcaacctgtgcagtggcactctaaggtgcggcaaaagtctgaggtcgacatcgtggtttcagaggatttgaacggtactgtgaaattttccagctccctcccatatccaaacaatcttaacagtgtgctggccgagcgtctggaaaagtggctgcaactgatgctcatgtggcaccccagacagcgcgggacagacccaacgtacggaccgaatggatgttttaaagcactggatgatatcctaaacctcaagttggtgcatatccttaatatggtcactggaaccatccacacctacccggtcacagaagatgaatcactgcaatcacttaaagccagaattcagcaggacacaggcattcctgaggaggaccaggaactcctgcaagaagccgggctggccctgattcccgataagcccgccacacagtgcatctctgacggaaagctgaacgagggccacacattagacatggatttggttttcctgtttgacaactctaagatcacatacgagacgcaaatctcacccagaccacagcctgaaagcgtttcttgtattctgcaagagcccaagagaaacctagcctttttccagctccgaaaagtctgggggcaagtgtggcacagcattcagaccctgaaggaggattgcaacagactgcagcaaggacagcgcgcagccatgatgaaccttctgagaaacaattcctgcttgtcaaaaatgaagaatagtatggcttccatgtcacagcagctcaaggctaaactggatttctttaagaccagcatccagatcgatctcgagaaatatagcgagcaaaccgagttcgggatcaccagcgacaaattactccttgcctggagggaaatggaacaagctgttgagttgtgtggtcgcgaaaatgaggtgaaactgttagtcgagagaatgatggccctgcaaaccgatatcgtggatctccagcgcagcccaatgggacgcaagcaagggggaaccctggacgacctagaggaacaagcccgagaactctaccgcaggctgcgagaaaaacctagagatcaaaggacagaaggggatagccaggagatggtgagactgcttcttcaggcaatccagtcattcgaaaagaaggtgagagtaatttacactcagctgtccaaaaccgtcgtgtgcaaacagaaggccctagagctcttgcctaaggtggaggaggtagtgtctctcatgaatgaagatgagaagactgtggtgcggctccaggagaagcggcaaaaagagctctggaacctgctcaaaatagcatgttcaaaggttcgcggacccgtgtccggttccccggattcgatgaacgcttccaggctgtcacaaccaggccagctgatgtcacagcccagtacagctagcaatagccttcctgaaccagccaaaaaaagcgaggagttggtcgcagaagcccacaacttatgtacgcttctagagaatgcaatccaggacacagtccgagaacaggaccagagcttcaccgccctcgactggagttggctgcagaccgaggaagaggaacactcctgcctagaacaggcctcgtag

SEQ ID NO: 120560 - DNA, 963 bp, synthetic construct
  misc_feature 1..963: note = Description of Artificial Sequence: Synthetic coding sequence
  source 1..963: mol_type = other DNA
atgaaccgacatctgtggaagtcccaactgtgtgagatggtccagccttcaggagggcctgccgctgaccaggacgtgttaggcgaggaatcccctctaggaaaacctgccatgttgcatctcccatctgagcaaggcgcacccgagactctgcaacgctgcctggaagagaaccaagagctgcgggatgccatacgccaatccaaccagattctgcgcgagaggtgtgaggagctgctgcattttcaggcctctcagagggaagaaaaggagtttctgatgtgcaaattccaggaggcacgcaagctcgtcgagcggttgggattggagaaactggacctgaagaggcagaaagagcaggctttgagagaggtggagcacctaaaaagatgtcagcagcagatggcagaagataaggcgtccgtgaaggcccaagtgacttccctgctgggcgagttgcaagaatcccagtcacgtctggaggcagccaccaaagaatgtcaggctctcgagggcaggagaaaactggctcagctccaggtggcctaccatcagctttttcaggagtacgataatcacataaaatctagcgtagtagggagtgagagaaagcgagccgatatctacaaagccgacttccaagcagagaggcaagccagggaaaaattggctgaaaagaaggagctgctgcaggagcagcttgagcaattacagagagagtattccaagctgaaagcctcctgtcaagagtccgcccgaattgaggatatgaggaagcggcacgtggaagtgtcgcaagctcctcttccgcccgccccagcctacctctcctccccgctcgcgctgccaagccagcggaggagtccacctgaggagccacctgatttttgctgcccaaagtgccagtatcaggctcctgatatggacacgctgcagattcacgtgatggaatgcatcgagtag

SEQ ID NO: 120561 - DNA, 1602 bp, synthetic construct
  misc_feature 1..1602: note = Description of Artificial Sequence: Synthetic coding sequence
  source 1..1602: mol_type = other DNA
atgtcttcagacggaaccatacgtcacagtaaagttcgccaaaaaagcgaagtggacatcgtcgtgtcagaagatctgaatggcactgtaaaattcagctcttcccttccatatccaaataaccttaattctgtgctcgccgagcggttagagaagtggctgcagctgatgttgatgtggcatccacgacagagagggaccgaccccacctacggaccaaatggctgtttcaaggcgctcgacgacatattgaatctgaagctggtgcacattctaaacatggttactggaacaatccatacctatcctgtgaccgaggatgaatctctgcagagtttgaaggcccggattcagcaggataccggtatacctgaggaggatcaggagcttttgcaggaggccggattggcactcatcccagataagcccgcaacacagtgtatctcagatggaaagctgaacgaagggcatacgctggatatggatcttgtctttctgtttgataattctaagatcacatacgaaacacagatctcccctcgcccacaacctgaatctgtgtcttgtatattgcaggaaccaaagcggaacctggctttcttccagctgcggaaggtgtggggccaggtgtggcactcaatccagaccctgaaggaggattgcaatcggctacaacaagggcagagggccgctatgatgaacttattacgcaacaatagctgtttatcaaaaatgaagaattccatggccagcatgtctcagcaattgaaagccaagctggacttttttaagacaagcattcagatcgacctagagaaatactccgagcaaaccgagttcggaatcacgtcggacaagctgctcctagcttggcgagagatggagcaagcggtggagctgtgcgggagagagaacgaagtgaagctgctcgtggagcgcatgatggctttgcaaaccgatatcgttgatcttcagcggtctcccatgggtagaaaacaaggtggaactcttgacgaccttgaggaacaggctagagaactgtatcgtcggttgagagaaaaaccaagggaccagaggaccgaaggtgactcgcaagaaatggttagactccttctccaggctattcagtcattcgagaagaaagtaagagtgatctacacccagctgtccaaaaccgttgtgtgtaaacagaaagcccttgagctcctgcccaaggtcgaagaggtcgtttcactaatgaacgaggacgaaaaaaccgttgtgaggttacaagagaagagacagaaggaactgtggaatctgctgaaaatagcttgcagcaaagtaaggggacctgtctcggggagcccagactccatgaatgcgagtcgcctatcgcagccaggacaactgatgtcacaaccctccaccgctagcaattccctccctgagccagctaaaaaatccgaagaactggtagccgaagcccacaacctctgtacgctgctggagaatgccatacaggacaccgtgcgtgagcaggaccaaagctttacggccctagattggtcgtggcttcagactgaagaagaggaacattcgtgtttggagcaggcatcttag

SEQ ID NO: 120562 - DNA, 2094 bp, synthetic construct
  misc_feature 1..2094: note = Description of Artificial Sequence: Synthetic coding sequence
  source 1..2094: mol_type = other DNA
atgtcttcggacgggacgattcgcctaactcatcccaacgtggtggcagcaagagatgtgcccgaggggatgcagaacttggctcccaatgacttgcccttactggctatggaatactgtcagggaggggacctcaggaagtacttgaaccagttcgagaactgctgcggcctccgcgaaggggccatcttgaccctcctgagcgatatcgccagcgcgctgagatatctccacgagaacaggattatccaccgcgacctcaaaccagaaaacatagttctccaacaaggcgagcaacgcctcatccataaaatcatcgatctggggtacgccaaagaattggatcagggcagcctctgcacctccttcgtaggaactctgcaatacctagctcctgagctgttggagcagcagaaatacaccgtgactgtggattattggtccttcggtacacttgccttcgagtgcatcactggctttagaccctttttacccaactggcagcctgttcagtggcatagtaaagttcggcagaaatctgaagtggacatcgttgtgagcgaggaccttaacgggacagtgaagttcagttcatcgctcccctatcccaacaacttgaatagcgtgctggccgagagattagaaaagtggctgcagctgatgttgatgtggcaccctagacagcgcgggactgatcctacttacggtcctaatggatgcttcaaggctctcgacgacattctcaatctcaagctggtgcacatactcaatatggtcactggcaccatccacacctaccctgtgactgaggatgagagcttacagtctttaaaagcaaggattcagcaggacactggcatccctgaggaggaccaggagttattgcaggaggccggcctggccctgatccccgacaaaccagccacacagtgcataagtgacgggaagctcaatgagggacacactttggacatggaccttgtcttcctgttcgacaattccaagatcacctacgagactcagatatcacctaggccccaaccagaaagcgtcagttgcatcttacaggagccaaagaggaacttggcgtttttccagctgcgtaaggtgtggggccaagtctggcattcaattcagaccctgaaggaggactgtaatagactacagcaaggacaaagagccgctatgatgaacttgctcaggaacaactcttgcctgagtaaaatgaaaaatagcatggccagcatgtcccaacagctaaaggcgaaactcgattttttcaagacatccattcagatcgatctagagaaatacagcgaacaaacagagtttgggataacctctgataagttgctcctcgcctggcgggaaatggaacaagcggttgaactttgcggccgagagaacgaggtgaagctgctggtggagcgaatgatggcgctgcagaccgatatagtggacttgcagaggtcgcccatgggcagaaagcaggggggcacactcgacgacttagaggaacaggcacgggagctgtacagacgcctgcgggagaaaccgagggatcagaggacagaaggggacagccaggagatggtgagactcctcctacaggcaatccagtctttcgaaaagaaagtgcgggtcatctatacccagctttccaagaccgtcgtctgtaagcagaaggctttggagctgctgcccaaggtagaggaggtagtctcactcatgaatgaggatgagaagactgtggttagactgcaggaaaagcgacagaaggagctgtggaacctattgaaaatcgcatgttcaaaagtgagaggacctgtgtcagggagtccagactccatgaacgctagcaggctgagtcagccaggtcagcttatgtcccaaccaagcactgcttcaaattccctgcctgagcctgctaagaagagcgaagaactggtggcggaagcccacaatctttgcaccctgctggaaaacgctatccaggatacggtgcgagaacaggatcagagttttactgccctggactggtcctggctgcagaccgaagaggaagagcattcgtgtctcgaacaggcatcctag

SEQ ID NO: 120563 - DNA, 2271 bp, synthetic construct
  misc_feature 1..2271: note = Description of Artificial Sequence: Synthetic coding sequence
  source 1..2271: mol_type = other DNA
atgagttggagcccttcattaactacccagacatgcggcgcctgggaaatgaaggagcggttgggcacaggtggcttcggcaatgtaattcggtggcacaaccaggaaactggggaacaaatcgctataaaacagtgcagacaggaactctccccacggaatagggagcgatggtgcttagagatacaaataatgcgccgactcactcatccaaacgtggtggccgctcgcgacgtgcctgaagggatgcagaacttggcccctaatgacctccctctgctggcgatggagtactgccaggggggcgatcttcggaagtatctcaatcagttcgagaactgctgtggccttagagaaggagccatcctgacgctcctatcagacattgcatctgctctcagatacctgcatgagaatcggattattcacagggacctgaaacccgagaacatcgtgctgcaacaaggagagcaacggttgatccataaaatcatcgatctgggctacgcaaaagaactcgaccaaggcagcctctgtacaagctttgttggaaccttgcagtatttagcccccgagctactcgaacagcagaagtacacggtgaccgtcgactactggagtttcggcaccctagcctttgaatgcatcactggcttccgtcccttcctcccaaattggcagcctgtgcagtggcactcaaaggtcaggcagaaatctgaggtggacatcgtcgtttctgaagatctgaatggtaccgttaaattttctagctccctcccatatccaaataacctcaattccgttctggctgaacggctggagaaatggttgcagctgatgctgatgtggcatccacggcagcgcggaaccgatcctacatacggccctaatggatgttttaaggctttagacgacatcctaaacctcaaattggtacacattctaaacatggttacaggcaccattcacacttaccccgttacagaggacgaaagccttcagtctctcaaggccagaatccagcaggacacaggtatacctgaggaagatcaggaactgttacaggaggccggcctcgccctcatacccgataaaccggcaactcaatgtataagcgatggtaaactaaatgaaggtcatacattggatatggatctggtgtttctgttcgataacagcaagattacatacgagacacaaatctcccccaggccgcaaccagaaagcgtatcctgcatcctccaggagcctaagagaaatctggcattttttcaactgcgcaaggtctgggggcaggtttggcacagcatccagactttgaaggaagattgtaaccgactgcagcaagggcaaagagctgcaatgatgaatctgcttcgcaacaatagctgcctttccaaaatgaagaatagcatggcctccatgtctcagcagcttaaggcgaaacttgatttttttaaaacatctatccagattgatttggagaaatactcggagcagacggagttcggtataaccagtgacaaactgctgctggcgtggcgcgaaatggaacaggccgttgaactgtgcgggcgggaaaatgaagttaagctgctcgtcgaacgtatgatggccttacagacagacattgtcgacctgcagcgctcacccatggggaggaaacagggcggaaccctcgacgacttagaagagcaggctcgcgagttatatcgacggctgcgggagaaaccgagagaccagaggaccgaaggtgactcacaagaaatggtgcgtctactgctccaggctattcagtccttcgagaaaaaagtccgcgtgatctacacgcagctgagcaagaccgtcgtctgtaagcaaaaggcgcttgaattactgcctaaagtcgaggaagtggtttctctgatgaacgaagacgagaaaaccgttgttcgactgcaggaaaagcgtcagaaggaactttggaacctgctgaagatcgcttgttccaaagtgagagggccagtctcaggatctcctgactccatgaatgcgagccgccttagccagccagggcagctgatgagtcagccatccaccgccagcaattcccttcctgaacctgcaaagaagagtgaggagctggtggcagaggcacacaacctctgtactctgctcgagaacgcaatccaagacacagtacgggagcaagaccagagcttcaccgcgctggactggagctggctccagaccgaggaggaggagcactcttgtctcgagcaggccagttag

SEQ ID NO: 120564 - DNA, 3999 bp, synthetic construct
  misc_feature 1..3999: note = Description of Artificial Sequence: Synthetic coding sequence
  source 1..3999: mol_type = other DNA
atgcgcaacctgaagctgttccgcactcttgaatttcgcgatattcagggacccgggaatccccagtgcttcagtctgagaaccgaacagggcactgtactgatcggctcagaacatggcctaattgaagttgaccctgttagtcgggaagtgaaaaacgaagtcagtttggtagctgaaggattcctgcctgaagacggatcgggccgcattgttggagtgcaagacctgctggatcaggaaagtgtgtgtgtggcaaccgccagcggggacgtgattctatgcagcctgagcactcagcagctggaatgtgtggggagcgtggcgtccggcatttccgtaatgagttggtcaccggatcaggaactggtgcttcttgctaccggacagcagacacttattatgatgaccaaggactttgagcctattcttgagcagcagatacatcaggatgactttggtgaatccaagtttattacggtaggatggggccgaaaggagactcagttccatggcagcgaaggtcgacaagctgctttccagatgcagatgcacgaatcagcactcccatgggacgaccataggccacaagtgacttggagaggtgacggacagttctttgccgtgtcagtggtctgtcccgagacaggagcccggaaagtacgagtttggaatagggaatttgccctgcaatccacaagcgaaccagtggccggcctcggacctgctctggcctggaagcctagcgggtctctcatagcgtccacacaggacaagcccaaccaacaggacattgttttcttcgagaagaatggcttgctgcatggtcacttcaccctgcccttcctgaaggatgaagtgaaggtgaatgatcttctatggaacgcagacagttccgtgctggcggtgtggctcgaagacctgcagcgggaggagtcttctatccccaagacctgcgttcaattatggacggtgggcaattaccactggtatctcaagcaatcactgagcttcagcacatgtggaaaatctaaaattgtttctctgatgtgggatccggtgaccccctacagattgcatgtgctgtgccaaggttggcactatctcgcatatgactggcactggactactgaccggagcgtcggcgataattcatccgatctgtccaacgtcgccgtcattgatggcaatagggtgctggtcacagtctttcggcagaccgtcgtgcccccgccaatgtgtacttatcaacttctcttccctcaccccgtcaaccaagtgacattccttgcccatcctcagaagagtaatgatttggcagttctggacgcctccaatcagattagcgtgtacaaatgtggagattgtccaagcgccgatcctacagtgaaactgggggcggtgggcggctcagggttcaaggtatgcctcagaacaccccacctcgagaagcgatacaaaatacagttcgagaacaatgaggatcaggacgtaaaccctctgaaactgggactgctgacatggatcgaggaagatgtctttcttgccgtatcccactcagaattctctccacgctcagttatccatcacctgacagccgcatcaagtgagatggatgaggaacatggtcagttgaacgtgtctagtagcgcagccgtagatggtgtgatcatatcactctgttgcaactcaaagactaagtcggtcgtactgcaactagctgatggccagattttcaagtatctttgggaatccccctcccttgcaattaagccttggaagaactccgggggcttccccgtgagatttccatatccttgtactcagaccgaacttgccatgattggtgaagaagagtgcgtgctcgggctgactgatagatgtagattctttattaacgacatcgaggtggcaagcaacatcacttcatttgcagtctacgatgagttcctgctcttgaccacccactcccacacatgtcaatgcttctgtcttagggacgcaagtttcaaaacattgcaagcaggcttatcttctaaccatgtgtcccatggcgaagtgctgaggaaggttgagaggggctcccgcatcgtgacagtggtacctcaagacacaaagctggtgcttcaaatgcctcggggtaatctggaagtcgtccaccacagggctcttgtgctagcccagataaggaagtggctggataaactcatgtttaaggaagctttcgaatgtatgagaaagttgcggatcaacctgaatctgatttacgatcacaaccctaaggtcttcctgggaaatgttgagacattcataaaacagattgactctgtgaaccatattaatctgttctttacagagctaaaggaggaggacgtgacaaaaacaatgtaccccgcccccgttacctcttcagtctatttatctcgggatccagatggaaataagatcgacctcgtgtgtgatgccatgagggccgttatggagtccatcaatccccacaagtattgtttatccatcctgacgtcccatgtcaagaaaacaaccccagagttggaaatcgttctgcagaaagtccacgaacttcagggtaatgcaccttcagaccccgacgctgtttccgcagaggaagccctcaaatacctgctgcatctggtggacgtgaatgaactttacgaccacagcctgggaacttacgacttcgacctcgtcctcatggtcgctgagaagtcgcagaaggatcctaaagagtatctgcccttcctaaacacacttaaaaaaatggaaactaattaccagaggttcacaattgataagtacctgaaaaggtacgagaaagccatcggacacctgtccaagtgcggccccgaatactttcctgagtgcttgaatctgatcaaagacaaaaacctgtataatgaggctcttaagttatacagcccctcctcccagcaatatcaggacatcagcatcgcctacggcgaacatctcatgcaggagcatatgtacgaaccagcaggtctcatgtttgcccggtgtggggcccacgagaaagccctgagtgcgttcctgacatgcggaaactggaagcaggccctttgtgttgccgctcagttaaattttaccaaggatcagctggtcgggctgggtcgaactctcgcgggaaagctcgttgagcagcgaaagcatatagacgccgcaatggtccttgaggagtgtgcccaggattatgaggaagcagtgttactgctcttagaaggcgcagcttgggaagaagcgctaagactggtgtacaaatacaataggctcgatataatagaaacaaatgtgaaaccgagcattcttgaggctcagaaaaactacatggctttcctggatagccagactgctacgttttcaagacataaaaagagattactggtggtaagagaactgaaggaacaggcacaacaggcaggcctcgacgatgaggtgccccacgggcaggagtcagacctgttcagcgaaacttctagcgtggtcagcggaagcgagatgtctgggaagtacagccactccaactctaggatcagtgctagaagttcaaagaatcgtcggaaggctgaacggaagaaacatagcttgaaagaggggtctcctctggaggacttagccttgctagaggccctcagcgaagtcgtgcaaaatactgagaatctgaaggatgaggtgtaccacatcctaaaagtccttttcctgtttgaatttgacgagcagggacgggagctacagaaagccttcgaagacactttacagctgatggaacgcagccttcccgaaatctggactctgacataccagcagaactccgccactcctgttttggggcctaactctactgcaaacagtattatggccagctatcaacagcagaaaaccagcgtcccagtgctggacgcagagttgttcattccgcctaaaattaaccgacgcacccagtggaagctgtcactgctcgattag

SEQ ID NO: 120565 - DNA, 2952 bp, synthetic construct
  misc_feature 1..2952: note = Description of Artificial Sequence: Synthetic coding sequence
  source 1..2952: mol_type = other DNA
atgtgggatcctgtgaccccttaccggctccatgtcctgtgtcaaggatggcattacctggcttacgactggcactggaccaccgatagatctgtgggcgataatagtagcgacctatctaatgtggctgtcatagatggcaatcgagtgctagtcactgtctttagacagaccgtagttccaccacctatgtgcacctatcaattgctcttcccacatcccgtgaaccaagtgacctttctggcccatccacaaaagtccaacgacctggctgtgctggacgccagcaaccaaatctcagtatacaaatgcggagactgtcccagcgccgaccccaccgtgaagctgggcgccgtgggcgggtccgggtttaaggtctgccttcgaacaccgcatctggaaaagcggtataagatccagtttgagaataatgaagatcaggacgtgaatccactgaagcttgggctccttacttggattgaggaagacgtcttcctggcagtctctcactcagagttttctccgcggtctgtcatacaccacctaacagccgccagttctgagatggacgaggaacatggccagctgaacgtgagttcgagcgccgcagtggacggcgttatcatctctctgtgttgcaactcaaaaacaaagtccgtggtgcttcaactggccgatgggcagattttcaagtatttatgggagtccccatcccttgccattaaaccctggaagaacagtggcggtttcccagtcagatttccttatccatgtacccaaaccgagttggcaatgattggggaggaggaatgcgttcttggccttactgatcggtgccgctttttcataaacgatatcgaggtggcctctaacatcacaagttttgcagtctacgacgagttcctgcttctgacaacccactctcacacttgtcagtgtttctgcctcagggacgcaagcttcaagacactccaagctggtttgtcttccaatcacgttagtcacggggaggtattgagaaaagtagagagagggagtcgcattgttaccgtggtgcctcaggatacgaagttagtcctccagatgccgcgagggaatcttgaggttgtgcaccacagagctctggtgctagctcaaatccgcaagtggcttgataagctcatgtttaaagaggcttttgagtgcatgcggaagctgcgcataaatctgaatctcatctacgatcataaccctaaagttttcttaggaaacgtggaaacatttataaaacaaatcgactcagtgaatcacataaacctcttttttaccgagctaaaagaagaagacgtcaccaagaccatgtatccggcacccgtcacctctagtgtttacctaagtcgtgaccccgacgggaataagattgacttggtttgcgacgccatgagagcggtcatggaatccatcaacccacataaatattgtctgagcatcctcactagccatgtgaagaaaacgacacccgaactggaaatagtacttcagaaggtccacgagctgcagggaaatgcaccctccgatccagatgccgtctctgctgaagaggcacttaaatatctcctgcatctggtcgatgtgaacgaactgtacgatcacagtctgggcacctatgatttcgacctggtactgatggtggcggagaaatctcaaaaagatccaaaggagtacttacccttccttaacactctgaaaaagatggagacaaactaccagaggtttactattgataaatatctcaagcgctacgagaaggcgattggtcatctttccaagtgtggacccgagtacttcccagagtgtctaaacctcataaaagataaaaatctgtataatgaagcactcaagctctactccccgagttctcagcagtatcaggatataagtatcgcctatggggaacatttgatgcaggagcatatgtacgagccagcagggcttatgttcgcccgatgtggtgctcatgagaaggcactatcagcttttctcacatgtggcaattggaagcaagcactctgcgttgctgctcaactcaacttcacaaaggaccaactcgtgggcttggggaggaccctggcgggcaagctggtggaacaacgaaagcatatagatgctgcaatggtgctggaagagtgcgcacaagactatgaagaagcggtgttattactcctggaaggcgccgcctgggaggaggcactgagattggtttacaaatacaaccgcttagacataattgaaacgaatgttaaaccttccatcctggaagctcaaaaaaactatatggccttcctcgatagccagacagcaacattttctcgacacaagaaaaggctgctggtcgtgcgagaactaaaagaacaagctcagcaagcaggattggatgatgaagtgccacatggccaggagtctgatctcttttcagagacttcaagcgtggtttccggatcagaaatgtcagggaagtactctcactcgaacagccgtataagcgcccggtccagtaagaatcggcgaaaagctgagcggaagaagcattcactaaaagagggctcacctctcgaggacttggcgctcctggaggcactatccgaagtcgtccagaacacggagaacctcaaagatgaggtgtaccacatcctcaaggtgttgttcttattcgaatttgatgagcaggggagagagcttcagaaggccttcgaagataccctgcagttaatggagcgcagccttccagagatctggaccctgacttatcaacagaattccgccactcccgtcctcgggccaaactctacagctaactctattatggcctcctatcagcagcagaaaaccagtgtccctgtgctcgacgctgagctgttcatccctccaaaaataaacagacgaacacagtggaaactttccctattggattag

SEQ ID NO: 120566 - DNA, 2151 bp, synthetic construct
  misc_feature 1..2151: note = Description of Artificial Sequence: Synthetic coding sequence
  source 1..2151: mol_type = other DNA
atgcagtctactgcaaactatctatggcatactgacgacctgctaggccaaggcgctacagccagcgtgtataaagccaggaataagaaaagcggggagctggtcgccgtcaaggtgttcaacaccacctcttacctgaggcccagagaggtgcaagtgcgcgaattcgaggtcttgagaaaattgaaccaccagaacatcgttaagctgttcgccgttgaagaaaccggcggctcacgccagaaagtgttagtgatggagtattgcagcagcggttctctcctgtccgtgctggaaagtcctgaaaatgccttcgggttgccagaagacgaattcctggtggtccttagatgcgtagtagctggcatgaaccaccttcgcgagaatggcatcgtgcaccgggacattaaaccggggaatatcatgcgcctcgtgggagaggaggggcagtcaatttataaactgactgacttcggtgcggcccgcgagctggatgacgacgagaagttcgtgtcagtgtatggtaccgaggagtacctccacccagatatgtatgagagggccgttctcagaaaaccacagcaaaaggcctttggagtcacagtcgacctttggtcaattggagtgactttatatcatgcagctactggcagcctgcctttcattcccttcgggggcccgaggcgcaataaggagattatgtataggattactacggagaagcctgcaggggccatcgccggcgcgcagaggcgagagaatggtcctttggaatggagttacacgctccccattacctgccagctgtcgcttggcctgcagtcccagctggtgcctatcctcgcaaatattctggaagttgagcaggcaaaatgctggggcttcgaccaattttttgcagaaacaagtgatatcttgcagagagttgtagtccacgttttctctctgtctcaagcagtcttgcaccacatttatatccatgcacacaatactatcgcaatatttcaggaggccgtgcacaaacagacatcagtcgcacctcggcatcaggagtatctgttcgaaggacacctgtgcgtgttagagccttcagtgtccgcacagcatatcgcccacactaccgcgtcctcacccctgacactgtttagcacggcaattccaaaggggctggcctttcgggacccagccctggacgtaccgaagtttgttcctaaagtcgacttacaggcagactataacactgccaaaggagtgctgggcgcaggataccaggcattacggctggctagggctctcttagacggccaggagctaatgtttagaggcctgcattgggtgatggaggtgcttcaggcaacctgcagacggacgttggaggtagccaggacttccctcctttacctgagctcttctctgggcaccgagaggttctccagcgtggcgggtaccccagagatccaggagctgaaagctgctgccgagctgcgctctcgcctgcgcaccctagctgaagttctgagccgctgcagtcaaaatattaccgagacacaggagtcactatctagcttgaatcgcgagctggtaaagtccagggaccaagtacatgaagataggtctattcagcagatccagtgctgtctcgacaagatgaactttatctacaagcagtttaaaaaatcccggatgcggccgggactgggttacaacgaggagcagattcacaaactggataaggtaaactttagccacctcgctaagagactattgcaggtgtttcaagaggaatgtgtgcaaaaataccaggcatctctggtcacgcacggcaagagaatgagagtagtccacgagacgcgcaaccaccttcggttagtgggatgttcagtcgccgcttgcaacactgaggcccagggcgtgcaagaatctttaagtaaactgctcgaagaactgtctcaccagcttctgcaggatagagctaaaggggcgcaggccagcccgccaccgattgccccatatccgtcccccactcgtaaagatctgcttttacacatgcaggaactgtgcgagggaatgaagcttttggcctccgatctgctggataacaacagaattatagagagactgaacagggttcccgcccccccggacgtgtag

SEQ ID NO: 120567 - DNA, 1896 bp, synthetic construct
  misc_feature 1..1896: note = Description of Artificial Sequence: Synthetic coding sequence
  source 1..1896: mol_type = other DNA
atggagtactgttcaagcgggagccttctcagcgtgctcgaaagcccggagaatgccttcggcttgccggaggacgaattcctggttgtgttgcgctgtgtggtggccggcatgaatcacctgagagaaaatggaattgtgcatagggacatcaagcctggaaacatcatgagactggtcggagaagagggccagtctatctacaagctgaccgacttcggagccgcccgcgagctggacgatgatgaaaagtttgtttcagtgtatggcacggaggaatacctgcacccagacatgtacgaaagggcagttcttcgcaaaccgcagcagaaggccttcggagtgacagtcgacctatggtcaattggcgtgactctgtaccacgcagccactggcagtcttcctttcatccccttcgggggtccaagaaggaacaaggagattatgtacagaataactactgagaaaccagcaggagctatagccggagcacaacggcgtgagaacggaccgcttgaatggtcctacacattacctatcacttgtcagcttagcctcgggctgcagagccaattggtccccattttggctaacatcttggaagtggagcaggccaaatgctggggttttgaccaattcttcgctgagacctctgatatcctccagagagtcgtggtccatgtcttctctctctctcaagcagtgcttcaccatatatatatccacgctcacaatactattgcgattttccaggaagctgtgcacaaacagactagtgttgccccacggcatcaggagtatctcttcgaaggccatctttgtgtgttagaaccaagtgtgagtgctcagcacatcgcgcataccaccgctagctcacccttaaccctgtttagcaccgccataccaaaaggacttgcatttcgcgaccccgccctcgacgtgcctaagtttgtgccgaaggtggacctccaggcagactataacaccgctaaaggtgtgctgggagccggataccaagctctcaggctcgcaagggcgttactcgatggacaggaactcatgtttcgagggctacattgggtgatggaggtattgcaggcaacatgtcggaggacattggaagtggcacggacatccctcctctatctaagctcttctcttgggactgagcgttttagcagcgtcgccggcacaccagaaattcaggagttgaaagccgctgctgagctgcgcagccgtctgagaactctggccgaagtactgtcccggtgctcacagaacattaccgagactcaggagagcctctcgtcactcaatcgcgagctggtcaaatcccgtgaccaggtgcatgaggataggagtatccagcagatacagtgctgcctggacaagatgaattttatctacaaacagttcaagaagtccagaatgagacccggcctggggtataacgaggaacagattcataaactggataaggtgaacttttcccaccttgccaaacgactgctgcaggtctttcaggaggagtgtgtgcagaagtaccaggccagcttagtcactcacggaaagaggatgcgggtcgtccacgagacgcggaatcatctgagattggtcggatgttccgtggccgcttgcaacaccgaagcccagggcgttcaggaaagtctgagtaagctactggaggaactgtcccatcagttactgcaggaccgggccaaaggtgcgcaggctagccctccaccaattgccccatatcctagccctacaaggaaagacttactactgcacatgcaggaactctgcgaaggcatgaagttgctggcatccgatttactggacaataacaggatcattgaaaggctgaatcgtgtgcccgctccgcctgacgtgtag

SEQ ID NO: 120568 - DNA, 1107 bp, synthetic construct
  misc_feature 1..1107: note = Description of Artificial Sequence: Synthetic coding sequence
  source 1..1107: mol_type = other DNA
atgaaccgacatttgtggaagtctcagctctgtgaaatggttcaaccatccggaggtcccgccgcagatcaggacgtcctgggggaagagtcccccctgggcaagcccgccatgcttcatctgccatctgagcagggcgcccccgaaaccttacaaagatgtcttgaggagaatcaggagctcagggatgctattaggcagtcaaatcaaatcctgcgggaacggtgtgaggagttactacattttcaggcatcccaacgtgaggaaaaagaattcctgatgtgcaaattccaggaggctaggaaacttgtggaaaggttaggactcgaaaaacttgaccttaagagacaaaaagaacaagctctgcgggaggttgaacatctgaaacgatgccagcagcagatggccgaagataaggccagtgtgaaggctcaggtaacaagtctgctcggcgagctgcaagagagccagtcacgcttagaggccgctaccaaagagtgtcaagctctggagggacggaggaagctggcccagcttcaagtggcttaccatcaactattccaggagtacgacaaccacataaaaagctctgtagtgggctccgaacggaagcgcggaatgcaacttgaggatctgaaacagcagctccagcaggctgaagaggcacttgtcgccaagcaagaagtgattgataagctgaaggaggaagccgaacagcataagatcgttatggagacagtgcccgttctgaaggcacaggcagatatttataaagcagactttcaggcagagaggcaggccagagagaagctggcagagaagaaggagctgttacaggagcagctcgaacagcttcaaagggaatacagcaagcttaaggcctcctgccaggagtcagcaaggattgaagacatgcgcaaaagacacgttgaggtgagccaggcccccctgcctccggctcctgcttatttaagttctcccctggcactcccctctcagaggcgtagtcctccagaagagcccccagatttttgctgtccaaagtgccagtatcaggcacccgacatggacactctccaaatccacgttatggagtgcatcgaatag

SEQ ID NO: 120569 - DNA, 1260 bp, synthetic construct
  misc_feature 1..1260: note = Description of Artificial Sequence: Synthetic coding sequence
  source 1..1260: mol_type = other DNA
atgaatagacacctgtggaagtctcaactgtgtgaaatggtgcaacccagcggggggcccgccgccgaccaggatgttttgggtgaggagagtccattgggcaagcctgctatgctccatctccccagtgagcagggcgcccccgagacactgcagcggtgccttgaggaaaatcaggagctgagagatgctatacggcaaagtaatcagatactccgggagagatgcgaggaactccttcatttccaggcaagccagagggaagagaaagagttcctgatgtgtaagtttcaggaagcacgtaagctcgtggagcggctcggcctcgaaaagctggacctgaaacggcagaaagaacaggcattgcgagaggtggaacacctgaaacgttgtcagcagcagatggcagaggacaaggcctcagtgaaagcccaggtcacgtcactcctcggcgagctacaggaatcacagagccgcctcgaggctgctactaaggaatgccaagctttggagggccgcgccagggctgcctcagagcaggcgcgccagctggagagcgagagagaggctctgcaacagcagcatagtgtgcaggttgaccagctccgcatgcagggacagagtgtcgaggcagcgctcagaatggagcgacaagccgcgtccgaagagaaaaggaagctggcgcaactgcaggtcgcatatcaccagttgtttcaagagtacgacaaccatataaagtctagcgtggtcggatcagagagaaaacgcgggatgcaactggaagacttgaaacaacaactccagcaggccgaggaagccctggtggctaaacaggaagtcatcgacaaactgaaagaggaggcagaacaacataagatcgtgatggaaaccgttcccgtactgaaggcacaagcagacatctacaaagctgactttcaggcagaacgccaggccagagaaaagttagcggaaaaaaaagagcttctgcaggagcagctggaacagttgcagagagaatactctaaactgaaagcctcttgccaggaatcagcacgcattgaggacatgcgcaagagacacgtggaggtcagtcaggcacctctgccacctgctccagcctatctgtcgtcccctctggccttgccaagccaacgaaggtcaccacccgaggagcctcccgacttctgctgccctaagtgtcaatatcaggcccccgacatggacactcttcagatccatgtcatggaatgcatagaatag

SEQ ID NO: 120570 - DNA, 1260 bp, synthetic construct
  misc_feature 1..1260: note = Description of Artificial Sequence: Synthetic coding sequence
  source 1..1260: mol_type = other DNA
atgaatagacatctgtggaagagccaattgtgcgagatggtgcaacctagtggcggtccggccgccgatcaggatgtgctcggggaggaatcccctcttgggaagccagctatgctgcatctgcccagtgagcaaggcgctccagagacactacagagatgcttggaggagaaccaagaattaagagatgcaataaggcagtcgaaccagatattgcgggaacggtgcgaggagttgctgcactttcaagcgagtcaaagagaggagaaggagttccttatgtgcaagttccaggaagccagaaagttagtcgagcggctcggtcttgagaagctggacctgaagcgtcagaaggagcaggctcttagggaggtggagcacctgaaacgttgtcagcagcagatggccgaagataaagcgagcgtgaaggctcaagtgacaagtctcctaggcgaactgcaggaatcacagagccgacttgaggccgcaaccaaagaatgccaagccctggagggccgagccagagcggctagcgagcaagcgcgccagcttgagagcgagagggaggccctccagcagcagcactccgtccaagttgatcagctgcgaatgcagggccagtcagtcgaagccgctctgcggatggaacggcaagccgcttctgaggaaaaacggaaacttgcgcagctgcaagtggcttaccaccagttgttccaagagtacgacaaccatataaaaagttcggtcgtgggttccgaaagaaagcgcggtatgcagctcgaagatctcaagcagcagctccagcaggctgaggaggcccttgttgccaaacaggaggtcattgacaaactgaaagaagaagccgaacagcacaagatagtgatggagacagttcctgttctcaaagctcaagccgacatctataaggccgattttcaggctgaaagacaggcccgtgaaaaacttgcagaaaaaaaggaactgctacaggaacagttggagcaactacagcgggaatattccaagctcaaggcgagttgccaggagagtgcaagaatagaggacatgcgtaagagacacgtagaagtgagccaggcacctctgccccccgctcccgcctacctgtcaagtcccttagccctgccatcccaacgcaggagccctcctgaagagcctcccgacttctgttgccccaaatgccagtaccaggcccctgatatggatacactccagattcatgtgatggaatgtattgaatag

SEQ ID NO: 120571 - DNA, 1260 bp, synthetic construct
  misc_feature 1..1260: note = Description of Artificial Sequence: Synthetic coding sequence
  source 1..1260: mol_type = other DNA
atgaacagacatctgtggaagtctcagctctgtgagatggtccagcctagtggcggaccagctgccgatcaggacgtgcttggagaagaaagtcctttagggaagcctgccatgctgcatttgccatccgagcaaggtgcaccggagaccctccagaggtgccttgaagagaaccaggagctgcgcgacgccatccgtcagtcaaatcagatactcagggagaggtgcgaggaactcctgcacttccaggcatctcagagagaggaaaaggagttcctgatgtgtaagttccaggaggcacggaaactggtcgagcgattggggctagagaagctggacctaaaaagacagaaagaacaggcccttagagaggtcgagcacttgaagcggtgccagcagcagatggccgaagataaagcaagtgtgaaagcacaggtgacatcgctccttggtgagctgcaggaaagccagtcacgtcttgaggccgccacgaaggagtgccaagctctcgagggacgcgcacgtgcggcttctgagcaggcacgccagctggagtctgaaagggaagccctgcagcagcagcacagtgttcaggttgatcagttgcggatgcagggccagtcagtagaggcagccctgcgtatggagcggcaggctgcttcggaagagaaaagaaagttggcacaacttcaagtggcataccaccagctcttccaggaatatgataatcatataaaaagtagtgtggtgggatctgaaaggaaacggggaatgcagctggaagatttgaagcagcagttacaacaggccgaggaggcgctggttgcaaagcaggaagtgatcgataaactgaaggaggaggccgagcagcataagatagtgatggaaacagtgcctgtactgaaggcccaggcggacatctataaagctgactttcaggcggaaagacaggcgcgcgagaaattggccgagaagaaagagttgctgcaggaacaattggaacagctgcagcgtgagtacagcaagcttaaggcgtcttgtcaagagtctgccagaattgaggacatgcgaaagcggcacgttgaagtgagccaggccccacttccccctgctcccgcttacctgtcaagtccactggcccttcctagtcagcgccgaagccccccggaggagcctcctgatttctgctgtccaaagtgtcagtaccaggcccctgacatggacacactgcagatccacgtgatggaatgcattgagtag

SEQ ID NO: 120572 - DNA, 1464 bp, synthetic construct
  misc_feature 1..1464: note = Description of Artificial Sequence: Synthetic coding sequence
  source 1..1464: mol_type = other DNA
atggccttggtcatacaggttgggaagctgagacctcgagaagtccggacacctcaaacaattaacccctccctgttcccttctctccccgttaagctgtcgagcatcatcgaggtgccgagtgggggagagcggtgttgctctcgccggacattggtttacaaagcgagagcattctggaaaggcgccccgctcccttgttggatgaaccgccatctgtggaagagccagctgtgcgagatggtgcagccgagcggaggccccgccgccgatcaggatgtgttgggcgaggaatcacccctcgggaagccagcgatgttacaccttccatcagagcaaggagcccccgagacgctgcagagatgtttggaggagaatcaggagctgagggacgccatccgtcaaagtaatcagattctgagagagaggtgtgaggagttgttgcattttcaagcctcccagcgagaggagaaggagttcctcatgtgcaagttccaggaggcccgcaaactggttgagaggcttggcctcgaaaagctggatctcaaaagacagaaggagcaggccctccgcgaggttgaacacttgaagcgctgccagcaacagatggctgaagataaggccagtgtaaaagctcaggtcaccagcctattgggtgaactgcaagaatcacaatcccgactcgaagctgccacaaaagagtgtcaagccctggaaggcagagcaagagccgccagtgaacaagctagacagctcgaaagcgagagggaggcactgcagcagcagcattcagtccaggtggatcagttgcgcatgcagggtcaatctgtggaagctgctctgcggatggagaggcaggctgctagtgaagaaaagaggaagttggcccagctgcaggtcgcgtaccaccagctgtttcaggagtatgacaatcacataaagtcgagtgtggttggctctgaacggaaaagaggtatgcagttagaagacctcaagcaacagctacagcaggccgaagaggcccttgtggccaagcaggaagtgatagataagctgaaggaagaggcggagcaacacaaaatcgtcatggagactgtgcctgtgttgaaggcccaggccgacatctataaagctgatttccaggccgaacggcaagctcgcgagaaactggccgagaagaaggaattattacaggagcaacttgagcagctgcagagagaatattcaaaattaaaggctagctgccaggagagcgctcgcatcgaggacatgaggaaacggcatgtggaggtatctcaagccccccttccaccagcccccgcttatctgagtagccctctcgctcttcctagccagcggcgctcaccgcccgaggagcccccagatttctgttgtcctaagtgccagtaccaggctcctgatatggacacgttacaaattcacgttatggagtgcattgaatag

SEQ ID NO: 120573 - DNA, 621 bp, synthetic construct
  misc_feature 1..621: note = Description of Artificial Sequence: Synthetic coding sequence
  source 1..621: mol_type = other DNA
atgaacaggcacctttggaaaagccagttgtgcgagatggtccagccttcaggtggtcctgctgccgaccaggacgttctaggggaggagagtccactcggtaagccagcaatgctgcatctgccgagcgagcaaggggcccctgagaccctgcagcgttgcctcgaagaaaatcaagagctgcgtgatgcgatccggcagagcaaccagattcttagagaaaggtgtgaggagcttctacattttcaagcctcacagcgagaagagaaagagtttctcatgtgtaaatttcaagaggcgcgcaaactggttgaacgcctcggactggagaagcttgatcttaagcggcaaaaggagcaagctctccgagaagtggagcacctgaaaagatgtcaacagcagatggctgaggacaaggcttccgttaaggctcaggtgacaagtctgcttggcgaattacaagagtcccagtctcgcctggaagcagccacaaaagaatgccaagccctggagggcagagcgcgagccgcatccgaacaggccaggcagctggaaagtgagcgcgaggccttgcagcagcagcattccgtgcaagtggaccagctcagaatgcaaggctag

SEQ ID NO: 120574 - DNA, 756 bp, synthetic construct
  misc_feature 1..756: note = Description of Artificial Sequence: Synthetic coding sequence
  source 1..756: mol_type = other DNA
atgaatcggcacctctggaagtcccagctgtgcgaaatggtacaaccgagcggcgggcctgcggccgaccaggacgtcctcggtgaggagtcccctttggggaagcctgcaatgctgcacctgccctctgaacagggagccccagaaactcttcagcgatgtctcgaggagaatcaggaacttcgagacgcaattcgccagagtaaccaaattctgcgagagagatgcgaggagctgctccacttccaggctagccagcgtgaagaaaaagagttcctgatgtgcaaatttcaggaggcccgaaaacttgtagaacgattaggccttgagaagctggatctgaagcggcaaaaggagcaggctttacgcgaggtcgaacacctcaagagatgtcagcaacagatggccgaagataaggcttcagtcaaggcacaggtcacttcactgctcggggagctccaggagtcgcagagtcgcctggaagctgcgaccaaagaatgtcaagccctggagggcagggcccgggccgcgtctgagcaagcaaggcagctagaatctgagagggaggcgcttcagcagcagcacagtgtccaagtggaccaactccgcatgcagggccagagcgtggaggcagccctgcgcatggagcgccaggccgcatctgaggaaaaaaggaagctcgcgcaacttcaagtcgcttaccatcaactgttccaggaatacgataaccacatcaagagctcggtcgtgggctag

SEQ ID NO: 120575 - DNA, 417 bp, synthetic construct
  misc_feature 1..417: note = Description of Artificial Sequence: Synthetic coding sequence
  source 1..417: mol_type = other DNA
atgaacagacacctatggaaatcacagctctgtgagatggtccaaccatctggcggccccgcagctgatcaggatgtactgggtgaggagtccccactcggcaaacccgctatgcttcatttgcccagcgagcaaggagcccccgagacactgcagcgatgtctggaagaaaaccaagagctaagggatgccatccgccagtcgaatcagatcctgagggaacgctgcgaggagctcctgcattttcaggcatctcaacgcgaagagaaggagttcctcatgtgcaagttccaggaagctcgcaagctggtggaacggcttggcctcgaaaagctggatctcaaaagacagaaggaacaggctttacgcgaagtagaacacctcaagaggtgccaacagcagatggccgaagactag

SEQ ID NO: 120576 - DNA, 1257 bp, synthetic construct
  misc_feature 1..1257: note = Description of Artificial Sequence: Synthetic coding sequence
  source 1..1257: mol_type = other DNA
atgaatcgtcacctgtggaagtcacagctctgtgagatggttcagccctctggcggacctgccgcggaccaggacgtactgggcgaggaaagtccgttagggaagccggccatgctacatctacccagcgagcagggtgcgccagaaactcttcagaggtgcctggaagaaaaccaggaactgcgcgatgcaataagacagagtaaccaaatcctccgcgaacggtgtgaagagcttcttcactttcaggcttcccagcgggaggagaaggaattccttatgtgtaagttccaagaagctagaaaactcgtcgagcgcttgggactggaaaaactggacctcaaacggcagaaggagcaggccctacgcgaagtggaacacctcaagagatgccagcaaatggccgaggacaaggcatccgtgaaggcccaggtaacaagtctgttgggcgaactgcaggagagtcagagccggcttgaggccgctacaaaagaatgccaggccctcgaggggagggccagggctgcctccgaacaagcacgccagctggaatccgagcgtgaagctcttcaacaacagcactcagtccaagtcgaccagctgcggatgcagggtcaatctgtagaagccgcccttaggatggaacgtcaagcagcatcggaggaaaagcggaagctggctcaactccaagtggcgtaccaccagctgttccaggagtatgacaatcacatcaagtcatccgtggtgggctctgaacggaagcgaggcatgcagctggaggatctgaaacaacagctgcaacaggccgaggaagccctggtggctaagcaggaagttatagataaactaaaagaggaggctgagcagcacaagattgtgatggagacagttcctgtcctaaaagcccaagctgacatttacaaggccgactttcaggccgagagacaggcacgagaaaagttagcggagaagaaggaactgctgcaagaacaactggaacagctgcagagagagtactctaagctgaaggcttcttgtcaggagtccgccagaatagaagatatgcgaaaacgccacgtggaggtgtcacaggcccctctaccccccgcgcccgcctatctgagctctcctttggccctgccaagccaacgtagaagccctccagaagagcccccagatttttgctgtcccaagtgccagtaccaggcccccgacatggacaccctgcagattcatgtaatggagtgcatagagtag

SEQ ID NO: 120577 - DNA, 2181 bp, synthetic construct
  misc_feature 1..2181: note = Description of Artificial Sequence: Synthetic coding sequence
  source 1..2181: mol_type = other DNA
atgctcagagcctgccagcttagcggggtgaccgctgctgcacagtcctgcttgtgtggtaagttcgttctccgtcccctgcgcccctgtagacgttacagcacctctgggtcttccggattgacaacagggaagattgccggggccggtctgctattcgttggcggcgggatcggcggcaccatactttacgccaagtgggattcacatttccgggaatccgttgagaaaaccatcccttacagtgacaagttgttcgaaatggtgctcggccccgctgcgtataatgtccccctcccgaagaagtctatacagagtggacctctgaagatttcatccgtatctgaagtgatgaaagaaagcaagcaaccagcctcccagctgcagaaacagaagggggacaccccagcttccgctactgcgcccacggaagccgcacaaatcatctcagcggccggcgataccctttcagttcctgctccggctgttcagcctgaagagtcattgaagaccgaccatccagagatcggcgagggcaaacctacgcctgccctgtccgctctggcgaagagcctcgaagacgcactgagacagaccgccagtgtcactctgcaggccattgcagcccagaatgcagctgtgcaggccgtcaatgctcactcgaacattctgaaggctgctatggataactccgagatagcaggagagaaaaagagcgcccagtggcggaccgttgaaggcgcccttaaggaaagacgcaaggctgtcgatgaggccgccgacgcgctccttaaagcaaaagaggagctcgaaaagatgaaatccgtcattgaaaacgcgaagaaaaaagaggttgctggagccaagccccatatcaccgctgccgagggcaaactccacaacatgatcgttgatctggacaacgtcgtcaaaaaagttcaagctgcacaaagtgaagcaaaggtcgtttcacagtaccacgaattggtggtccaggctcgagatgatttcaaacgagagttagacagtattacgcctgaagtgttgccggggtggaaggggatgagcgagtacaatttagcagataaactaagcacggacgatctgaactccttgatcgctcacgctcataggcgtatcgaccagctcaatcgggaactcgcagagcagaaggcgacagagaagcaacatattaccctggccctcgagaaacaaaaactggaggagaagagagcctttgactccgctgtggcaaaggccctcgagcaccatcgatccgagatccaggccgagcaggaccggaagatagaagaggttcgtgacgcaatggagaacgagatgagaacacagctaaggagacaggcggctgcccacaccgaccacctcagggacgtcttgagagtgcaggagcaggagctcaagagcgaatttgaacagaacttgtctgagaagctgtctgaacaggagctccagttcagacggctatcccaagagcaagtcgataattttaccctggatatcaatacagcatatgctcggcttcggggcattgagcaagcagttcagagccatgcagttgcggaggaggaggccaggaaggcccatcagctgtggctgtccgtcgaggctctcaaatatagtatgaagacgtcctcagctgagacgcccacaatccctctgggctcagccgtggaggctatcaaagctaactgttccgacaatgagttcactcaggccttaaccgctgccattccccctgaaagtcttacacggggggtgtactcagaagagaccctgcgcgcacgcttttatgccgttcaaaaactcgctaggagagtggctatgattgatgagacaagaaacagtctttaccagtactttctaagctatctccagtccctgctgctttttccaccgcaacagctcaagccacccccagagctgtgcccggaggatatcaatacatttaaattgcttagctatgcatcttattgtatcgagcatggcgatcttgaactggcggctaagtttgtgaaccagctgaagggagagagccgaagagtggcacaggactggcttaaagaagctaggatgacattggagacaaagcagattgtggaaatattgactgcatacgcttcagctgtcggcatcggcactacccaagtgcagccagagtag

SEQ ID NO: 120578 - DNA, 1119 bp, synthetic construct
  misc_feature 1..1119: note = Description of Artificial Sequence: Synthetic coding sequence
  source 1..1119: mol_type = other DNA
atgttgcgagcctgccagctgagcggcgtcaccgccgctgcccaatcctgtctctgcggaaaattcgtgctacgaccgctgcgcccttgtaggcgatattcgacctctgggtctagcggccttacaacaggcaaaattgcaggcgcaggactgctgttcgttggaggcgggattggcggtactatcctgtacgccaagtgggattcccactttcgggaaagcgtggagaaaacgattccatacagcgacaaattgtttgaaatggtgcttggtcctgctgcctataacgttccactgcccaaaaaatctatccagtctggcccgttgaagatttcatctgtgtcagaagtgatgaaggagagcaaacaacccgcctcccagctgcaaaaacagaaaggggatacaccagcgagtgcaacagccggcgatacattgagtgttcccgctcccgccgtgcagcccgaggaatccctgaagacggaccacccggagattggagaaggcaagccaacccccgccctgtccgaggcaagctcctcttcgatccgagagcgacccccagaagaagtggctgcaagactggcgcagcaggaaaaacaagaacaggtgaaaattgagtccctggctaaaagcctggaggatgctctcagacagacggcttcagtcactctgcaggccattgccgcaataccacctgaatcactgaccaggggggtgtatagcgaggaaacactgcgcgcccgcttctacgcagttcagaagctcgccaggcgcgtggccatgattgatgagactcgcaatagcctctatcagtactttttgagctatcttcaatctcttctcttgttccccccacagcaactgaaaccacccccagaactctgccccgaagacatcaatactttcaagttactgagttatgcttcttactgtatcgagcacggggatctggagctcgctgccaaatttgtcaatcagcttaagggtgaaagtagacgagtggcgcaggactggttaaaggaggcacgtatgactttagagacaaagcagattgttgagattctcacagcctatgcttcagcagtcggcatcggcacgacgcaagtgcagcccgagtag

SEQ ID NO: 120579 - DNA, 1980 bp, synthetic construct
  misc_feature 1..1980: note = Description of Artificial Sequence: Synthetic coding sequence
  source 1..1980: mol_type = other DNA
atgctgagggcatgccagctgtccggcgttacagcagccgcgcaaagctgtctttgtgggaagttcgtactgcgccccctgcgtccctgtaggaggtactctacctcagggagtagcgggttgacaaccgggaagatcgctggcgcaggtctgctcttcgtcggaggtggaatcggtggaacaatcctgtatgcaaagtgggatagtcatttcagagaaagtgttgagaaaaccattccctacagtgacaaactgtttgagatggtgttaggacccgctgcatataatgttcccctgccgaaaaagtctatccagtccggcccattaaaaatctcttctgtgagcgaagtgatgaaggagagcaagcagcctgcaagccagctgcaaaagcagaagggcgatacacctgcttccgcaacagcgctggctaagagtctcgaggatgccctgaggcagaccgcttcagtgacactgcaggccatcgcagcacagaacgctgcagtccaggccgtcaatgcccatagcaatattcttaaggctgctatggacaattccgaaatagccggcgaaaagaaaagtgcccaatggcggaccgtggagggagccctaaaggagagacggaaggctgtcgacgaagcagccgacgctttactgaaggctaaggaagagctggagaagatgaagtctgtgattgaaaacgcaaaaaaaaaggaagtggccggagccaagccacacatcactgcagccgaagggaagttgcataatatgattgtggatctggataacgtcgtgcaggctagggacgactttaagcgggaactcgattcaatcacccctgaggtgctacccgggtggaagggcatgtccgtaagcgatctggcagacaaactaagcaccgatgatttgaacagcctgatagcccacgcccacagacggatcgaccaactgaatagagaactggcagagcaaaaagccaccgagaaacagcatattacactcgctttggaaaagcaaaagctggaggagaagcgggctttcgatagcgctgtggctaaagctctcgagcatcatcgcagtgagatccaagcagagcaagatcgaaaaattgaagaggttcgggatgcaatggaaaatgaaatgcgtacacagttgcggaggcaggcagccgcccacacagaccacctgcgcgacgtcctgcgagtccaggagcaggaactgaagtctgaattcgagcagaacttaagtgaaaagcttagcgaacaggaactgcagttccggaggttgtcgcaagaacaggtcgacaacttcactctggatatcaacactgcctatgcccggttgcgaggcattgagcaggctgtgcagagccatgccgtggccgaagaggaagcccgtaaggcgcaccagttatggctctctgttgaggccctgaaatacagtatgaaaacctcgtctgcagagactccaaccatccccttaggatctgctgtggaagctatcaaggcaaactgttccgataatgagtttacacaggccctgacagctgccatccctcctgagagcttgacccggggggtttatagtgaagagacgctgcgcgcacgcttttatgccgtgcagaaactggcaagacgcgtggctatgattgacgagacccgcaattcgttgtatcaatacttcttgtcgtacctccaatctctgctcctgtttccacctcagcagttgaagcccccccctgaattgtgccctgaggacatcaataccttcaaactgctgtcctacgcctcctactgcattgagcacggggacctagaactggccgcaaaatttgtgaatcagctgaaaggagaatctagaagggtggcacaggattggctgaaggaggctaggatgaccctggagactaaacagatcgtggagattctgaccgcatatgctagcgccgtaggtattgggaccacgcaggtacagcctgagtag

SEQ ID NO: 120580 - DNA, 2277 bp, synthetic construct
  misc_feature 1..2277: note = Description of Artificial Sequence: Synthetic coding sequence
  source 1..2277: mol_type = other DNA
atgctccgggcttgtcaactgtctggcgtgacggccgcggctcaaagctgtctctgtggcaagttcgtacttcgcccccttcggccttgccggcggtactccactagcgggagctccggactgacgacggggaaaatcgctggagcagggctcctgtttgtaggcgggggcatcggaggaactatactgtatgccaagtgggactcccacttccgagagtcagtagagaaaaccattccctacagcgataaactgttcgagatggtgcttggacctgctgcttacaacgtgcccctgcctaagaagagtatccagtccggccccttaaagatctcctctgtgagtgaggtcatgaaggaaagcaagcagcccgccagccagctccagaaacagaagggggatactccggcctctgctaccgctcccactgaggcagcccaaattatcagcgctgccggggacacactcagtgtccccgccccagccgttcagccagaagagtcactaaagactgaccatcctgaaattggggaggggaagcccacgcctgccctctccgaggaggcatcttccagcagcattagggagcgacctcctgaggaggtggctgcacggttggcacagcaagaaaaacaagagcaggtgaaaatcgaatctctagcaaaatctcttgaggacgcacttaggcagaccgcttccgtgaccctgcaggctatcgcagctcaaaacgctgccgtgcaggcggtgaacgcccatagcaatatcctgaaggcagcgatggacaattccgagattgccggcgagaagaaatccgcgcagtggcggacagtcgaaggcgcgctcaaggaacgtcgaaaggctgtggacgaggccgccgacgccctgttaaaagccaaggaagaattggaaaaaatgaagtccgtgatcgagaacgccaaaaaaaaggaagtcgcgggcgccaaacctcacataactgccgcggaaggcaaactccacaatatgatcgtggacttggacaacgtcgtgaaaaaagtgcaagcggcccaaagcgaagccaaagtggtgtcccaataccacgagctggtagtgcaggcgagagacgacttcaagcgagagcttgactcaataactcccgaggttctgccaggttggaaaggtatgagcgtctccgaccttgccgataagctctcaacagatgacctgaactcattgattgctcatgcccataggcgtattgaccagcttaacagagagttggccgagcagaaagcaacagaaaagcaacacataactttggccctggagaagcagaagctggaggagaagagagccttcgattctgccgtcgctaaagccttggagcaccacaggtcagagatccaagccgaacaggatcggaaaatcgaagaagtgagagatgccatggaaaacgaaatgaggacgcagctgcgacggcaagccgccgcacatactgatcatctacgggacgtattgcgggttcaagagcaagagttaaaaagcgagttcgagcagaatttaagcgagaaactgtcagagcaagagctgcagtttagacgacttagccaggaacaggtggacaactttacactcgacatcaacacggcatatgcccgactgagaggcatagaacaggcggttcagtctcatgcagtcgcagaggaggaggccaggaaggcccatcagttgtggctgtctgtggaggcgctaaaatacagtatgaagacctcctctgccgagaccccaacgatccccctgggttctgccgtagaggcaatcaaggccaattgctcggataatgagtttactcaggccctcactgccgccatccctccagagtcgttgacccggggagtctactcagaggaaacattgcgcgcacgcttttacgctgttcaaaagttggcaaggagagtagccatgattgatgaaactagaaactccctctatcagtacttcctgtcgtacttacagtctctattgttattcccgcctcaacagctgaaaccacccccagaattgtgccccgaggatatcaatactttcaaactgctgtcttacgcctcatattgtatagagcatggggatctagagttggcagccaaatttgtcaaccagctgaagggagaaagccggcgtgtggctcaagattggcttaaagaagctcgaatgacgctcgagaccaagcagatcgtggaaattctgaccgcttatgcaagtgccgttggcatcgggaccacacaggtgcagcccgaatag

SEQ ID NO: 120581 - DNA, 2274 bp, synthetic construct
  misc_feature 1..2274: note = Description of Artificial Sequence: Synthetic coding sequence
  source 1..2274: mol_type = other DNA
atgttgcgcgcctgtcagttgtcaggggtgaccgcagcggcccagtcctgcctgtgcggtaaatttgtcttaaggccactgcgaccgtgtcggcggtattctacttccggctcctctggcctgaccacaggcaagattgcaggagccgggctcctctttgttggcggggggataggcgggaccattttatatgccaagtgggactcacacttccgggaatctgttgaaaaaacaatcccgtactctgataaactcttcgaaatggtattaggacctgccgcatataacgttcctctcccaaaaaaatccatccaaagtgggccgctaaaaattagttcagtgtccgaagtgatgaaagagagcaaacagcctgcatcacaattgcaaaagcaaaagggggacactccagccagcgccaccgcacccacggaggcagcccagatcatatccgcggccggcgatacgttatccgtccccgcccctgccgttcagccagaggagtcgcttaaaacggaccacccggagattggcgaggggaagcctacaccagctctcagcgaggccagtagttcctccatcagagagcggccacccgaagaggtggcagcccggctggcacagcaagaaaagcaagagcaagtgaaaatcgagtccctggcgaagagtctggaagacgcactcagacaaactgcttccgtgacactgcaggcgatcgctgcccagaatgctgctgttcaggccgttaacgcccactccaatatcctcaaggcagccatggacaatagcgagatcgccggcgagaagaaaagtgctcaatggcgcacagtcgagggggcactgaaagaacgtcggaaagccgttgacgaggctgccgacgcccttttgaaagctaaggaagaattagaaaaaatgaaatcagtcatcgagaatgccaagaagaaggaggtggctggagccaagcctcacatcaccgcagcagagggcaagttacacaacatgatcgtggatctggataacgttgtgaagaaggtgcaggccgcccaatctgaggcaaaggtcgtctcccagtatcacgagctggtggtgcaggccagagacgatttcaaacgcgaattagattccataacccctgaggttttgccaggctggaagggcatgtctgtttcagaccttgccgataagcttagtactgacgatctgaactcactcattgctcatgcccatcggaggattgaccagctgaatcgcgagctggctgagcagaaagccaccgaaaagcaacatatcactctggctctggaaaaacagaaactggaggaaaagagggcatttgactcagcagttgctaaggcactggagcatcacaggtcagagatacaagctgaacaagatagaaagatcgaggaagtccgggatgccatggagaacgaaatgaggacgcagctgaggcggcaggccgcagcccacaccgaccacctgcgggacgtgctgagagtccaggaacaggaacttaagtcagagttcgagcaaaacctaagtgaaaagctgagcgagcaagagctccaatttcgccggctctcgcaggaacaggtggacaacttcaccctggatattaacacggcctacgctaggctccgaggtatcgagcaggcagttcaaagccatgctgtcgctgaggaagaggctaggaaggcccaccagttgtggctttcggtggaagccttgaagtactccatgaaaacttcgtcagcggaaacgcctacaatcccgctaggaagcgccgtcgaggccatcaaggccaattgtagcgacaatgagttcactcaggcccttacagccgcaatcccccctgagtccctcacacgtggcgtgtattctgaagaaacgcttcgtgcaagattttatgccgttcagaaactggcacgaagagttgccatgatcgatgaaacccgtaattccctttaccagtatttcctttcttatctccaatcacttctgctgtttcccccccaacagctgaagccacctccagagctgtgtccggaggatattaacacgttcaagctgctttcctacgctagctactgcattgaacacggagatctggagttggccgccaaattcgttaaccagctcaagggagagagtagaagagttgcccaggattggctgaaggaggccaggatgacactggaaaccaagcagattgttgagatcctgacagcgtatgctagcgccgtgggtatcgggacgacacaggtgcaacctgagtag

SEQ ID NO: 120582 - DNA, 2244 bp, synthetic construct
  misc_feature 1..2244: note = Description of Artificial Sequence: Synthetic coding sequence
  source 1..2244: mol_type = other DNA
atgctgagagcctgccagctgagcggggtcacagccgctgcgcaatcatgtttgtgtgggaaatttgtgctgagacctctgagaccctgtcgccgttactcaacaagtgggagcagcggtctgactacgggcaaaatcgccggcgctggcctcctttttgtgggtggaggcatcggaggcaccattttatacgcgaaatgggacagtcactttcgcgaatcagtggagaagacaattccatacagcgataaactgtttgagatggttctggggccggcggcttataatgtcccccttcctaagaagtcaatccagtcaggcccgctcaaaatttctagtgtctccgaggttatgaaagaatccaaacagccagcttcccagctgcagaagcagaaaggtgacactcctgctagtgcaactgctggcgatacacttagcgtgccagcgcccgccgtgcagcccgaggaatcattaaaaaccgatcatccagaaatcggagaagggaaacctacacctgccttatcagaggaggcttctagctcatctatcagggaacgccccccagaagaagtggctgctaggctggcacagcaagagaaacaggagcaggtcaaaattgaatccctggcaaagagtctggaagacgccctgaggcagacggcctcagtgaccctccaagccattgcagcccaaaacgccgccgttcaggctgtgaacgcacattctaacatcctgaaagcagcaatggataactcggaaatagcaggggaaaagaaaagcgcccagtggagaactgttgaaggcgcactcaaggagcggcggaaagcagtagacgaagcagccgacgctttgctcaaggctaaagaagaactggagaaaatgaagtctgtcattgagaacgcaaaaaaaaaagaagttgcaggcgccaagccccacataactgccgccgaggggaaactccacaacatgattgtcgacttggacaacgtggtgaagaaggtgcaggctgcacagtccgaagccaaagtagtgagtcagtaccacgaactggtagtgcaggcgcgcgatgactttaaacgagagcttgacagtattacacctgaagtgctccccggttggaagggtatgagtgtgtctgacttggcagataaactttccacagacgatcttaatagcctgattgctcacgcccataggagaatcgaccaactcaaccgggaactggccgagcaaaaggccacggagaaacagcatataaccttggcgctggaaaagcagaaactcgaggagaaaagagcatttgacagcgccgtggccaaagccttagagcatcaccgcagtgagatccaggccgagcaggaccgtaaaatagaggaggttcgagatgccatggagaacgagatgaggacacagctccgccggcaagctgccgcgcacactgatcacctgcgagacgtgttacgggttcaggaacaggagctgaagtcagaattcgagcaaaatctgagtgagaagctaagcgaacaggagctacagtttagaaggctgtctcaggaacaggtggataatttcactttagatataaacaccgcgtatgctcggctgcgaggcatcgagcaggccgtccagagtcacgcagttgcagaagaggaagcacgaaaggctcatcagttgtggctttctgtggaggccctaaagtattctatgaagacgagttcagccgagacgcccaccataccactgggcagcgccgttgaagccattaaggctaactgtagtgacaacgaattcacacaagccctcaccgcagcaatccccccagagtccttaacaaggggagtgtactccgaagagactcttcgcgcgaggttttatgccgtccagaaattagcaagacgcgtggcaatgatcgacgagacacggaattcgctgtatcaatactttcttagttaccttcaatctctgttactcttccccccccagcaactgaagccccctccggaactctgcccggaggacattaatacattcaagttgctttcgtatgcgtcctattgcatcgaacacggtgacctggagcttgccgccaagttcgtgaatcaattgaagggtgagtctcggcgggtggcccaggactggctgaaagaagctcgcatgacgcttgaaactaagcagattgtggaaatcttgaccgcttacgcctctgctgtgggcattggcacaacccaggtgcagccggagtag

SEQ ID NO: 120583 - DNA, 2244 bp, synthetic construct
  misc_feature 1..2244: note = Description of Artificial Sequence: Synthetic coding sequence
  source 1..2244: mol_type = other DNA
atgctgagagcatgtcagttgtccggggtgacagcagccgctcagtcttgcctatgtggtaaattcgtacttcggccactgcggccttgtaggcgatattctacaagcggatctagtggactgacgaccggaaaaatagccggtgccgggctgctgtttgtcgggggaggtatcgggggaactattttgtatgcgaagtgggattcccacttcagggagtctgtggaaaaaacaatcccttattcagacaagctctttgagatggtattgggacctgccgcctacaatgtccctctcccaaagaaatcgattcagtcaggaccactgaaaatttcctctgtttcggaggtcatgaaagaatccaagcaaccggctagccagctgcaaaagcagaagggggacacaccggcgagtgccacagccggcgatacccttagcgtcccagcaccagccgtgcagcccgaggagagcctcaagaccgaccatccagaaatcggcgagggtaagcctacacctgctctgtccgaagaggcttctagcagttctattagagaacgccctcccgaggaagtcgcggctcgtctggctcagcaagagaagcaggagcaagtgaagattgagtctctcgcaaaaagtctagaggatgcactgcgccaaacagcatccgtcacactgcaagccattgcagcacagaatgccgccgtgcaggctgtaaacgcccattccaatattctcaaagctgctatggataactctgagatcgccggcgagaagaaatccgcccaatggaggactgtggagggcgccctgaaagaacgtaggaaggccgtcgacgaggctgccgacgcgctactcaaagcaaaagaagagctcgagaaaatgaagtctgtcatcgagaacgcaaagaagaaagaagtcgcgggagcaaaaccacatatcacagcagctgagggtaagcttcataacatgatagtcgatctggataatgtcgtgaagaaggtccaggccgcacaatccgaggccaaggtcgtgtcacagtatcacgagttagtggttcaagctagggatgactttaaacgcgaactggacagtataactcctgaggtgctccccggttggaagggaatgtccgaatacaatctcgccgacaagctctccactgacgacttaaactcactgatcgcgcatgcgcaccgccggattgatcagctgaatagagagctcgctgaacagaaagctaccgagaaacagcatatcaccctagctttggagaagcagaaactcgaggaaaagagagcgttcgactccgccgtggcaaaagcccttgagcaccatagaagtgagatccaagcagagcaggatcggaagatcgaagaggtgcgtgacgcaatggaaaacgagatgcgtacccaactgcgaaggcaggccgccgctcacacagaccacttacgggatgtcttgcgtgttcaggagcaagaattgaaatcagaatttgagcagaatctaagcgagaagctgtccgaacaggaattacagtttagaaggctgtcacaggaacaagtggataacttcacactcgacatcaatactgcctacgcaaggcttagaggcatcgagcaggccgtgcagtcccacgccgtagccgaagaggaagcaaggaaagcccaccaactttggcttagcgtcgaagcactgaagtacagcatgaagacctcatccgccgaaacgcccacaatacccctcggatctgcggtggaagccatcaaagccaattgctcggataatgagttcacccaggcactgaccgcagcgattccgccggagtccctgactcggggtgtgtacagcgaagagaccttacgcgcccgcttctacgccgtgcagaaactcgctcgaagagtagccatgattgatgagactcgcaattcattgtatcagtattttctgagctatttacagagcttactgctgttccctcctcagcaactcaagcctccaccggagttgtgtcccgaggatataaacacctttaagcttctgtcatacgcgtcctattgcatagagcacggcgacctggagctcgctgccaagttcgtaaaccagttgaagggagaatcaaggcgggtggcccaggactggctgaaagaggctcgcatgaccttggagacaaagcagatcgtggaaatactgactgcttatgccagtgcagtcgggatcgggaccacacaggtccagcccgaatag

SEQ ID NO: 120584 - DNA, 579 bp, synthetic construct
  misc_feature 1..579: note = Description of Artificial Sequence: Synthetic coding sequence
  source 1..579: mol_type = other DNA
atggacagggcccaccgtttgggtcaaacgaagcaggtgaccgtttataggctgatctgcaagggcaccatcgaggagaggattctgcaacgagcaaaggaaaagtcagaaattcagcgcatggtcatctccggaggcaatttcaaacccgacactctcaagcctaaggaagtggtgtcccttctcttagacgacgaggagctcgagaagaaactgcgacttcgccaggaagaaaaaaggcagcaagaggaaacaaaccgggtgaaggagcggaaacggaagagagagaaatatgcagaaaagaagaaaaaggaagacgaactagacggtaagcggcgtaaagagggagtcaacctggtaattcccttcgtcccaagcgctgacaattcaaatttaagcgcagatggcgacgatagtttcatatcagtggattccgccatgcctagccctttttctgagatttctattagtagcgaacttcataccgggagcatacccctcgatgaaagctcaagcctagctccagattcactggtgcgcaaacagggcaaaggcactaacccctctgggggccgatag

SEQ ID NO: 120585 - DNA, 4671 bp, synthetic construct
  misc_feature 1..4671: note = Description of Artificial Sequence: Synthetic coding sequence
  source 1..4671: mol_type = other DNA
atggcatccgagctcggagctagggatgatggtggttgtacagaacttgccaagcccctttacctgcagtacttggagagggccctgagactcgatcacttcctcaggcagacatctgctattttcaacaggaacatttcctctgatgacagcgaagacgggcttgacgattctaatcccctacttcctcagtctggtgaccctctaatccaggtcaaagaggaaccgccaaactccctcctgggcgagacatcaggtgccggatccagcgggatgctgaacacctattctctcaacggtgtgctgcagtctgagagcaaatgtgacaaaggtaacctttataacttctctaagttgaaaaaatcacgtaagtggctgaaatcaatcttgctgtctgacgaaagcagcgaagcggactctcagtctgaggacgacgatgaagaggaactcaacctgtctagggaagaacttcacaatatgctgcggttgcataaatacaaaaaattgcatcagaataagtacagcaaggacaaagaacttcaacagtaccagtactactccgctggactgctgtcaacctatgacccattctatgagcagcagaggcatctgttggggcccaaaaaaaagaagtttaaggaagagaagaagctgaaagcgaagctgaagaaagtgaagaagaagcgcagaagagacgaggaactgagttcggaagagagtcctcgcagacatcatcatcagactaaggtctttgcaaagttttctcacgatgccccacccccaggaactaaaaagaaacatctctctatagaacagctgaacgctcgtcgccgcaaggtctggctcagtatcgtgaaaaaagaactcccgaaagctaataagcaaaaggcctccgctcgaaatcttttcttgaccaacagtcgtaagctggctcatcagtgtatgaaagaggttagacgcgcggccttacaggcacagaagaattgtaaggaaaccctgccacgggcacgacgcctcacaaaagaaatgttgctgtactggaaaaagtacgagaaggttgagaaggaacatagaaaacgggccgaaaaggaggcactcgagcaacgaaaactcgacgaggagatgagagaggccaaaagacagcagaggaaactgaattttctgataacccagacagagctctacgcacactttatgtctcgtaagcgcgatatggggcacgacgggatccaagaagaaattctacggaaattagaggactctagcactcagcggcagattgacattggcggaggggttgttgtgaatattactcaggaggattacgactcaaatcactttaaagcacaagctctgaagaacgcagaaaatgcttaccacatccaccaggctcgtaccagatcttttgacgaagatgccaaggagtcacgggccgccgccctgagagctgccaacaaaagcggaaccggatttggggaatcatattcactagcaaaccccagcatccgcgcgggcgaggatattccccagcccactatcttcaacggcaagttaaaggggtaccaattaaaaggcatgaattggttggccaatttgtacgaacagggcattaatgggattttggcagacgagatggggcttggtaaaactgtacagtctattgctcttctggcccatttggccgaaagagagaatatctggggccccttcctgatcatatctccagcttccactcttaacaactggcaccaggaattcacaagattcgtccccaaatttaaggtgctgccctattggggaaatcctcatgatcggaaggtaattagacggttctggtcccagaagaccctatacacacaggacgctcccttccatgtggtcataacttcatatcagctcgttgtacaggatgttaagtatttccagcgggttaaatggcagtatatggtgttagatgaggctcaggctctgaagtcctcaagctccgtccggtggaaaatacttctacagttccaatgccgaaatcggctgctgcttactggtacacctatacagaatacaatggcagagctgtgggccctgcttcacttcattatgcctactttgtttgatagccacgaggagttcaacgaatggttttctaaggatatagagtcccatgcagagaataaatcagccatagacgaaaatcagctttcacgcttgcatatgatcctgaagcccttcatgctgcggaggatcaagaaagacgtcgaaaacgagctgtctgacaagattgagatcctgatgtactgccagctcacaagtcgacagaaattgctgtaccaagccctcaaaaataagatttccatcgaggacttattgcagagcagcatgggcagtactcaacaggcgcagaataccactagctccttgatgaatcttgtgatgcagtttcggaaggtgtgtaaccacccagaactctttgaacgacaggaaacttggtcccccttccatatcagcctcaagccttaccacatctcgaagtttatctataggcatggacagatcagggtttttaaccatagccgcgatagatggctccgggttttatctccttttgcccccgattatatccagcgatcacttttccatagaaaagggatcaatgaggaatcgtgtttctcattcctccgtttcatcgacataagccctgccgagatggctaacctaatgctgcagggattgctcgcaagatggttggcgctatttctctctttgaaggcatcttacagactccaccagctgcgaagctggggggcccctgaaggggaatcgcaccagagatatctgaggaataaagattttttactgggggtgaattttccgctaagctttccaaatctttgttcttgtcccctgctgaaatcgcttgtgtttagtagccactgtaaggctgtgtctggctacagcgaccaagtggtccatcagaggcggtctgcaacttcgagtttacgtcgatgtcttctgaccgaactgccctcattcctctgcgtggcatccccacgagtcacagccgtcccactcgactcttactgtaacgatcgctctgctgagtacgaacggagggtgctgaaagaggggggcagtctggccgcaaaacagtgcttgctgaatggcgctcccgagctagccgccgactggctgaatcgaagatcgcagttcttccctgagccggcaggcgggctctggtccataagaccccagaacggatggtcatttatccgaatccctgggaaggaaagtttaatcaccgactccggtaaactgtacgcattagatgtgctgctcactcgtttgaagtcacaaggccatcgggtgctgatctattctcaaatgaccaggatgattgacctgctggaggagtacatggtttaccgcaagcatacttatatgcgcttagatgggtctagcaagataagcgagaggagggacatggttgcggactttcagaatcggaacgacatctttgtgtttctactgtcgacacgtgcaggtgggctcggcatcaatctcaccgccgccgacaccgtcatcttctacgactcagactggaacccaactgttgatcaacaggcaatggaccgggctcatcggctggggcaaaccaagcaggtcacagtttatagattaatttgcaagggtacaatcgaggaaaggatcttgcagagggctaaagagaagtctgagatccagagaatggtgatctctggcggtaattttaaaccggataccttgaagccgaaagaggtggtgagcctactgctagacgacgaggaacttgaaaagaaactgcgcctgcgacaggaagagaagcgacagcaggaggagactaatagagttaaagagagaaaaaggaagagagagaagtacgcggagaaaaagaagaaggaggacgaactggatggcaagcggagaaaggaaggggtcaacctggtaatcccttttgtcccaagtgcagataacagtaatctgagtgccgacggcgatgattccttcatttccgtggacagcgccatgccatctcctttctctgaaatctccatttcatctgagctgcacaccggtagcatccccctcgatgagagttcttccgatatgctggtgatcgttgatgatccggcatcaagcgccccacagtcccgcgcgactaactccccggccagtattacgggctccgtaagcgacaccgttaatggaatctcgatacaggagatgccggctgccgggcgggggcactcagcgcgatcacgaggcaggccaaagggcagtgggtccacagctaagggcgccgggaagggaaggagtaggaagtctactgccggaagcgcagccgcaatggccggcgccaaggctggggcagcagctgcatctgccgcagcctatgccgcatatggatataacgtcagcaaagggattagcgctagtagtcctctgcagacatctctggtgcgccccgctggtttagccgacttcggacccagctccgctagctcccctctttcctcacccctctctaagggaaacaatgtgcccgggaacccaaagaacctccatatgactagcagccttgctcctgattccctggttcgtaagcagggcaaggggactaatcccagtggtgggcgctag

SEQ ID NO: 120586 - DNA, 4671 bp, synthetic construct
  misc_feature 1..4671: note = Description of Artificial Sequence: Synthetic coding sequence
  source 1..4671: mol_type = other DNA
atggcatcagagctaggggccagggacgatgggggatgtacagaactggccaagccactgtacctccagtatctggaaagggctcttaggctggaccatttcctgcgacaaaccagcgccattttcaaccgaaatatctcaagtgatgacagcgaagacggcctggatgatagcaatccactcctgccgcaaagcggtgatccattgatccaggtaaaagaggagccacctaattccctgctgggcgaaacttctggagccgggtcatccggaatgctcaacacttacagcctgaacggtgtgttgcaaagcgagtcaaaatgcgataaggggaatctgtacaacttttcaaagctgaagaaatcccgcaaatggctgaaaagcattcttctgagtgacgaatcctccgaggccgacagccagtcagaggacgatgatgaagaggagctaaatctgtcaagggaagaacttcataatatgcttcggctacataagtacaaaaaacttcaccagaacaaatattcgaaagacaaagagcttcagcagtaccaatactatagtgccgggttgctgtctacctacgatcctttctatgaacagcagagacacttgcttggtcctaagaagaagaaatttaaagaagagaaaaagctgaaagctaagcttaaaaaggtaaagaaaaagcggcggcgcgacgaagagctcagctccgaagagtcccccagacgacatcaccaccaaacgaaggtttttgcaaaattttcacatgacgcccccccaccgggcacaaaaaagaaacatttgagtatagagcaactcaacgctcggagacgaaaggtgtggctttcaatcgtgaaaaaggagctgccgaaagctaataaacagaaagcttctgcacggaacctcttcctcacaaacagtaggaaactcgcccaccagtgcatgaaagaagtgcggcgcgccgcgttgcaagctcaaaagaattgtaaggaaactctccctcgagccaggcggctgacaaaggagatgctgttgtactggaagaagtacgagaaagttgagaaagaacaccggaagagagcggagaaagaagcactagaacaacggaagctggacgaggagatgcgggaggctaaacgacagcaaagaaagttgaattttctcattacccagacagaactgtacgcccacttcatgagtcgaaaacgcgatatgggacatgatggcatccaggaggagatccttcggaagttggaagactcttccactcagaggcagatagatatcggcggcggagtcgtggttaacattacgcaggaggactacgatagtaatcattttaaggcgcaggcccttaaaaacgccgagaatgcgtaccatatccaccaggcaaggaccagaagcttcgatgaagatgcaaaggagtcccgggccgctgctttgagagccgccaacaaaagtggaactggtttcggtgaatcttacagtctagcaaatccatccatccgagctggcgaggatatccctcaacccactatatttaacggaaagttgaaaggataccagttaaaaggcatgaactggctggccaacctctatgaacaaggcatcaacgggatccttgcagacgagatgggcctggggaagactgttcagagcattgcactgctggctcacctcgctgagcgggagaacatctggggcccgttccttattatctcacctgctagtaccttgaacaattggcatcaggagttcaccagattcgttcctaaatttaaggtactaccttattggggtaatcctcacgatcgcaaggtgattcgtcgtttttggagccagaaaactttgtatacacaggatgcaccgttccacgtggtcatcaccagctaccaattggttgtgcaggatgtcaaatattttcagcgtgtcaagtggcagtatatggtcctggatgaagcccaggcgctgaaaagcagttcctcggtgcggtggaaaatcctgttgcagtttcaatgtaggaatcgccttctcctgactggaactccgatccagaacacaatggccgagttgtgggctctcctgcacttcataatgccaactctgtttgactcccacgaagagttcaacgagtggttttccaaagatattgagtcccatgccgagaataaatctgctatagatgagaaccaactcagccgccttcacatgatcctgaagcctttcatgctgcgaaggattaagaaggacgtcgaaaatgagctgtcggacaaaattgagatcctgatgtactgccagttgacctcacggcagaagctgctgtatcaggccctcaagaataagattagtatcgaggatctcctacaaagcagcatgggatccacacagcaagctcagaacaccacctccagcctaatgaatttggtcatgcaatttcggaaggtttgtaaccacccagagttattcgaacgccaggagacctggtctccttttcatatatccttgaaaccctatcacattagcaagtttatttatcgccacgggcagatacgagtgttcaatcactcacgcgacagatggctccgggtcctatccccctttgctccagactatattcagcgttccctgttccatcgcaagggcattaacgaggaaagttgtttctcatttctgcgattcatcgacatttctcccgccgaaatggcgaacctgatgctgcaagggttactggcccgctggctggccctgttcctgagcctgaaggctagttatcggctgcatcagttaagatcttggggggctcctgagggcgaatcccaccagaggtacttacgcaacaaagactttctattaggagttaatttcccactgagcttccccaacctgtgctcttgtcccctgttgaaatcactagtgttttcttcccattgtaaggctgtcagcggttactctgatcaagttgtgcaccaaaggcgcagtgccacttcctccttgagaaggtgcctgctaactgagctgccctcgttcttatgcgttgccagccccagagtcacggcagtgcctctcgactcctactgtaacgaccgttctgcagagtatgagcggcgcgtgcttaaagagggagggagtctcgccgccaagcagtgcctgcttaatggcgcaccagagcttgctgcagactggctgaaccgccgtagtcagttttttcctgaacccgccggaggcttatggtccattaggccccagaatggatggtcgttcatccgtatccccggcaaagagagtcttattacggattcgggcaaactgtacgctctggacgtactgttgaccagacttaagagtcagggtcatagagtgctcatttactcccagatgacaagaatgattgacttacttgaagaatacatggtgtaccggaaacacacgtacatgcggcttgacggtagcagcaagatcagcgagagacgagacatggtggcggattttcaaaatcgcaatgacatttttgtcttcttgctgagtacccgggccggcggacttgggataaatctaacggcagccgacaccgttatattctacgattcggattggaaccccaccgtggaccagcaagccatggatcgagcgcaccgacttggacagactaaacaggtcaccgtctaccggctgatctgtaagggcacaatagaggagcgcatactccagagggctaaagaaaaaagcgaaattcagcggatggttatctcaggggggaactttaagccagatacgctcaagcccaaggaagtggtcagtctgcttctggatgatgaagaactggaaaagaaactcagactgcggcaggaggagaaacgccaacaggaagagaccaaccgcgtgaaggaacgtaaacgaaagagggaaaagtatgcggaaaagaagaagaaggaggatgagctcgacgggaagcgtcggaaggagggcgtcaacctggtgatcccattcgtgcctagtgctgataattccaacctcagtgcagatggagatgacagctttatatctgtggacagtgcgatgccaagtccgttcagcgagattagcatctctagcgagcttcacacaggttcgatccccctggacgaatccagctcggacatgttggtcattgtggacgatccagccagttctgcccctcagtcacgagcaacaaacagccctgcgtccatcaccggcagcgtgtccgacacagtgaatggtataagtattcaggagatgcccgctgctgggagaggccattctgcacggagtagaggcagacctaaaggctcgggatccacagcgaaaggagccgggaagggacgttctagaaaatccaccgctggcagcgcagctgcaatggccggcgctaaagccggggccgctgccgcttctgcagctgcatacgcagcctatggatataatgtgagcaaggggatcagcgcttcatcaccgctgcagacatcacttgtgcgccccgccggactggccgatttcggccccagctcagcgtcatctccgctgtcctccccgctcagtaagggcaacaatgtccccggaaaccctaagaacctgcatatgactagttcattggcccccgactccctagtgcggaagcagggtaaaggaaccaatcctagcggaggaaggtag

SEQ ID NO: 120587 - DNA, 585 bp, synthetic construct
  misc_feature 1..585: note = Description of Artificial Sequence: Synthetic coding sequence
  source 1..585: mol_type = other DNA
atggccgcgtccctggtgggaaagaagatagtgttcgtgacgggaaatgctaaaaaattggaagaagttgtgcagattctgggcgacaagtttccttgcaccctcgtcgcacagaagatcgatctgccagagtaccagggggaaccagatgagatttcgattcagaaatgccaggaagccgtcaggcaagtgcagggaccagtgctggttgaagatacttgcctatgtttcaatgctttgggaggcctccctggaccttatattaagtggtttctcgaaaaactcaaacccgaaggcttgcaccagttgctagctgggtttgaggacaaaagtgcctacgcattatgcacctttgcgctgagtacaggggatcccagccagcctgtgcggcttttcagaggtaggaccagcgggaggattgtcgcaccgagagggtgccaggattttggctgggacccatgtttccagcccgacggctacgaacagacatacgctgagatgcctaaggccgaaaagaatgccgtgtcacatagattcagggccctgcttgagctccaggagtatttcgggtcactggctgcctag

SEQ ID NO: 120588 - DNA, 462 bp, synthetic construct
  misc_feature 1..462: note = Description of Artificial Sequence: Synthetic coding sequence
  source 1..462: mol_type = other DNA
atggcggcttcactcgtgggaaagaagatagttttcgtgaccggtaacgccaagaagctggaggaagtgcaggggccagtcttggtcgaagacacgtgtctgtgcttcaatgcccttgggggcctccctgggccttatattaagtggttcctggaaaaactcaagccagaggggctccatcagctgctggccgggtttgaagacaaaagcgcctatgctttatgtacttttgctctcagcaccggagatccgtctcaaccagtaagactgtttagaggtcggacctcaggccggatagtggctccacgcggttgtcaggacttcgggtgggacccttgcttccagccggatgggtatgagcagacctatgcagaaatgcctaaagcagagaagaacgccgtgagtcaccggtttagagcactgctcgaattacaggagtatttcggctctctcgcggcatag

SEQ ID NO: 120589 - DNA, 534 bp, synthetic construct
  misc_feature 1..534: note = Description of Artificial Sequence: Synthetic coding sequence
  source 1..534: mol_type = other DNA
atggctgcttccctggttgtgcagatactgggagataagttcccctgtaccctggtggcccagaagatcgacctacccgaataccagggtgagcctgacgaaattagcatccagaagtgtcaagaagctgtcagacaggttcaagggccggtgctagttgaggacacctgcctgtgctttaatgctcttggagggctacccgggccatatatcaagtggttcctggagaagcttaaacccgagggtttgcaccagcttctggcgggattcgaagataagagcgcatatgctctttgcactttcgccctatccactggcgacccctcgcagccagtcagactgtttcgcggccggacaagtgggaggatcgtagctccgagggggtgtcaggacttcggctgggacccttgttttcagcctgacgggtatgagcagacctatgccgagatgcctaaagcagagaagaacgccgtttcgcaccgcttcagagcactgctcgagctccaagagtacttcgggtcactcgctgcatag

SEQ ID NO: 120590 - DNA, 8232 bp, synthetic construct
  misc_feature 1..8232: note = Description of Artificial Sequence: Synthetic coding sequence
  source 1..8232: mol_type = other DNA
atgtctgacaaaatgagctctttcctacacatcggggatatctgttctctctacgcggagggatccactaacggcttcatctcaacgctcgggctggtggatgacagatgcgtcgtccaaccagagacaggggatctaaacaaccctccaaagaaattccgggactgcctcttcaagctgtgccccatgaaccgatatagcgcccagaaacaattttggaaagcagccaagcccggcgctaactcgactacagacgcggtcctcttaaataagctccatcatgctgccgaccttgagaagaagcaaaatgagactgagaataggaagctcctgggtaccgtgattcagtacggcaatgtgattcagttgttgcatctcaaatcaaacaagtatctgacagttaataagagactgccagcattgctggagaagaatgccatgagagtgactctcgatgaggccgggaatgagggaagttggttttacattcagccattctacaaactgcggagtattggagactcagtagtgatcggggataaagtggtcctcaatcccgtaaatgccggccagccgctgcacgcgtcaagtcaccagcttgtagacaatccaggatgtaatgaagtgaatagcgttaactgcaacacctcatggaagattgtgctatttatgaagtggagcgacaacaaggacgatattcttaagggaggcgacgtcgttcgtctgttccacgccgagcaggagaagtttctgacctgtgacgagcatcgcaaaaagcagcacgtgttcctgagaacaacggggagacagtcagccactagcgcgacctcaagtaaggctctgtgggaggtcgaggtggtccagcacgacccctgcagagggggcgccggctactggaacagtctgtttcgcttcaaacacctggcaaccggtcactacttggcagccgaagtggaccctgatcaggatgcttcaaggtcacgattacggaacgctcaggagaaaatggtctactcccttgtgtctgtccccgaaggtaacgatatttccagtatcttcgaattggaccccacgacccttaggggaggtgattccctcgtgccccggaacagttatgtgaggctgaggcatctgtgcaccaatacatgggttcactccacaaacatcccgatcgataaagaagaggagaagccagtcatgctgaagatcggcacctcaccagtcaaagaggataaggaagccttcgccattgtgccagtgtctcctgctgaggtgagagacctggatttcgccaatgatgcctcaaaggttctcggatccatcgccggaaagttagagaagggtacgataacccagaatgagaggcgcagtgtgactaagctgttggaggatctggtctatttcgtcacagggggaactaactccggccaggacgtccttgaggtggtgttcagcaagccaaaccgcgaaagacaaaagcttatgagagaacagaacatccttaaacagatcttcaagctgcttcaggcacccttcacagattgcggcgacggtcccatgctgagacttgaagaacttggcgaccaaagacacgcccctttccgacatatctgtcgtctgtgctacagggtgctgaggcactcacaacaggactaccgtaagaatcaagaatacatcgccaaacagttcgggttcatgcagaagcagattggatacgacgttttggcagaggacaccatcacagccttacttcacaacaaccgtaagctcttggaaaagcatattaccgcggccgagatcgacacatttgtatcactggttcggaagaatagggagcccaggtttttggactatttaagcgatctgtgcgtgagcatgaacaaatccatccccgtcacccaggagttgatatgcaaagcagtgcttaatccaaccaacgccgacatccttattgaaaccaaactggtgctgagcagatttgagtttgaaggggtcagctctactggagaaaacgcccttgaggcaggcgaggacgaggaggaggtttggttgttttggcgagactctaataaggaaataagatctaaaagcgtccgcgagctggctcaagatgccaaagagggacagaaggaggatcgcgacgtgttgagttattaccggtaccaactgaacttgttcgctcggatgtgcctggacaggcaatatttagcaataaacgagatctccgggcagctggacgtcgaccttatcctccgctgtatgtccgatgagaatctcccatacgatctgcgcgccagcttttgcagacttatgctgcacatgcatgttgacagggacccccaggaacaggtgactcccgtcaagtatgctagattgtggtcggagatcccaagcgaaattgctatagatgactacgactcttccggcgcttctaaggacgagatcaaagagaggttcgcccagacaatggagttcgttgaagagtacttgagggatgttgtatgtcagcggttcccattttctgacaaagaaaaaaataagcttactttcgaggttgtgaacctggcgaggaacttgatctactttggcttttacaatttctccgatcttctgcgcctcaccaaaattttgctggccatcctggactgtgtgcacgtcacaaccatattcccaatcagcaagatggccaaaggagaggagaataaagggaataacgatgtcgaaaaactgaaaagcagtaacgtgatgcgctcaattcatggtgtgggcgaactcatgacccaggtcgtccttcgcggtggaggcttcctccctatgactcctatggctgctgcaccagaaggcaacgtcaagcaagcagaaccagagaaggaggatattatggtgatggatactaagcttaagattattgagatcctgcagtttattctgaacgtaaggctggattataggatttcttgtctcttgtgtattttcaagagggagttcgacgagtcaaattcacaaacctccgagacgagctctggcaattcatcccaggagggtccgagcaacgtgcccggtgcattggatttcgaacatatcgaggaacaggcggaggggatttttggagggagcgaagagaatacccccctggacctggatgaccacggtggccgtacattcctacgtgtcttactgcacttgactatgcatgactatccaccactggtcagcggagccctgcaattattattcaggcatttctcacagagacaagaggttttacaggccttcaaacaagtacagctgctggtgacgtctcaggacgtagacaactacaaacagataaagcaggaccttgaccagctccgaagcattgtggaaaagtcagagctttgggtgtataaggggcagggacccgatgaaacaatggacggcgcaagcggtgagaatgagcacaaaaagacggaggaaggcaacaacaagcctcagaaacatgagagcacaagttcctataactatcgcgtagtgaaagagatcctgatccgtctgtctaaactgtgcgtgcaagagtcagcttctgtgagaaaatcaaggaagcagcagcagcggctgcttcgaaacatgggcgcgcatgccgtcgtgttagagctactgcaaattccttacgagaaggcagaagacaccaaaatgcaagagattatgcgattggcgcacgagtttctgcagaatttctgcgccgggaaccagcagaatcaggctttgctgcacaaacacatcaacctattcttaaacccaggcattttggaggcggtgacaatgcagcacatattcatgaacaattttcagctctgctcggaaatcaacgagcgtgtcgtgcaacactttgtgcactgtatcgagacacacggacgtaatgtgcagtacatcaagttcctccagactattgtgaaggcagagggtaagtttattaagaaatgtcaggacatggtgatggctgaacttgttaactccggggaagacgtgttagtgttctataatgatagagcttcttttcagacacttatacagatgatgcggagtgagcgcgatcgtatggacgaaaacagccctctcatgtatcatatccaccttgtagagctgctcgccgtgtgcactgaaggtaaaaatgtttacacagagatcaagtgtaactctctcctcccactggacgatatagttagggtggtgacgcatgaggattgcatccctgaggtgaaaatcgcctacatcaactttctcaatcactgctacgtggacactgaggttgaaatgaaggagatctacacttccaatcacatgtggaagctttttgagaatttcttagttgatatttgccgcgcttgtaataatacatctgacagaaagcatgctgattcaatcttagagaagtatgttactgaaatcgtgatgagcattgtgactacgttcttctcctctccattcagcgatcagtcgacaaccctgcagactcgtcaacctgtcttcgttcagcttctgcagggcgttttcagggtgtaccattgcaactggctgatgccgagtcagaaagcgtctgtggagtcatgcatacgggtgctcagcgatgtcgcaaagagccgagcaatcgccatacctgttgatttggattcacaggttaacaacctctttctcaaaagtcatagtattgtgcaaaaaaccgctatgaactggcgattatccgctaggaacgctgctaggagggactcagtgcttgcagccagccgtgactataggaacatcatcgagcgcttacaggatatcgtgagcgccctggaggatagattacgaccactggtgcaagcagaattgtctgttttggtcgacgtgcttcacagacccgagctgctattccccgagaacaccgacgcccggagaaaatgtgaatctgggggttttatatgtaaattgatcaagcacacaaagcagctgttggaagaaaatgaggaaaaattatgcatcaaggtcctacaaaccctccgggagatgatgaccaaagaccggggatacggagagaagttaatttctatcgacgagctcgataatgccgaactgcctcctgcacctgacagtgagaacgccacagaggaactggaaccttcacctcccctgaggcagcttgaagatcataaacggggcgaggcactgcggcaggtcttggtcaacagatattacggaaacgtacgaccatcaggtcgtagggagtcactgaccagcttcgggaacggccccctctccgcaggcggaccgggaaaaccgggaggcggaggcggcggcagcggatcttctagcatgtcgaggggcgaaatgtctctcgccgaagtgcagtgccacctcgacaaggaaggcgcaagcaatctggttattgacctgataatgaacgcgagttcggaccgagtgtttcacgaatccatcctgcttgcgatcgcattgctggagggcggaaacacgacaatccagcacagtttcttttgtaggctgaccgaggataagaagtctgagaagttttttaaggtgttttatgatcgaatgaaagttgcgcagcaggagattaaggccacggtgaccgtcaacaccagcgacctgggaaataagaagaaagacgacgaagtggatagggacgccccctcacgcaagaaggcaaaggagcctactacgcagataaccgaggaagtccgggaccagcttctggaagcatcggcagccactaggaaagccttcacgacattccgacgtgaggcagaccctgacgaccactaccagccaggcgaaggcacccaggcaacggcagataaggccaaagatgacctcgaaatgtccgctgtcattaccattatgcagcccatcctgcgttttttacagttactttgcgagaaccacaacagagatttgcagaattttctcagatgccagaataacaagactaactacaatctggtgtgtgaaaccctgcagtttctggactgcatctgcggatcaactacagggggactgggacttctgggcctttacattaatgaaaagaacgtcgcccttattaatcagactctcgagagtctgacggagtattgccaggggccatgtcacgagaatcaaaattgtatagcaacccacgagtctaatggaattgacatcataacagccctgatacttaacgatattaatcccttgggtaaaaagagaatggatcttgtgctcgaactgaaaaacaacgcgagcaaactgctgttggccattatggagagcaggcatgattccgagaatgcggagaggatcttgtataatatgcgccctaaagagctggtggaagtgatcaagaaagcttatatgcagggcgaagttgaatttgaggacggtgaaaatggggaggacggtgcagcgagcccacgtaacgttggacacaatatctatattctcgctcaccagctggctcgccataacaaagagctgcagtccatgttaaagcctggtggtcaggtcgatggggatgaggccctggagttttacgccaagcacacagctcaaattgagatcgtaagactagatcgaacaatggagcagattgtgtttccggtgccctccatctgcgaatttttgacaaaagaatctaaactgaggatctattatacaacggaaagggacgagcagggatccaagattaacgacttttttctgaggtctgaagatctgttcaacgagatgaattggcagaagaagttgagagctcagccggtcctgtactggtgtgcacgcaacatgtccttttggtcttcaatatctttcaacctggccgtcttgatgaatcttctagtggcattcttctacccctttaaaggtgtgcgcggtggaaccctcgagcctcactggagtggactgttgtggacagctatgttgatctcccttgccattgtcattgcgctgccgaaaccacacgggatccgggcactgattgcgtctaccatacttcgcttgatatttagcgtgggccttcaaccaaccctatttctacttggagccttcaatgtgtgcaataaaataatctttctaatgtcttttgtcggcaactgcggcacatttacgcgaggatatcgggctatggtgcttgacgtggagtttctttatcacctgctgtatcttgtcatctgcgcgatgggcctctttgtgcatgaattcttttacagtctcctgctcttcgatttggtctacagagaggagaccctcttaaacgtgatcaagtctgtcaccaggaatggccgttctataatactcacagcagtgctcgcactcatactggtatacctgtttagtatcgtggggtacctattcttcaaagatgactttattttagaagtcgatagactgcctaacgagaccgctgtgcccgaaaccggggagtcactggctagcgagttcctgttctctgatgtctgcagggtcgaatcaggtgagaattgcagctcccccgcccctagggaagagctagtgcctgccgaggaaacggagcaggacaaggaacacacttgcgaaaccttattgatgtgtattgtaacagtactgagtcacggactgagatccggaggcggtgtgggggacgtgcttaggaaaccatcaaaggaggagccgctgttcgctgccagagtaatatacgacttgctttttttctttatggtgatcatcattgtcttaaacttaatcttcggcgtaatcatcgatacatttgcggatctccgatcggaaaagcaaaaaaaagaggagatccttaagacgacttgctttatctgcggcttggagagagataaattcgataacaagaccgtcacattcgaggagcacatcaaagaggagcacaacatgtggcactacctttgcttcatcgtcctcgtcaaggtgaaggactccacagaatataccggtcccgagtcctacgtggccgagatgataaaggagcgcaatctggactggttcccaaggatgcgcgccatgtctctcgtgtcctccgatagcgagggcgagcagaacgaactgcggaatttgcaagaaaagctcgagtccaccatgaagctcgtgacaaacctgtctggccagcttagcgagctcaaggaccagatgaccgagcagcggaaacagaagcaaagaattggactcctgggtcaccccccacatatgaacgtgaatccccagcaacctgcatag

SEQ ID NO: 120591 - DNA, 8232 bp, synthetic construct
  misc_feature 1..8232: note = Description of Artificial Sequence: Synthetic coding sequence
  source 1..8232: mol_type = other DNA
atgtccgacaagatgtcttcctttcttcacatcggcgatatctgttcactatacgccgaagggagcacgaacggttttataagcacacttggacttgttgacgatcgctgcgtggtgcagcccgaaaccggggaccttaataatcccccgaagaagttccgtgactgcctgttcaagctgtgtcctatgaaccggtatagtgcccaaaaacaattttggaaggccgcaaaacctggagctaacagcaccaccgacgccgtgctcctgaataagctacaccatgctgccgacttagaaaagaaacagaacgagaccgagaatcgtaaactactagggaccgtgatacagtatggcaatgtgattcaattgcttcacttgaaatccaacaagtacttgacagtgaacaaaagactcccagcccttctggagaagaatgccatgcgggtgacactggacgaggcagggaacgagggaagttggttctacatccagcctttctacaaattgcggtccataggcgacagtgtcgttatcggcgataaagtggtgctcaacccagtcaacgctggccagcctctgcatgctagtagccaccagctggtcgataatcctggttgcaacgaagtgaatagcgtgaattgcaacacgtcttggaaaatcgtattgttcatgaagtggtcagataataaagacgacattcttaaaggaggagatgtcgtccgcctattccacgccgagcaggagaagttcctgacctgcgacgaacatcgaaagaagcagcatgtcttcttacgtaccaccggcaggcagagtgctactagtgccaccagcagcaaggcactgtgggaagtcgaagtggtgcagcatgacccatgccggggaggagccggttactggaattcactctttcgcttcaaacatctggcaacaggccactacctggccgctgaggtagatcctgacttcgaggaggagtgcctggaattccagccgtcagtggatcccgaccaagatgcttcccgttcgaggctgcgcaacgcgcaggagaaaatggtttactcattggtttccgtccctgagggcaatgatatctccagcatctttgaattggaccccacaaccctccgcggaggggattcgctggtgccgcgaaatagttacgtcagactgcgtcatctctgtaccaacacatgggtgcacagcacaaacattcccatcgataaagaggaagaaaagcccgtaatgctcaagataggaacttcaccagtgaaggaggacaaagaggcttttgccatcgtccctgtgtcaccagcggaagttagggatcttgatttcgccaatgatgcctccaaagtcctgggctctatcgccgggaaactggagaaaggcactattacccagaacgaaaggaggagcgtcaccaaattgctggaagacttggtctacttcgtcacgggaggcaccaatagtggccaggatgtgctggaagttgtcttttcaaaacccaatagagagcggcagaagcttatgcgcgagcagaatattctaaagcagatcttcaaattgctgcaggcaccattcaccgattgtggcgacggcccaatgttaaggctggaggagctaggggaccagagacacgctcccttccgacatatctgtcgtctatgttatagagtcttgcggcatagccagcaggattatcgaaaaaaccaagagtatatcgctaagcagtttggctttatgcaaaaacagatcggttatgatgtgttagcagaggacaccatcacagccttgctgcacaacaaccgcaaactgctcgaaaagcacataacagcggccgaaattgataccttcgtatccctagtgcgaaaaaaccgggagcctagatttttggattatctgtccgatctttgcgtgagcatgaataagtcgatccccgtcacacaggagttgatctgtaaagccgtgttgaaccctacaaacgctgatatcctaattgaaaccaaactggtcctctcgcgattcgagtttgagggtgttagctcgacaggcgagaacgcactcgaagccggtgaggacgaggaggaggtctggctgttctggcgggatagtaataaagaaatccggagcaagtctgttcgcgaacttgctcaggacgcaaaggagggccaaaaggaagacagagatgtcctctcctactatagatatcagctgaatctctttgcccggatgtgcctcgaccgccagtatctggctatcaacgaaatcagtggtcaactggacgtggacctgatacttaggtgcatgtctgacgaaaacttgccatatgacttaagagcgagtttttgcaggctcatgctgcatatgcacgtggatcgcgatcctcaagaacaggtgaccccggtgaagtacgcccgcttatggtctgagattccctctgagatcgccatcgatgattatgatagttccggcgcatcaaaagatgagatcaaggagagatttgcccagaccatggagtttgttgaagagtatttacgtgacgtagtctgtcaaagattcccatttagtgataaagaaaaaaacaagctcacattcgaggtggtgaacctcgcaaggaacctcatttatttcggattttacaacttctcagacctcctgaggctgaccaagattctgctcgccatcctcgactgtgtacatgtgaccactatctttccaatatccaaaatggcaaaaggagaggagaataagggaaataatgacgtggaaaagctgaagagctccaatgtaatgaggagcatccacggggtgggtgaactcatgacgcaagtagtgttgcgtggtggcggattcctcccaatgactccaatggcagccgcacccgagggaaatgtcaaacaggctgagccagagaaggaagatatcatggtcatggatacaaagttgaagattatcgaaatcctgcagtttatcctgaatgtcagactggactaccgaatcagttgtcttctgtgtatttttaagcgagagtttgatgaaagtaatagtcagacatctgagacctcttcagggaattctagtcaagagggtccatccaacgtacctggcgccttagattttgaacacatcgaggagcaggcggagggaattttcggcggcagtgaagagaatactccattagatcttgacgaccacggcggtcgaacctttctgcgggtattgctgcacttaacaatgcatgattacccccctctcgtcagcggagccctgcagctcctattccggcactttagccagcgccaggaagtgctccaggcattcaagcaggtgcagcttctcgttaccagccaggatgtggacaattacaagcagatcaaacaagacctcgatcaattgcgctcgatcgtcgagaagagtgagttatgggtgtataagggacagggccccgacgaaaccatggacggcgctagcggggagaacgagcataagaagactgaagaagggaataataaaccacagaagcatgaatccacgtcttcatacaattacagagtggttaaagagatcttgattcgcctctccaaattatgcgtacaagaatctgctagcgtgagaaagagcagaaagcaacagcagcggttgctgaggaacatgggggcacatgcggtggtgctggagttgctacagatcccatatgagaaggctgaagatactaagatgcaggagattatgcggctcgctcacgagtttcttcagaacttctgtgcaggtaaccagcagaatcaggcactccttcacaaacatattaatctgttccttaacccaggaatactggaagcagtgaccatgcagcacatctttatgaataactttcagctgtgctccgagatcaacgaaagggtagtccagcattttgtacactgtatagaaacacacggtcgcaacgtacagtacatcaagttccttcaaacaatagtcaaagccgagggcaaattcattaaaaagtgtcaggacatggtaatggcggagcttgttaactctggcgaagacgttctggtgttttataacgatcgggctagctttcagacattaattcagatgatgcggagtgaacgcgaccgcatggacgaaaacagcccactgatgtatcacatccatctggttgagcttttggctgtttgtacagaagggaagaacgtctatactgagatcaaatgtaattcactcttacccttagacgatattgttcgggtggttacacatgaggactgcattcccgaagtgaagatcgcttacataaacttcttgaatcactgctacgtggataccgaggtagagatgaaagaaatctatacttcaaaccacatgtggaagctatttgagaacttcctggtggatatctgtcgcgcgtgcaacaacacatcagacaggaagcatgccgacagcatcctggaaaaatacgtgaccgagatagtcatgtctattgtgactacctttttcagctccccatttagcgaccaatcaactaccttgcagaccaggcagcctgtgttcgtgcagctccttcagggcgtctttcgagtgtaccattgtaactggttgatgccctctcagaaggcctccgtggaaagttgcatcagggtcctctccgatgtggcaaagagtagggccatagctattccagtcgatctggacagtcaggtgaacaaccttttcctgaagtcccactcaattgtgcagaagaccgcaatgaattggagactgtctgctcgcaatgcagcgaggcgggactctgtgctagcagccagccgcgactataggaatatcatcgagcgcctgcaagatatcgtgtccgccctggaggatcgactgcgcccgctcgtgcaggccgaacttagcgtcctcgtggacgtcttacacaggcccgagctgttgtttccagaaaataccgacgccaggcgcaaatgcgagtccggggggtttatatgcaaacttataaagcacaccaagcagctattggaggagaatgaggaaaagttgtgtatcaaagtgctccaaaccctgcgcgaaatgatgacaaaggaccggggttatggcgaaaaactcatatccatcgacgagctggataacgctgagctgccccctgccccagacagcgaaaacgccaccgagaagggagaggcactgaggcaagttctggtgaatagatattatggaaacgtgcggccttctgggaggcgggagtcacttactagcttcggaaatgggcccttgtcagccgggggacctggaaagccagggggaggcggcgggggcagcgggtcctcatcaatgagtcgcggcgagatgagtttggcagaggtccaatgccacctggacaaagaaggagcgtcaaatctcgtcattgatttaattatgaatgcctcctctgatagggtgttccatgaatcgattctgttggcaatcgcgctgcttgagggcggtaatacgactatccaacactctttcttttgccgcctcaccgaggataaaaagtccgagaaattcttcaaagtgttttatgaccggatgaaggttgcccagcaggagatcaaagcaaccgtgaccgtgaatacaagcgacctcggcaataaaaagaaggacgatgaggttgaccgtgacgctccgagtagaaagaaagcaaaagagcctactacccagatcacagaggaggtaagggatcagttacttgaggcgagcgctgcaacaaggaaggctttcacaacctttaggagggaagctgatcccgatgaccactatcagcccggcgaaggaacccaggctaccgctgacaaagcaaaagatgacttggagatgagcgcagtgattactattatgcagcctatcctgcggtttctgcaacttctgtgcgagaatcacaatcgcgatctgcagaatttccttcggtgtcaaaataacaagaccaattacaatctggtgtgcgaaaccctccagtttctggattgcatctgtgggtcaaccacaggtggactcggcctgctgggattatacattaatgagaagaatgtcgctttgataaatcagaccctggaatctctcaccgagtattgtcagggaccttgccacgaaaatcagaactgcatcgccactcacgagtccaacggcattgacatcatcactgctctgatactaaatgacatcaatccactggggaaaaagcggatggacctggtcttagagcttaaaaataacgctagcaaattactgctggctataatggaatctcgacacgattcggaaaacgcagaacgcatactgtacaatatgcggccaaaggaactcgtagaagtgattaaaaaggcatatatgcagggcgaggtggagttcgaggacggagagaatggggaggacggcgcggctagtccgcggaatgttggtcacaatatatatatcctcgctcaccagctggcccggcacaacaaggagctgcagagtatgcttaagccaggcggccaggtggacggagatgaggctctggaattctacgcgaagcatacggcccagattgagatcgtgcggttagatcggacaatggaacagattgtgtttccggtcccttctatatgcgagtttctgacgaaggagagtaaattgcggatctactatacaaccgagcgcgacgagcagggttccaaaataaacgatttcttcctccgaagtgaggacttgttcaacgagatgaactggcagaagaagctaagggcacagcctgttctctattggtgtgctcgtaacatgagtttctggtcctccatttcttttaatcttgcagtgctgatgaacctgctcgtggcctttttttatcctttcaagggagtcaggggtggaacactggaaccccactggtccgggcttctgtggacagcgatgctcataagcctggccatcgtgatcgcattaccgaaaccgcacgggatacgcgccttgatagccagtactatactcaggttgatcttttccgttgggctccagccaaccctcttcctgctcggggccttcaatgtctgtaataagatcatttttttaatgtcctttgtcggtaattgcgggacttttactcgggggtacagggcgatggtcttagatgtcgagttcctgtaccatctcctgtatttagtcatatgcgccatgggcctgtttgtgcatgaattcttctacagcctactactcttcgaccttgtgtaccgcgaagaaaccctgctgaacgtgataaaatctgtgactcgcaacgggcggagtataattctcactgcagtcctcgcgctgattcttgtgtaccttttcagtatagtgggttatttgttttttaaagacgactttattctggaagtggatcgactcccgaacgagaccgcagttcccgaaacgggcgagagccttgcaagtgaattcttgttctccgatgtttgtagagtagaatcaggggagaactgttcttcccccgcccccagagaggagctggtccctgctgaagagactgagcaggacaaagaacatacgtgtgagacattgctgatgtgcattgtgacagttctcagtcacggtctgcgttccggcggaggggtcggcgatgtgctgcggaaaccatccaaagaagaacctctgttcgcagcccgtgtgatttacgaccttctattcttcttcatggtgattataattgtcttgaacctcatcttcggggttataattgacacatttgccgatctgcggtcagagaaacagaagaaggaggagattttgaagacaacatgtttcatctgcggactggagagagataaattcgacaataaaactgtgacctttgaggaacatattaaagaggagcacaacatgtggcattatttatgtttcatagttctggtaaaggtcaaggattcaaccgagtacacaggtccggaatcatacgtggcggaaatgatcaaggagaggaacctggactggtttcctcgcatgcgtgcaatgtctttggtgagcagtgattcggagggggaacagaacgaattaaggaatcttcaggaaaaattagagagcactatgaagctggtgacaaatctctccggccagctctctgagcttaaagaccagatgacggagcagagaaagcaaaaacagcgtattggcttactgggacaccctccccatatgaacgtgaatcctcagcaacccgcatag

SEQ ID NO: 120592 - DNA, 8277 bp, synthetic construct
  misc_feature 1..8277: note = Description of Artificial Sequence: Synthetic coding sequence
  source 1..8277: mol_type = other DNA
atgtcagacaagatgagctcctttctccatattggcgatatctgctccctttatgcggaaggctcaaccaacggcttcatttctacactgggtctcgtcgatgataggtgtgtcgtacaacctgaaacaggcgatctcaacaatcctccaaagaaatttagggactgcctgttcaaactgtgccccatgaacaggtatagcgcgcagaagcagttctggaaggcagccaagccaggagccaatagtaccactgacgctgttcttctcaacaagctacaccacgccgcagacctggagaagaagcagaacgagaccgaaaatcggaaacttttggggactgtaattcagtatgggaacgtcattcagctcctgcatctgaagagcaacaaatatcttacagtgaacaaaagactgcccgcgctcctggagaagaatgccatgcgcgtgacgctggatgaagctggcaatgagggaagttggttctatatccagcctttctataaactgaggagcattggagattctgttgtcatcggagataaggtggtgctgaaccctgtaaacgccggccagccgctgcatgcatctagccatcagctggtggataacccggggtgtaacgaggtgaattctgtgaactgtaatactagctggaagattgttctgttcatgaagtggtctgacaacaaggacgacatcctcaaagggggggatgttgtgcgactgttccatgccgaacaggaaaagttcctgacctgcgatgagcatagaaagaagcagcatgtcttcctcaggaccacgggtagacagtccgcgacatcggccacttctagcaaagccctttgggaggtcgaggtggttcagcatgacccctgcagggggggggctggttactggaactcactgtttcggttcaagcacttagctactgggcactacctagccgctgaagtggatcccgattttgaggaagagtgcctagagtttcaaccaagcgtggacccagaccaggacgcaagtagaagccgattgaggaatgcacaggagaagatggtctattcactcgtcagtgtgcccgagggcaacgacatctcaagtatcttcgaactagaccctaccactctgaggggcggtgacagcctggtcccccgaaattcctacgtgaggctgcgacatctgtgtacaaatacctgggtacatagtacaaacattccgatagacaaggaggaagaaaaacctgtaatgctcaagatcggtacatcacctgtcaaagaggacaaggaggctttcgcaatagtgccagtgtctcccgcagaggtgcgggacctcgatttcgccaacgatgcatccaaggtgctggggagtatcgccgggaagctggagaagggcacaattactcagaatgagcgccgctcagttacgaaactactggaggatctggtgtatttcgtgaccggtgggacaaatagcggacaagatgtacttgaagtggtttttagtaagcccaaccgcgagcgtcaaaaactcatgcgcgaacagaatatcctgaagcagattttcaagctcttacaggctccattcaccgattgcggtgatggccctatgttgcgtcttgaggagcttggggaccagaggcatgcccccttcaggcatatctgtcgcctttgctatcgagtcttgcgccactcccagcaggattaccgtaaaaatcaggagtatatagcaaaacagtttggatttatgcagaagcagattgggtacgatgtgttggccgaggacacaatcacagctctgttacacaataaccgcaagctgctggaaaaacacattacggccgctgaaatcgacactttcgtcagtcttgtgagaaaaaaccgcgaacctcgcttcctcgactacctcagcgacctatgtgtgtcaatgaataaaagtatccctgtgacccaggaactaatctgtaaggccgtgttgaatcctactaacgctgacattctcattgagaccaagctggttctctcccggtttgaatttgagggagtgtctagtactggcgagaacgcattagaggcaggtgaagacgaggaagaagtgtggcttttttggagggactctaataaggagatccgttcaaagtccgtccgcgaactggctcaggacgcaaaggaaggccaaaaggaggaccgggatgtactgtcctattacagataccagctcaatctctttgctcgcatgtgtttggacagacagtaccttgctattaatgaaatctcggggcagctggacgtagatctgattttgagatgcatgtctgacgaaaacctgccatacgatctgagggcatctttctgcaggctgatgctgcatatgcatgttgatcgggatcctcaggagcaggtgactcccgtgaagtacgctcggctgtggtcagaaattccgtcggaaattgcaattgacgattacgactcctctggcgcctcaaaggacgaaatcaaagaaagattcgcccagactatggagttcgtggaagagtacctgcgagacgtagtttgtcagaggtttcctttcagtgataaagagaagaataaacttacattcgaggttgtcaaccttgccaggaatttgatatatttcggcttttacaacttttccgacctgctgaggttgaccaagattttgctggccatccttgactgcgtccatgtgacgacaatattcccaatatcgaagatggccaaaggcgaagaaaacaagggcaataatgacgtggagaagctgaaatcaagtaacgtcatgcggtccatacatggagtcggcgagctgatgacacaagtggtactcagaggtggcgggtttttgccaatgacccccatggccgcagctccagagggcaatgtgaagcaggccgagcctgaaaaggaagatatcatggtgatggatacgaaactgaaaatcatcgagattctgcagttcattctgaacgtaaggttagactatcgcattagctgcctactttgcatcttcaagagggagtttgacgagtcgaattcccaaacctccgaaacttccagcggaaactcttctcaggaagggcctagcaacgtacccggagccctggacttcgaacacattgaggagcaggccgagggcatctttggggggtctgaggagaacacccccttagatctggatgatcacggcggccggacctttctgcgggtgctcctgcaccttacaatgcatgattatccgcccctggtgagcggcgccctccagttgctgtttaggcatttttctcagcgtcaagaggtcctgcaggccttcaagcaggtgcagcttctggttaccagccaagacgtcgataattataaacaaattaagcaggacctggatcagctccgctctattgttgagaagtccgaattgtgggtgtataaggggcaagggccggacgaaaccatggatggagctagtggcgaaaacgaacacaaaaaaacagaggagggcaacaacaagccccaaaagcacgagagcacttcctcatataactaccgagtcgtgaaggagatcctgataagactgagcaaactctgcgttcaagagtccgccagtgtgagaaagagtcgtaaacaacagcaaagattgctccggaacatgggcgcacacgctgttgtcctggagttactacaaatcccctacgagaaagctgaggatacaaagatgcaagagatcatgagattagcgcacgaatttttacagaatttttgtgcaggaaaccagcagaaccaagccctgctgcataagcatataaatcttttcctgaatcctggcatcctggaagcggtgacaatgcaacacatcttcatgaataatttccagctctgctcagagatcaatgaaagagtagttcaacatttcgtgcattgcattgaaactcacgggagaaatgttcaatacatcaaatttttgcagaccatagtgaaggcagaaggaaaattcattaagaagtgtcaggatatggtcatggccgagctggttaatagcggggaggacgtgctcgtattctataacgacagggcctcattccagactttaatccagatgatgcgaagcgaacgggaccggatggatgagaatagcccccttatgtaccacattcacctcgtcgagctgctggctgtgtgcaccgagggcaaaaacgtttataccgagatcaagtgtaacagcctcctccccctcgacgatatcgtgcgcgtcgtcactcatgaagattgtattcccgaggttaagatcgcctatatcaactttttaaatcattgctacgtcgatacagaggtggagatgaaggaaatatacacaagtaaccacatgtggaaattattcgagaacttcctggtcgatatttgccgcgcatgcaacaacacgagtgatcggaagcacgcggatagcatcctggagaaatacgttaccgagatcgtgatgagtatcgtgacaacatttttttcatcccccttcagcgaccaatccacgacattgcagacacgacagccagttttcgtgcagttgttgcagggggttttcagggtttaccactgtaattggctaatgccatcccagaaggcgtctgtcgagtcatgcatcagggttctgagtgatgttgcaaagtcacgtgccatcgcgataccagtcgatctggattctcaggttaacaacctgtttctcaagagccattcgatagtccaaaagaccgctatgaactggagactcagcgctcgtaacgcggctagacgagactcggtcttggccgcctcccgggactatcggaacatcattgagcgactccaagatattgtaagcgcgctggaggaccggctcaggccgctcgtccaggctgaactgagcgtacttgttgacgtgctgcatcgcccagagttgctgtttcccgaaaacactgacgcacggcggaaatgcgagtccggcggatttatatgcaagctaattaaacatacgaagcaactgcttgaagagaacgaggaaaaactttgtatcaaggtgttgcagacccttagggaaatgatgaccaaggatagagggtatggtgagaaattaattagcatcgatgagctcgacaatgccgaactgccacccgctcccgactcagagaacgccaccgaagagttagaaccttcccccccgctccgccagttagaggatcacaaacgcggagaggccctgcggcaggtgcttgtcaatcggtattatggtaacgtgaggccttctggacggagagaatccttgacctcgttcggcaatggcccacttagcgctggcggtccagggaaaccaggagggggggggggcgggtccgggtctagtagcatgtcacggggcgaaatgagcctagccgaagtgcagtgtcatctggacaaagaaggcgcatcaaacctcgtgatcgaccttatcatgaacgcatcctccgatagagtcttccacgagtctattttgttggcaatcgcccttctagagggcggcaacaccactatccaacattcattcttttgtaggctaacagaggataaaaaatctgagaagtttttcaaggttttctacgatagaatgaaggtggctcagcaggagatcaaggccaccgttaccgtgaatactagcgacctgggaaataaaaagaaggacgatgaagtggatagagacgcacctagtcgtaagaaggctaaagaacctaccacgcagattactgaagaggtccgagatcagttgttagaggcatcagctgctacgcggaaggcctttacgaccttccggcgcgaagcagatcctgatgaccactaccagccaggcgaaggcactcaggcgaccgccgacaaagcgaaggatgatcttgaaatgtccgctgtgattaccatcatgcaaccgatcctgcgcttcctccaattactgtgcgaaaatcacaacagagatctgcagaacttccttcgctgtcagaacaacaaaaccaactataatctcgtgtgcgaaacactccagttcctggactgcatttgtgggtcaactaccggtggcctcggattgctggggctgtacatcaacgagaaaaacgtagccttaatcaaccagacgctcgagtcactgactgagtactgccaaggcccttgtcatgaaaatcagaattgtatcgccacccatgagtccaacggtatcgatatcattaccgcactgatcttgaatgacattaatcccctgggcaagaagcgcatggacctcgtcctggagctgaaaaacaatgctagcaaactactactcgctataatggaatctaggcacgacagcgaaaatgctgagaggatcctgtacaatatgcgccctaaagagctggtggaagtgataaagaaggcttacatgcagggagaagtggaattcgaggacggcgagaatggggaagacggcgctgcctctcctcggaatgtgggccataatatttatatcctagctcaccaacttgctagacataataaggaactgcagtccatgctgaaacctgggggtcaggtggatggagacgaggcattggagttctatgctaaacacacagcccagattgaaattgtaaggctcgatagaaccatggaacagatcgtgttcccggttccttcgatctgcgaattccttaccaaggagtccaagttgcgtatctactatacaaccgaacgggacgagcaggggtctaaaatcaacgacttcttcctgcgctccgaagacctgtttaatgagatgaattggcagaaaaagctccgtgctcaaccagtgctctactggtgtgccagaaatatgtcattttggtccagcatctccttcaacctggcggttctgatgaaccttctggtcgcctttttctacccgttcaaaggtgtgcgcggcggaacgttagaaccacactggtcaggactcctctggaccgctatgctgatctcccttgctattgtaattgccttaccaaagccccacggcatcagagccttgatcgcctcaacaatattaaggctcatctttagcgtcgggctgcaacctactttgttccttctcggggcttttaacgtgtgcaacaagattatctttctgatgtcttttgtcggtaactgcggcacattcacacgaggctatagagccatggtgctggatgtggagttcctgtatcacctgctctacctcgtgatttgtgccatgggactttttgtgcacgaattcttttacagcctgctgctcttcgacctcgtgtacagagaagagacgctgctaaatgtgattaaaagcgttacccgcaatggcaggagcatcatcctgactgccgtgctggcgctcatcctagtctacctgttttccatcgtcggatacctgttcttcaaggacgacttcatccttgaggttgatcgcctgccaaatgagacagctgtcccggaaaccggcgagagcctggcctcagagttcctgttttccgacgtctgccgagtggagagcggcgagaactgctcatctcccgccccgagagaggagttggttcccgcggaggaaacagagcaggacaaggaacacacctgcgaaactctgctcatgtgcatagtgaccgtcctgtcacatgggctgcggagtggaggtggagtcggcgatgtgctaagaaaacccagtaaggaagaacctctgttcgccgcccgagtgatatacgacctcctgttcttttttatggtgatcatcatcgtcttgaatctcattttcggggtgattattgatacattcgctgacttgcggtctgagaagcagaagaaggaagagattctgaaaacaacctgttttatctgcggtctggagcgcgacaagtttgataacaaaaccgtaaccttcgaggagcatatcaaggaagaacacaacatgtggcattatctctgtttcattgtgctcgtgaaagtgaaagactctaccgaatatacaggaccggaatcctacgttgccgaaatgatcaaggagagaaatcttgactggtttccaaggatgcgtgctatgagtttggtgtcctcagattctgaaggggaacagaacgagctacgcaatctgcaggagaaactcgaaagcaccatgaagctggtcaccaacctctcaggtcagttgtccgaattaaaggaccagatgacagagcagagaaaacagaagcagcggatcggactcctcggccatccaccacatatgaacgtgaatccccagcaacccgcctag

SEQ ID NO: 120593 - DNA, 8133 bp, synthetic construct
  misc_feature 1..8133: note = Description of Artificial Sequence: Synthetic coding sequence
  source 1..8133: mol_type = other DNA
atgtccgataaaatgagtagttttctacatatcggcgacatatgttccctctacgcagagggctcaacgaacggcttcattagcactttgggcctggtggacgaccgttgtgtagtgcaaccagaaactggcgatcttaataacccccccaagaagttccgggactgtttgttcaagctgtgtcctatgaaccggtacagtgcgcagaagcagttctggaaggccgcgaagccaggcgctaattccaccacggacgcagtgctgcttaataaacttcaccatgctgccgacctcgaaaaaaagcagaacgaaaccgagaataggaaactactggggactgtgattcagtacgggaatgtcattcagctactgcacttgaaaagcaataagtatctcacagtcaacaaaaggcttcccgctctgctggagaagaatgccatgagggtcacactcgatgaagcgggcaatgaaggtagctggttttacatccagcccttttataagcttaggagcattggcgattcggtggtgatcggcgataaggtagtgcttaaccctgtgaacgctggacagccactgcacgcatcatcccatcagctcgtggacaatcccggctgcaacgaggtaaatagcgtgaactgcaatacaagctggaagattgtgctctttatgaaatggtcggacaataaggatgacattctaaagggcggtgacgtggttcggctttttcacgccgagcaggaaaagttcttgacgtgcgacgagcacagaaagaaacagcacgtgttcttgaggacaactggccgccagtcggcgaccagcgccaccagctctaaggccctgtgggaggttgaggttgtgcagcatgacccgtgcaggggcggtgctggctattggaacagtcttttccgcttcaaacacctggccacgggtcactaccttgctgcagaagttgatccggattttgaagaggagtgtctggaattccagccctctgtggaccccgaccaagacgcttcacgctcaaggctacgaaacgcccaggagaagatggtgtattccttagtgtctgtgccagaagggaatgacatatccagtattttcgaattggaccccacaaccctgagagggggcgatagccttgtgccccgaaattcctacgtgagactccggcacctttgcaccaacacctgggtgcattctacaaacattccgatcgacaaggaggaggagaagcccgtgatgctgaaaattgggacttcgcccgtaaaagaggacaaggaagcattcgccattgtaccagtgtccccagctgaagtgagggatctggattttgccaacgacgcaagcaaagttttaggctcaattgctggaaagctagaaaaaggcaccatcacacagaacgaaaggaggtccgtcaccaagttgctggaagacctcgtatactttgtcacaggcggcaccaacagcgggcaggatgttctggaggttgttttctctaaacctaaccgggagagacagaaattgatgagggagcaaaacatactgaaacagattttcaaactccttcaggctcctttcaccgactgtggcgacggccctatgttaagattggaagaactgggcgatcagaggcatgctcctttccggcatatttgtcggctgtgctaccgggttcttcggcattcacagcaggactaccgaaagaatcaggaatacattgctaaacagttcggttttatgcagaagcagataggttacgacgttctggctgaagatacaatcacagccttgcttcacaataacagaaaactgctggagaagcatattacagccgccgaaatcgacacttttgtctctctcgttcgcaaaaatagggaacccaggtttctggactacctgtcggacctttgtgtgtcgatgaacaaatcaatacccgtgactcaggaactgatatgcaaggcggtgctcaaccccacaaatgctgacatactaattgagaccaaactggttctaagccgcttcgagtttgaaggagtatcttcaactggcgagaatgccctcgaggcgggggaggatgaggaagaagtgtggttattttggagggactctaacaaagagattagaagcaaatccgtgcgcgaattggcccaggatgccaaggaaggacagaaggaggaccgggacgtgctgagttattatcggtaccaactaaacctgttcgcccgcatgtgtctggatagacagtatctggcaatcaacgagatcagcggacagctggacgtagacttaattttgcgatgcatgagtgacgagaatctgccttatgacttgcgggcctccttctgtagactgatgctacacatgcatgtggacagggatccacaggagcaagttacgcccgtgaaatatgcacgcctctggagtgaaatccccagtgaaattgctatcgacgactatgactcaagtggagcaagcaaagacgagatcaaggagcgcttcgcccagaccatggagtttgtggaggaatatctcagggatgttgtctgccagagattccctttttctgataaggagaagaacaaactgacattcgaagtcgttaacctggcccgaaatctgatctattttggtttttataacttcagtgatctactgaggttaaccaagatcctgctcgcgattcttgattgtgttcacgtgactaccatattccccatcagcaaaatggcaaagggcgaggaaaataaaggctctaacgtcatgaggagtatccacggtgtgggcgagctcatgacccaagtggtgctgcggggcgggggttttctacccatgactccgatggccgccgccccagaaggcaacgttaagcaggccgagccagagaaggaggacataatggttatggataccaagctcaagattatagagatcctacaatttatcttgaatgtgcgccttgattatcgaatcagctgtttgctatgcatctttaagcgagagttcgacgagagtaacagccagacgtctgagacctctagcgggaattcatcacaagagggaccgagcaatgtgccaggggctctggatttcgagcacatagaggagcaagccgaaggcatttttgggggctctgaggagaacacccccctagatcttgatgatcatggcggccgcacctttctcagagtgctgctccatctaaccatgcacgattacccccctctcgtctccggggctcttcagctgctttttcgtcacttttcacagagacaggaagtcctgcaggccttcaagcaggtacaattgcttgtcacttctcaggatgtggacaactacaagcaaataaagcaggatctggaccagctacgcagcatcgttgagaaatccgagttgtgggtttacaagggtcaggggcccgatgagactatggacggagctagcggagaaaacgaacataagaagaccgaagagggaaataataagccgcagaaacacgaatcaacttcttcatataactaccgagtcgtcaaggagatcctgattcggctcagcaagctctgtgtccaagagagcgcaagcgtaagaaagagccggaagcagcagcaaagactcctgagaaacatgggggcacatgcagttgtcttggagctgctccagatcccttacgagaaagctgaggacactaagatgcaggagattatgcgcctggcccacgaatttctgcagaacttctgcgccgggaaccaacagaatcaggctctgttacacaaacacattaatctgttcctaaatcctggcattctcgaagcggtcacaatgcagcacattttcatgaacaacttccaactgtgctcagagatcaacgagagagtagtccaacatttcgtgcactgtatcgaaacccacgggagaaatgtgcagtacattaaattcttgcaaacaatcgtaaaggccgagggcaagtttattaaaaaatgtcaggatatggtgatggctgagctggtgaatagcggggaggacgtactcgtcttttataatgatcgtgcaagtttccaaacacttatccagatgatgaggagcgagagggaccgaatggatgagaacagtcctctgatgtatcatatccacctggtggagctccttgccgtgtgcacagagggaaaaaatgtgtacacagagatcaagtgtaactctcttttgcccctggacgatatcgtacgagtggtgacccacgaagactgcatccccgaagtgaagatcgcttacatcaactttctaaaccactgctacgtagatacggaggtggaaatgaaagagatatataccagcaaccacatgtggaagctctttgagaattttttggtcgatatttgcagagcatgtaataatacctccgaccgaaagcacgctgactctattctcgaaaaatacgtcaccgaaatcgtgatgagtatcgtcacgactttcttctcctctccgttttccgatcaaagcacaacgttgcagactcggcagcctgtgtttgtacaactgctccagggtgtttttagagtgtaccactgtaattggctgatgccatctcaaaaggcgtctgtcgagagctgtattagggttctgtcagacgttgccaaaagtagagccattgccatcccggtcgatttggactcacaagtcaacaacctttttctgaagtcccactccattgtgcagaagacggcaatgaattggaggctgtccgcaagaaacgccgctaggagagattcagtcctcgccgcctccagagattaccgaaacatcatcgagcggctgcaggatattgtgtcagcgcttgaagacaggctcaggcctctggtccaggctgaactgtccgtcctagtagacgttctgcataggcccgaactacttttcccagaaaacacagacgcaaggagaaagtgcgagtctggcggtttcatttgtaagctcattaagcacactaaacagctgcttgaagagaacgaggaaaaactgtgcatcaaagtgctccagaccttacgcgagatgatgacgaaggacagaggatacggcgagaagggagaagctttgagacaggtgttagtaaataggtactatggtaatgtgcgaccgtcaggccggcgagaatcactgactagcttcggcaacggacctctctctgccggcgggcccggaaagcctggcggcgggggaggaggatccgggtcttcaagcatgtcgcgtggcgagatgagtcttgctgaggtgcagtgtcacttagataaggaaggagcaagcaacctggttatcgatctgatcatgaatgccagttccgacagagtttttcatgagtccatacttctggctatagccctgctggagggagggaacacaaccatccagcacagttttttttgtcgcttaacagaggacaagaaatcggagaaattctttaaagtcttctacgatcgcatgaaagtggcccagcaggaaatcaaggctacggtgactgttaacacctcagatttgggcaacaagaaaaaggacgacgaagtggacagggacgctccaagcaggaaaaaagccaaagagcccactacccaaatcacggaggaagttagggaccaactactagaggccagtgctgccacgaggaaagcttttacaacttttcgccgggaggccgatcctgacgatcattaccagcccggtgagggaacccaggcaacagccgataaggctaaggatgacttggagatgagcgccgtgattaccattatgcagcctatcctgaggtttctccaattgctttgcgagaatcacaatcgggacctgcagaatttcctccgatgtcaaaacaataagaccaattataatctggtctgtgaaaccctacagttcctggattgcatctgtggatccactaccggcgggctagggctcctgggattgtacataaatgagaagaatgtggcccttatcaatcagactctggagtctctgacagagtactgccaagggccgtgccatgagaaccagaattgcatagcaacccacgagagtaatgggatcgacatcattaccgctctgattttgaacgatatcaacccactgggcaagaagcggatggatcttgtacttgagcttaagaataatgccagcaaattgttgttagccatcatggagtcccggcatgattcggaaaatgcagaaaggattctgtataacatgcggcctaaagagctggtggaggtaataaagaaagcgtatatgcaaggcgaagtcgagttcgaggatggcgaaaacggcgaagacggggccgcttcaccccggaatgtgggccataatatctacattctagctcaccagctggcaagacacaacaaagagctacagtctatgctcaagcccggcggccaagtggacggcgacgaagctctggaattttacgctaagcacacagctcagattgagatcgttcgccttgaccgtaccatggagcaaattgttttccccgttcctagcatctgcgagtttcttaccaaggagtctaagctacggatctactacacaaccgagcgagacgaacagggctcaaaaattaacgacttcttcctgaggagcgaagatctcttcaacgaaatgaactggcagaagaagctgagagcccagcccgtgctttattggtgcgccaggaacatgtccttttggtccagtatttcgtttaacttggccgtgcttatgaacctcctggtagcgttcttttacccctttaagggtgtcagaggaggcacgctggaaccccactggtccgggttactctggactgccatgttaatatcccttgccattgtcattgctctgccgaagcctcacggaatacgagctctgatcgcctctacaattctaaggcttatcttctccgtaggtctgcagccaacattgttcctgctcggcgcttttaatgtctgtaataagatcatcttcttgatgagcttcgtagggaattgcggtacgttcacacgaggataccgggcaatggtgctggacgtagaatttctctatcatttgctgtaccttgttatctgcgccatggggttgtttgttcatgagttcttctactcattattgctgtttgacctcgtctacagagaggagacactgctgaacgtgatcaagagcgtgactcgcaacggccgctcaattatcctgaccgccgtgctcgctttgattcttgtttatcttttctcaatagtcggctatctgttttttaaagacgacttcatactcgaggttgatcgccttccaaatgaaacagcggtgccagagacgggcgagagtctggcctcagagttcctcttcagtgacgtctgtagggtcgagtccggagagaactgctcatctccagccccccgcgaggagttggtgccagcagaggaaacagaacaagataaggagcatacgtgtgaaacgttacttatgtgcattgtgacagtcctgagtcatgggctgcgttcagggggtggcgtgggcgatgtgctgaggaagccttctaaggaggagcctctgtttgctgctagggtaatctacgatctcttgtttttcttcatggtcatcataattgtcctgaaccttatcttcggcgtcataatcgataccttcgccgaccttcgctcagaaaaacaaaagaaggaggaaatcctcaagactacatgtttcatttgtggcctcgaaagggacaagtttgacaataagacagtcacatttgaggagcatattaaagaggaacacaatatgtggcattacctctgcttcatagtgttggttaaggttaaggactcaactgagtacacagggcctgaatcctatgtcgctgaaatgatcaaggaacgaaatttggactggtttccaagaatgcgtgcaatgagcttggtctcctccgattcggagggtgaacagaacgagctgcgtaacctccaggaaaaactggagtccacaatgaaactggtcactaatctgtcaggccagctttcagaactaaaagaccaaatgactgagcagaggaaacagaaacaacgcattggcctgctcggacaccctcctcatatgaatgtgaatccacagcagcctgcctag

SEQ ID NO: 120594 - DNA, 8133 bp, synthetic construct
  misc_feature 1..8133: note = Description of Artificial Sequence: Synthetic coding sequence
  source 1..8133: mol_type = other DNA
atgtcggataaaatgagcagcttcttgcacataggagacatctgcagtctatatgccgagggtagtacaaatggctttatctccactttggggctcgtcgacgatcgatgcgtggttcagccggaaaccggcgacctgaacaatcctcccaaaaaattccgggactgcctgttcaaattatgtccaatgaataggtacagtgcacagaagcagttttggaaggcagccaaacccggggcgaatagtaccaccgatgccgtcctgttgaataagctgcatcatgctgccgatctcgaaaagaagcagaatgaaaccgaaaatcggaagctgctaggcaccgtgattcaatacggtaatgtgatacagttgctccacctgaaatccaacaagtatcttactgtaaacaagaggttgccggctttgttggaaaaaaacgctatgcgcgttaccctggatgaggcagggaatgagggatcctggttctatatccagcccttctataagctgcggtctatcggggactcggtagtgatcggcgataaggtagtgcttaacccagtcaacgctggccagcccctccatgcctcctcacaccagctagtagacaatccaggatgtaacgaggtgaattcagtgaactgtaatacatcttggaagatcgtgctgttcatgaaatggagcgataacaaagacgacattctgaagggcggcgacgtcgtcagactgttccacgccgaacaagaaaaattcctcacttgcgacgaacacagaaagaagcagcatgtgttccttcgcacaaccggtcgccaatcagccaccagtgccacttccagcaaggcactatgggaagtcgaagtcgtgcagcatgacccctgtagaggcggcgctgggtattggaattctctcttcagattcaaacatctagctaccggacattacctggccgcagaagtggatcctgatttcgaggaagaatgtctcgaattccagccgtccgttgacccggaccaggatgcttccagaagccggttacggaatgcccaggagaagatggtctattctctggttagtgtgcccgagggtaacgacatttcttcgatttttgagctcgaccctaccacactgcgaggtggagactccctggtgccccggaatagttatgttcggctcaggcatctgtgtaccaacacctgggtacatagtactaacattcctatagataaggaggaggagaagcctgtcatgctgaaaatcgggacttcacccgttaaggaagataaagaggcattcgccatcgttcctgtttcccccgccgaggtgagagatctggacttcgcaaacgacgcgagcaaggtgctgggctcgattgcgggaaaacttgagaaggggacgatcacccagaatgaacgccgtagcgtgacaaaactgctggaagatctggtgtacttcgttaccggcgggactaattccggacaggatgtcctagaagtggtgttctcgaaaccaaatagggaaaggcagaaacttatgcgcgagcagaacatcctcaaacagatcttcaaattactgcaagctccttttaccgattgtggcgatggtccaatgttgaggttggaggaactcggtgaccagagacatgcacctttcagacatatttgtcgcctgtgttaccgtgtattgcgacatagccagcaggactatagaaagaaccaggaatacatcgctaagcagtttgggttcatgcagaagcagattggttacgatgtgctggcggaagatacaatcactgctctgcttcacaataatcgcaagcttttagagaaacacatcacagccgctgagatcgatacttttgtttcccttgtccggaaaaacagagaaccccggttcctggactatctcagtgacctttgcgtgtccatgaataagtctatacctgtcacacaggaactgatctgtaaggctgtattaaaccctacaaacgccgacattcttatcgagaccaagcttgtactgagccgttttgaatttgagggggtaagcagcaccggtgaaaatgcacttgaagctggcgaggatgaggaggaggtctggctgttttggcgcgatagtaacaaagaaattcgctccaaaagcgtgagggagctggcccaggatgctaaagagggccagaaggaggaccgcgacgtcctgtcgtactaccggtaccaactgaatctgtttgccaggatgtgtctggaccgacagtaccttgccataaacgaaatttccggacagttagatgtggaccttatcctgagatgtatgtccgacgagaacctgccctacgacctgagggcatcattctgtcgcttgatgctgcacatgcatgttgatagggatcctcaggagcaagtgaccccagttaagtatgcccggctgtggtctgaaattccctccgagatagccatcgacgattatgattcttcaggtgcttcaaaagacgagataaaagagcgttttgctcagacaatggaattcgtcgaagaatatctgcgtgatgtcgtttgtcagcgcttcccttttagcgataaagagaagaacaagctgacttttgaggtcgttaatctcgctcgcaatctgatttactttgggttctataactttagcgacctgctcaggcttaccaaaattctgctcgccatcttagactgtgtccacgtgacaacgatttttccaattagcaagatggctaagggcgaggagaataaaggttctaatgtgatgaggtctatacatggagtaggcgagctgatgacccaggtagtgttacgaggaggcggctttttgccaatgactcctatggccgctgcccctgaggggaacgttaaacaagctgaacccgaaaaggaagatataatggtcatggacaccaaactgaagatcatagaaattctgcagttcatccttaacgtacggctggattatagaatcagctgcctactttgtatctttaaacgcgagtttgacgagtctaattctcagaccagtgaaactagttccggtaacagtagccaggagggtcccagtaatgttcccggcgctctcgacttcgagcatatcgaggagcaggccgaaggcatctttggggggcgcaaagagaacactccgcttgatctggatgaccatggcgggagaactttcctgcgtgttctcctccatttgactatgcacgactatcctcctttggtttccggtgccctccagctgctatttcgtcatttctcccagcggcaggaagtgctgcaagcctttaagcaagtacagctgttggtaaccagccaggacgtggataactacaagcagattaagcaggatctggatcagttaagatcgatagtggaaaagagcgagttgtgggtttacaagggccagggacctgatgaaaccatggacggcgcaagcggtgaaaatgagcataaaaagaccgaggaaggcaataataagccacagaaacacgaaagcacgtcctcttataactatcgtgtcgtgaaagagattctgatacgcttgagcaaactgtgcgtgcaggaatctgcctccgtgcgcaaaagtaggaagcagcagcagaggctgctgcgaaacatgggtgctcacgctgtggtcctggagctgttacaaatcccatatgagaaggcagaggacaccaagatgcaggagattatgcggcttgcccatgaatttctccagaatttttgtgctgggaaccaacagaatcaagcgcttctacataagcatatcaacctatttctgaacccggggattctcgaagcagttaccatgcagcacattttcatgaataatttccagctgtgttctgagatcaatgaacgggtagtacaacatttcgtgcattgcattgaaacccacggcagaaacgtgcaatatatcaaattcctgcagacaatagtgaaggctgaagggaaattcattaagaagtgccaggatatggttatggccgagctcgtgaatagtggggaggacgtgcttgtgttttataatgacagagcatcatttcagacacttatacagatgatgaggagcgaaagagacagaatggatgagaacagcccgctcatgtaccacatccatcttgttgagttgctcgcagtttgtacggagggcaagaatgtttatactgagataaaatgcaactcattgttgcccctggatgacattgtcagggtcgtgacacatgaggactgtatcccggaggtgaagattgcttacatcaattttctgaaccattgctatgtcgacaccgaggttgaaatgaaagagatctacacttccaaccatatgtggaaactgttcgaaaatttcttggtggatatatgcagagcttgcaataacacaagcgataggaaacatgccgactctatattggaaaaatatgttaccgaaattgtaatgtcgatcgtgactacttttttttcatctccatttagcgatcagtctacaaccctgcagacaaggcagcctgtgttcgtgcagctactccaaggagttttccgggtctaccattgcaactggctcatgccctcgcagaaggccagtgttgaaagctgcattagagttctgagcgatgtggccaaatcccgggccatcgcaataccggtggatctcgattctcaggtgaataatctgtttctgaagagccattcaatcgtgcagaagactgcgatgaattggcgcctcagcgctaggaatgctgcgcgcagagatagtgtgttggccgcgtccagggactacaggaacattatagagcggttgcaggatatagtctcagccctggaggaccgcctgagaccacttgtacaggcagagttaagcgtgcttgttgatgtcctgcaccgccccgagctgttgttcccagaaaatactgatgcccgcagaaaatgtgagagcggcggatttatctgcaaattaatcaaacatacaaagcagctccttgaagaaaatgaggaaaaactttgtataaaggtgttacagacactcagggagatgatgacaaaggataggggctatggagagaagggcgaggccctccgacaggtgctcgttaacagatactacggtaatgtacgaccctccggccggcgggagagtttaacttcctttggcaacggcccgcttagtgccggtggccctggtaagcctggcggtggaggggggggctccggatccagctctatgagtaggggcgagatgtctttggcagaagtccaatgccacctagacaaggaaggcgcatctaacttagtgattgatctcatcatgaacgccagtagcgatagggtcttccacgaatcaatcctcctcgccatcgccttactggaagggggcaacaccacaattcagcattctttcttttgtcggctgaccgaggataagaagtccgaaaagttttttaaggtgttctacgacagaatgaaggtggcccagcaagagattaaggcgactgtgaccgtgaacacctctgaccttggaaataaaaagaaagatgacgaggtagatcgggacgcaccttctcgcaagaaagccaaagagcccaccacgcagataacagaggaggtgagggatcagcttctggaagcctctgcagctacccggaaggctttcaccactttccgcagggaggcagaccctgacgaccattaccagcctggtgaaggtacccaagcaacagccgacaaagcaaaggatgatttggagatgtccgcggtgatcactatcatgcaacctatcttgagatttctacagctgttgtgcgaaaaccacaatcgggacttgcaaaactttctacgatgccagaacaacaagacaaactacaacctcgtctgcgaaaccttgcagttcctagactgtatatgcggaagtactaccggtggcctgggcttgttgggactctacataaacgaaaaaaatgtagcattgatcaatcagacactggagtccctcactgagtactgccagggcccctgccacgagaaccagaactgtatagccacacatgagagcaatggaatcgatatcataacagcccttattcttaacgatatcaacccactcgggaagaagaggatggatctggtgctcgagctcaaaaataacgctagtaagcttctgctagcaatcatggagtctcggcacgacagcgagaacgcagagaggatactgtacaacatgagacccaaggagctagtcgaggtaattaaaaaggcctacatgcaaggggaagtggaattcgaggatggagaaaatggtgaagacggggcagcctcccccaggaatgtggggcacaacatttacatcctggcccaccagttagcaaggcataataaagagctgcaatctatgctcaaacctggcggtcaggtggacggggacgaagcacttgaattttacgcgaagcacaccgctcaaattgagatagtcaggctggaccggaccatggaacagatcgtgtttccagtgcccagtatatgcgaatttctgactaaggagagcaagctccggatttactatacaactgagcgtgatgagcagggctccaagattaacgacttctttctccggtccgaggacctgttcaatgagatgaactggcagaagaagctcagggcacaacctgttctttattggtgtgccaggaacatgagcttctggtctagcatttcgttcaaccttgccgtcctcatgaatttgctggtggcattcttttatccctttaagggtgtgcgcggaggaacccttgagccacactggtcggggttgctttggactgcaatgctgattagtctggcaattgtgattgccttgccgaagccacacggcattcgggctctgatcgcatcgactattcttcgactcattttcagcgttggattgcagccgaccctgtttctgctgggggcattcaacgtgtgcaataagataatctttctgatgtccttcgtcgggaactgcggcacctttacaaggggttacagggctatggttttggacgtagaatttctctatcatttgctttacttagttatttgtgccatgggcctctttgtacacgagtttttctatagtctgcttctatttgacctggtatatcgtgaagaaacactccttaacgtgattaagtcagtgacaaggaacggccggagcatcatcttgacagccgttctcgccttgattctggtttatctgttcagtatcgttggctatctcttcttcaaagacgactttattctggaagtagaccgactccccaacgaaaccgcagtgcctgaaaccggagagtcccttgcttccgaatttcttttttctgatgtgtgtcgggtggagtcaggggaaaattgtagtagccccgccccaagggaagagctggtgcccgcggaggagactgagcaggataaagaacacacatgtgaaacacttttgatgtgcattgttacagtactatcacacggccttcggagtggaggaggcgtcggcgacgtgcttcgcaagccctctaaagaagagccgctgtttgcagcccgggttatttacgatttactgttcttcttcatggtgataataatcgttctcaatcttatttttggtgtcattatcgataccttcgcagatctgcgctctgaaaagcagaaaaaagaagaaatcctgaagacgacatgtttcatctgcggcctagaacgagataagtttgacaataagactgtaacttttgaggaacatataaaagaggaacataatatgtggcattatctatgttttattgtattggtcaaggtgaaggactcaaccgaatacacgggccctgagagttacgttgcagaaatgatcaaggaacgcaacctagactggtttcccaggatgagagctatgtctctggtgtcctcagatagcgaaggcgagcaaaacgagctgcggaacctgcaggagaagctggagagcaccatgaaactggtcaccaaccttagcggtcagctgtctgagttgaaagaccagatgaccgaacagaggaagcagaagcaacgcatcggtctcttgggtcaccctccccatatgaacgtgaatccccagcaacctgcgtag

SEQ ID NO: 120595 - DNA, 3615 bp, synthetic construct
  misc_feature 1..3615: note = Description of Artificial Sequence: Synthetic coding sequence
  source 1..3615: mol_type = other DNA
caggagccaggtcattgtcacagtcgggggccgggtcagccaagccagcagcctctctcgcaggtcccccaacattgtgcggaggcgatgaactggcgcctctctgcaaggaatgccgcccgcagagactccgtgcttgctgctagccgcgattacagaaatattatcgagcgccttcaggatatagtgagtgccttggaggaccgcctgcgccctctagtgcaggccgagctcagtgttttggttgatgtgctgcaccggcccgagttgttgttcccagagaatactgacgcccgccgcaaatgcgagagcggtggtttcatttgcaaattgatcaagcacaccaagcagttactcgaggagaacgaggaaaaactgtgtattaaagtgctgcagactctgagagaaatgatgactaaggataggggctacggggaaaaactcatctcaattgacgaactggacaatgcagaactgccgcctgcacccgactcggaaaatgcaactgaggaattggagccttccccccctttgcgacagcttgaggatcacaagagaggtgaagccctgcgacaggtcctggttaataggtattatggcaacgtcaggccgtctggcaggagagagtcgctcacctcctttggtaacgggcccttgtcagcgggcgggcccggaaaaccaggaggcggggggggcgggagcgggagcagtagcatgtctaggggggagatgtccctggctgaggtgcagtgtcatctcgacaaggagggcgcgtctaacctggttattgatcttattatgaacgccagctctgatcgcgtttttcacgagagtattttgttggcaatcgccttactggaagggggtaatacaaccatccagcacagttttttctgccgtctgaccgaagataaaaaaagtgaaaagtttttcaaggttttctatgatagaatgaaggttgcacaacaagaaataaaggcgacagtaactgttaacactagcgatctggggaacaaaaagaaggatgacgaggtggaccgggacgcacccagtaggaaaaaagcaaaagagcccaccacccagattactgaggaagttagggatcagctcctcgaagcttcagctgctactagaaaggctttcaccacctttcgacgcgaggctgaccctgacgatcattaccagcctggagaaggaacacaggctaccgctgataaggctaaggatgatttagagatgagcgcggtgataactattatgcagcctatcctgagattcctccagttgctgtgcgaaaaccacaaccgcgatctgcaaaattttctcagatgtcaaaataataaaactaactataatcttgtgtgcgagaccctacaatttctcgattgcatctgcggatcgaccactggcggactcggtctgctgggattgtacattaacgagaaaaacgtcgccctgatcaatcagactctcgaatccttaactgagtactgtcaaggaccttgtcatgagaatcagaattgcatcgctacacacgagagcaacggtatagacatcatcactgcactcatcctcaacgatattaacccccttgggaagaaaaggatggacctcgtcctcgagttaaagaataacgcctctaagttgctcctcgcaataatggagagcagacacgactcggaaaacgcggagagaattttgtacaatatgaggccgaaagagctcgttgaggtgatcaaaaaagcctatatgcagggagaagtggaatttgaagatggggagaacggagaggacggtgcagcaagtcctaggaacgtcggccacaacatttacattctcgcccatcaacttgcaagacataacaaggaactgcagtctatgttgaagccgggcggtcaggtcgacggagatgaggctctcgagttttacgcaaagcatacagcccaaatcgaaatcgttcgactggacaggacaatggagcagattgtgtttccggtgcccagtatatgtgaatttttgactaaagaatccaagttgagaatatattataccactgagcgggacgagcagggtagcaagatcaatgactttttccttcggtccgaggacctcttcaatgagatgaactggcagaaaaagctgagggctcaaccagttctctattggtgcgcacgaaatatgagcttttggagctctatctcattcaatctcgccgtgctcatgaacctgttggtcgcctttttctacccatttaagggagtgagaggcggtactttggaacctcactggtcgggcctcctatggactgccatgctcataagtttagctatcgtaattgccctgcccaaacctcacggcattagggccctgatcgccagcactatactccgactgatcttctcagtggggctgcagcctactctattcctattaggcgcctttaatgtgtgcaacaagattatttttctaatgtcctttgtggggaactgtggtacctttactcggggctacagagcgatggtgctcgatgtggaatttctctatcatctgctttatctcgttatctgcgccatgggactcttcgtgcatgaattcttctattccttattactttttgaccttgtgtacagggaggagaccttgctgaacgttataaaaagtgtgacacggaatgggagatccatcattttgaccgctgtgttggcactgatcctggtgtacctgtttagcatcgtaggctatttgttcttcaaggacgatttcatcctggaggtggaccgccttcccaacgagaccgcagtaccagagaccggagaaagcctagcaagcgagtttctgttttctgatgtgtgcagagtggaatcaggtgagaattgtagctccccagcccctagagaggaactggtgcccgccgaagagactgagcaggacaaagagcatacctgcgagacacttcttatgtgtattgtgacagtgttgagccacggactgcgatccggaggcggagtaggggatgtcctgcgcaagccgtcaaaggaagaaccgctgttcgctgccagggtgatctatgacttgctgttcttctttatggtgattattatcgtgttgaacctgattttcggagtgatcattgatacatttgcagatctacgttctgaaaaacagaaaaaagaggaaatccttaagactacctgcttcatctgcgggctggaacgagacaagttcgacaataagaccgtaaccttcgaggaacatatcaaagaggagcacaatatgtggcactatttatgttttattgtcctcgtgaaagtcaaggacagcacagagtacacaggcccagaatcatatgttgccgagatgataaaagagcgcaatctagactggttcccacggatgagagcgatgtctttagtgagttccgattccgaaggtgagcagaatgagcttcgcaacttgcaagagaaactcgagtccacgatgaaacttgtgacaaatctgtcaggccaactctccgagctgaaggaccagatgaccgaacagagaaaacagaagcaacggatcggtttgcttggccacccgccccacatgaacgtcaatccacagcagcccgcttag

SEQ ID NO: 120596 - DNA, 8232 bp, synthetic construct
  misc_feature 1..8232: note = Description of Artificial Sequence: Synthetic coding sequence
  source 1..8232: mol_type = other DNA
atgagtgataaaatgagtagttttttacatattggagatatttgttccctgtacgccgaggggtctactaatggcttcatcagcaccctcggactggtcgatgaccgatgtgtagtccagcctgagacaggtgatcttaacaacccacctaaaaaatttcgcgactgcttgtttaagctgtgccctatgaacaggtattctgctcagaaacagttctggaaagctgccaagccgggcgcaaatagtacaacggatgctgtgctcctgaataagttacaccatgccgccgatttggagaaaaaacagaacgagaccgaaaaccggaaattgcttggcaccgtgatccagtatggaaatgttattcagctactccacctgaagagtaataagtacttgactgttaataaacgattgcctgctttgcttgaaaagaatgccatgagagtaactctagacgaagccggcaacgaggggtcgtggttctatattcagcccttttacaaattgaggtcaataggagattcggtggtgattggagataaggtagttttgaatcccgttaatgctggtcaaccactccatgccagctctcaccagctcgtggataacccgggctgcaatgaggtaaatagtgtcaattgcaataccagctggaagatagtgctattcatgaagtggtctgacaacaaggacgacattctgaagggcggcgacgtggtgagactattccacgcagagcaggaaaaattcttgacctgcgacgagcataggaagaagcagcatgttttcttgcgtacgaccgggagacagagcgctacaagcgccactagctcaaaggccctgtgggaggtggaggtggtccagcatgacccctgccgcggcggtgccggatactggaattcactattccgattcaagcacctggccacaggccactaccttgccgcagaagtggacccagatcaggatgcctctagatccagacttagaaacgcccaggagaaaatggtgtattctcttgttagcgtaccagaaggtaatgatatctcttctatctttgagcttgacccaacaacactgcgtgggggcgactcattagtacctcgtaactcttatgtgcgactgcgccacctgtgcaccaatacatgggtgcactctaccaacattccgatcgacaaagaggaggagaaacccgtgatgctcaagataggtacctcaccagtcaaggaggacaaagaggcctttgccatcgtccctgtgtcgcccgccgaggtgagggatctcgattttgcaaatgacgcttccaaagtgctgggtagcatcgctggcaaactggaaaaggggactattacacagaacgagaggaggtcagtcacaaaactgctggaagatcttgtttattttgtaaccggggggaccaactctgggcaggatgtgctggaagtggtcttctccaagcccaatagagagcgacagaaactgatgagagagcagaacattcttaagcaaatctttaagctgttgcaggcaccgttcaccgactgcggcgatggtcctatgcttagattagaggaattaggtgaccagcgccatgcaccatttcgccacatttgccggttgtgttaccgcgtgcttagacatagtcagcaagactatcgtaaaaaccaagagtatatcgctaagcaattcggttttatgcagaagcagatcggttacgatgttttggccgaggataccattaccgctctgcttcacaacaaccgtaagctgctcgaaaagcatataaccgccgctgaaatagatacttttgtttcccttgtaaggaagaatagggagccacgtttcctggattatcttagtgacctctgcgtgagcatgaataaatctattcctgttacacaggagctcatttgcaaagccgtgctcaacccaaccaacgccgatattctgatcgaaactaaactcgtgctgtctaggtttgagtttgagggcgtcagttctactggggagaatgctttggaggcaggcgaagacgaggaagaggtatggctcttctggagggacagcaacaaagaaatccggagtaaatcagtgcgtgaactggcccaagacgctaaggaaggtcagaaggaggaccgtgacgtgctctcttattatcgataccagctgaacctgtttgcgcggatgtgcctggataggcaatatttggccatcaatgagatctcgggtcagctggatgtcgacctgattctgagatgcatgtccgatgagaacttgccgtacgatctgcgcgcaagcttttgcagactgatgctgcacatgcatgtcgaccgagacccacaggagcaggtaactcctgtgaagtacgcgaggctctggagtgagataccctctgagattgccatcgacgattacgattcaagtggggcaagcaaagacgaaatcaaggagcggttcgctcagaccatggagttcgtggaggaatacttaagagatgtggtctgccagcgcttcccatttagcgataaggagaagaacaaacttaccttcgaggtagtgaatttggcacgcaatctgatctacttcggtttttacaatttctctgacctgcttagattgacaaagattttacttgcgatcctggactgtgtgcatgttacgactatatttccgattagcaagatggccaagggggaggagaataagggaaacaacgacgtggaaaagttaaaatcttcaaacgttatgagatctattcacggagtgggagagctaatgacacaagtggttctcagaggaggcgggttcctgccaatgacgcctatggctgcggcacctgagggcaatgtcaagcaagccgagccggagaaggaggacattatggttatggatactaagctgaaaattatcgagattttacagttcattttaaatgtgcgactggattaccgtatctcctgcctgctgtgcattttcaaaagagaattcgacgaatcaaacagccagaccagtgagacctcttcgggaaatagttcacaggaaggaccttcaaatgtccccggagcactcgactttgaacatattgaggaacaggctgaaggtatattcggagggtcagaagagaatacacccctagatttggacgatcatgggggcaggacctttctgagagttcttcttcacctgacaatgcatgattaccctcccctcgttagcggcgccttgcaacttcttttcagacatttttcccaaaggcaggaggttctgcaggctttcaagcaggtgcaactgcttgttacatctcaggacgtcgacaactacaagcagatcaaacaggatcttgatcaactgcgctccatagttgagaagtccgagctatgggtgtataaaggccaaggccctgatgagactatggacggggctagtggcgaaaacgagcacaagaagaccgaagagggcaataacaagccccagaaacacgagtctaccagttcttacaactaccgtgttgtcaaggagattctcattaggctcagtaagctttgcgtgcaggagtccgccagcgtccggaagtcccgaaaacagcaacagcgtctccttcggaacatgggggcacatgccgtggtgctagaactattgcagatcccatatgaaaaggcggaagacaccaagatgcaggagatcatgcgattggcccacgaattcctgcagaacttttgcgccggaaaccagcagaaccaggccctcctacataaacacatcaatctgttcttgaatcctgggatcctggaagcagtgaccatgcaacacatcttcatgaacaacttccagctgtgctccgagattaacgagagggttgtccagcactttgtccactgcattgagacacacggccgtaatgtgcagtatattaaatttttacaaaccatcgttaaggcagagggaaaatttattaagaagtgccaggatatggtgatggccgagctagtgaactctggggaggatgtgctggtgttctataatgacagagcaagcttccaaactcttattcagatgatgaggagcgagagagatagaatggatgagaattcccctctgatgtatcatattcacctggttgagttactggccgtttgcaccgaggggaagaatgtttacacagaaatcaaatgcaatagcttgttaccgttagatgatattgtccgagtggtgactcacgaggactgcattccggaggtcaaaatcgcctacatcaatttcctcaatcattgttatgtagacacagaggttgaaatgaaagaaatttacaccagcaatcacatgtggaagctgttcgagaatttccttgtcgatatttgtagagcatgcaacaatacaagcgacagaaagcacgccgacagtattctagaaaaatacgtgaccgaaatagttatgtccattgtgaccacgttcttctcaagtcccttctctgaccagagcacaaccttacagacccgacagcccgtctttgtgcagctcctgcagggcgtgtttcgtgtttatcactgcaactggctgatgccctctcagaaggccagtgtggaaagttgtattcgtgtgctgagcgacgttgccaaatctcgcgcaattgcgatcccagtggacctggacagccaggttaataacctctttcttaagtctcatagcatcgtgcaaaagactgccatgaactggcgactttcagctcgcaacgccgcaagacgggatagtgtcctcgcagcttctagggactacagaaatatcattgagcggctgcaggatattgtatccgcgctggaggatcgtctgcgaccactggtccaagctgaactttcggttcttgtggacgttcttcaccgaccagagctgctctttcccgaaaacaccgatgcccgcagaaaatgcgaaagtgggggttttatttgcaagcttattaaacataccaaacagctactagaagagaatgaagagaagctatgcataaaggtgttacagacactgagggaaatgatgacaaaagatagaggctatggagagaaactgatctctatcgatgagctggataacgccgagttgccaccagcccctgactcagaaaacgccacagaggagctggagccgtctcccccactccggcagctggaagaccataagcggggtgaggcgctgcggcaggtgctggtcaacagatattatggaaatgtacggccctcgggaaggcgagagagcttgacatccttcggcaatggccccctgtctgctggaggccctggaaaaccaggaggggggggcgggggttctgggtcgtctagtatgtccaggggcgaaatgtctctggctgaagtccagtgtcatctggataaggaaggtgctagcaacttagtcatcgacctaatcatgaacgcttcatccgatcgggtatttcacgagagcatattgttggccatcgccttacttgaggggggcaatactaccatccagcactcatttttttgcaggctcacggaggacaaaaagtccgaaaaattcttcaaggttttctatgacaggatgaaggtggcacaacaggagattaaggcaacggtgacagtgaacacaagtgacctgggcaataagaagaaagacgatgaggttgatcgggatgctcccagcaggaagaaggcaaaggaaccaaccactcagataaccgaggaggtgcgcgatcagctcctagaggcctccgcggctacccgaaaggccttcaccacgttcagacgggaggctgacccggacgaccactaccagccaggtgagggtacacaagctacagcggacaaagccaaagacgacctggagatgtctgcagttattacaattatgcagccgatcttgcgcttcctccagctgctgtgtgaaaaccataaccgggatctccaaaactttctcaggtgtcagaacaacaaaactaactacaatcttgtgtgcgagacccttcaatttttggactgcatctgcggttccacgactggaggtctgggcctcctgggactgtacatcaacgaaaaaaatgtcgccctgatcaatcagaccttggagagcttgaccgagtattgccagggaccatgccacgaaaatcagaattgcattgccactcacgaatcgaatggtattgatattatcaccgctctgattctcaacgatatcaatcctctgggaaagaagaggatggacctggtgctcgagctcaagaataacgcatcaaagttgctcctcgcgataatggaatctaggcacgattcggaaaacgcagagcgtatcctttataatatgaggccgaaagaattggtcgaggtgataaaaaaggcctatatgcagggcgaggtagagtttgaggatggcgaaaatggagaggatggagcggcatctccacggaatgtagggcacaacatctatatactcgcacaccagctggccaggcataataaggagttgcagtcaatgctgaaacccggtgggcaggtcgatggcgatgaggccctggagttctacgccaagcacacagcccaaatcgaaattgtgcgccttgatcgcacaatggagcagattgtcttcccagttccctctatctgtgaattcctgaccaaagaatcaaaacttcgtatctactacaccacagagagggacgagcaggggtccaaaatcaacgacttctttttgcgctcagaggacctgttcaatgagatgaactggcagaagaagcttcgcgcacagccagtcctgtattggtgtgcccgaaacatgtcgttctggtctagtataagctttaatctcgcagttttgatgaacctcctggtcgctttcttctaccctttcaaaggtgttcgggggggaacccttgaaccacactggtccgggttactatggaccgctatgctgatttctctggccatcgtaatcgctctgccaaagcctcacggaatacgtgctctcatcgcttccaccatcttgcgcctgattttttcggtcggcctgcaacccaccctgttccttctgggcgcattcaacgtttgcaacaagatcattttcctcatgtcgttcgtgggcaattgtggcaccttcacccgaggttatagggcaatggtgctggacgtggagttcctctatcaccttctgtacctcgtcatttgcgccatggggctcttcgtccatgagtttttctacagcctgttgctcttcgatcttgtctacagagaggagacccttttgaacgtcattaagtctgtgactagaaatggacggagcattattctgacagccgtgctggcactgattctggtgtacttgttctctattgtcggctatctcttttttaaagacgactttatactagaagtcgatcgcttacctaacgaaactgcggtgcctgagacgggggaatcattggcaagtgaattcctgttttctgacgtatgtagagtcgagagcggcgaaaactgtagctccccggctcctagagaagaattggttcctgcagaggaaaccgagcaggataaagaacatacatgtgagactcttctgatgtgcattgtgacagtgctgtcacacgggctaaggtccggcggaggtgtcggggacgttcttagaaaacccagtaaagaagagccactgttcgctgcccgcgtgatatacgaccttctgttcttcttcatggtgatcataatagttctcaatcttatcttcggagtgataattgacactttcgctgatctgcgctctgagaagcaaaagaaagaggaaattcttaaaaccacttgttttatttgcgggcttgagagggataaattcgacaataagaccgttacttttgaggagcacattaaggaagaacacaacatgtggcactacctttgcttcatcgttctggtgaaggtgaaggattccaccgaatatacagggccagagtcgtatgttgccgagatgatcaaagagcgaaatttggactggtttccccgcatgagggccatgtcactggtgtcatcagactccgaaggcgagcaaaacgaactaaggaatctgcaggaaaagctagaatcaaccatgaagctggttaccaatctctccggtcagctaagcgagctaaaggaccaaatgaccgagcagcggaagcagaagcagagaatcggcctgctggggcaccccccacatatgaacgtcaatcctcagcaacctgcgtag

SEQ ID NO: 120597 - DNA, 8088 bp, synthetic construct
  misc_feature 1..8088: note = Description of Artificial Sequence: Synthetic coding sequence
  source 1..8088: mol_type = other DNA
atgagcgataaaatgtcatcttttctacacattggggacatttgctctctctatgcggaaggcagtacaaacgggttcatcagcactttaggacttgtggacgataggtgtgttgtgcagcccgagactggcgatcttaataatccccccaagaagttccgtgattgcctgttcaagctctgtcctatgaataggtactccgcccaaaagcagttttggaaggctgccaaacctggcgccaattctacaactgacgccgtcctgttgaacaagctccaccacgcagctgacctggaaaaaaagcagaatgaaacagaaaaccgaaagctcctgggtactgtgatccagtacgggaatgtgattcagctccttcacctcaagagtaacaaatatctgaccgttaacaaaagattacctgcgctactcgagaaaaatgcgatgagggtgacacttgatgaagcaggtaacgagggctcatggttctatatacaaccattctacaaactcagatcgataggagatagcgttgttatcggagacaaagtggtccttaatcccgtaaatgcaggccagccactgcatgctagctcacaccagctggtcgataatcccgggtgcaacgaagtaaactcagtgaactgtaacacttcctggaagattgtgctttttatgaagtggtctgataacaaagatgacatcttgaagggaggggacgtggtgcgcctgttccacgctgaacaggagaaatttctgacttgtgatgaacacaggaaaaagcagcacgtcttcctgcggacgaccgggcgccaaagcgccacgtccgctacttcaagcaaggctctgtgggaagttgaggtggtgcagcacgacccctgccgaggtggggccggctactggaacagcctttttcgcttcaagcacctggctaccgggcactatctggccgccgaagtcgatccagatcaagacgcctcaaggtctcgtctgcggaacgctcaggagaagatggtttactcactggtgtcagtgccagagggtaatgatatcagttcaatattcgagctcgacccaaccactctgagagggggcgactcactggttcctcgaaacagctacgtgagactgcggcacctatgcaccaacacttgggtgcactcgaccaatataccgatcgataaggaggaggagaaaccagtcatgcttaagatcggcacctcacccgtcaaggaagacaaggaagcattcgcaatagtgcccgtatctcctgctgaagttcgggatcttgatttcgccaatgatgctagcaaggtcctgggctcaatcgctgggaaactggagaaagggactattacacagaacgagcgccggtccgtgactaagctgctcgaagacctggtgtacttcgtgacaggcgggaccaactctggccaggacgtcttagaagtggtgttttcaaagcccaatagagaaagacagaaactgatgagggagcagaatatcctgaagcagatctttaagctcttgcaggcaccctttaccgactgcggcgacggacctatgcttaggttagaggagctcggtgatcagagacacgcgccatttcgccacatatgcaggctctgctatagagtccttcgccatagccagcaggattatcggaaaaaccaggaatatattgccaagcaattcgggttcatgcagaagcagatcgggtacgacgtattggccgaggatacaattacggcactcctgcacaataaccgaaaacttttagaaaagcatatcaccgccgccgagatcgacacatttgtctcattggtgcgtaagaatcgagagcccagattcctggactatctgtctgatctctgcgtctccatgaacaagagtatccccgttacacaggagctgatttgtaaggctgtcctgaacccaacaaacgcagatatccttatcgaaactaaactcgtgctgagtcgcttcgagtttgagggcgtgagcagcacaggcgagaatgctctggaggctggcgaggatgaagaagaggtttggctgttttggagagattccaacaaggagatccgctccaaatccgtgagggagttggcccaggatgcaaaggaaggtcagaaggaggatcgggatgtgttgtcgtattatcgctaccagctgaatctcttcgccagaatgtgtttagatagacagtacttagccatcaacgaaatctcaggccaactggacgtggatctgattctccgatgtatgagcgatgaaaacctaccatatgacctacgtgcgtctttttgtcggcttatgctgcatatgcacgttgacagggatccccaagagcaggtcacaccagtgaagtatgctagactgtggagcgagattccatcagagattgctatcgacgactacgatagctccggcgcttctaaagacgaaatcaaagagcggttcgcccagacaatggagtttgttgaggagtatcttagggatgttgtctgccagcgctttccattttccgataaagaaaaaaataagttgacattcgaggtggttaacttggctcggaacctcatctatttcggtttctacaatttcagtgacctacttaggctgactaagatattattagctatacttgactgcgttcacgtgactactattttccctatcagtaaaatggctaagggggaggagaataaaggatcaaatgttatgaggtctattcacggtgttggagaacttatgacacaagttgtgctgcggggcggagggtttctgccaatgactcccatggctgcagccccagaagggaatgtgaagcaggcggaacccgaaaaagaagatattatggtgatggacacgaaattaaaaataatcgagattttacagtttatcctcaacgtccggctcgactaccgtatctcttgcttgctgtgcatttttaagcgagaatttgacgaaagcaactctcaaacttccgaaaccagctccggtaattccagtcaggagggtccatcaaatgtgcctggcgctctggactttgagcacattgaggagcaggcagagggcatcttcggcgggagtgaggagaacaccccactggatctggatgatcacggtgggcgcacgtttctcagagtcctcctacatctgaccatgcacgattatccaccacttgtttccggtgctttgcaattgctgtttcggcactttagccagagacaggaggtactgcaagcttttaagcaggtacagctcctggtaacctcccaggacgtagataattataagcagataaaacaagatctagatcagcttaggtccatcgtggagaagtccgaactctgggtctacaaaggccagggccctgacgagacaatggatggggcttccggggaaaatgagcataagaaaactgaggaagggaataataaaccgcagaaacatgagtcaacctcaagctacaattaccgagttgtgaaagagatcctgattcggctgtcaaaactctgcgtgcaggagagcgcatctgtccgcaagtcccggaagcaacaacagcgcttgcttcggaatatgggagcccacgccgtggtcctggagttgctgcagattccatatgagaaagccgaagatactaagatgcaggaaatcatgagactcgctcatgaatttcttcagaacttctgcgctgggaaccagcagaaccaggctctcctccacaaacatatcaacctgttcctgaaccctggtattttggaagctgttacgatgcagcacatttttatgaataactttcaactctgcagcgaaattaacgaaagggtggtgcaacatttcgttcactgcattgaaacccacggccgcaacgtgcagtatataaaatttctacagactattgtcaaagccgaaggtaaatttataaagaaatgtcaggacatggttatggctgaactcgtaaattccggtgaggacgttctcgttttctacaatgatagagcaagctttcagacgctgatccagatgatgcgctcagaaagggacagaatggacgaaaactctccattgatgtatcacatccatctggtcgagctccttgcagtgtgtacagagggaaaaaacgtgtataccgaaattaagtgcaattctttgttgccccttgatgacatcgtccgcgtagttactcacgaagactgtatccccgaggtaaagatcgcctatatcaacttcctcaatcactgctatgtcgatacggaagtggagatgaaggagatctacacatccaatcacatgtggaagttgttcgagaatttcctggtggatatatgcagggcttgcaacaacacatctgatcgaaagcacgctgatagtatcctggagaaatatgttacagaaatcgtgatgtcaatagtgacgacttttttcagcagccccttcagtgatcagagcaccaccctgcagactaggcaacctgtgtttgtgcagctgctgcagggcgtctttagagtgtaccattgtaactggctgatgccaagccagaaggcgtcggtcgaaagttgtattcgggtcctctctgacgtggctaagagcagagcaatagcgataccggtggacttggactcccaggttaataatctgtttctaaagagtcacagtatcgtccagaagactgcaatgaactggaggctcagtgcgcggaatgctgcccggcgagattcagtcttggcggcctccagggactatagaaatattatcgagagactccaggatattgtgagtgccttggaggaccgcctccggccactcgtccaggcagaactgtccgtgctggtagatgtgctgcaccgtccggagctcctgttcccagaaaacactgatgccagacgtaaatgcgagtctggtggattcatctgcaagttgattaagcacacaaagcagctcctcgaggaaaatgaagagaagctgtgtatcaaggtcctgcagaccctccgagaaatgatgaccaaagatagaggctatggcgagaaaggtgaagctttgaggcaggtcctggtcaaccgatactacgggaacgttcgcccatccgggcggcgggaaagtctgacttcctttggcaacgggcctctgtccgcaggagggcccggcaagcccgggggcggtgggggaggctcgggatcctcctcaatgagcaggggcgagatgtcactcgctgaggtccagtgccacctcgataaggagggcgccagtaacctagtaattgatctgataatgaacgcctcctccgacagagtcttccacgagtctattctgttggctattgctcttctggaagggggcaatacaacaattcagcattcatttttctgtcgtctcaccgaagacaaaaagtctgaaaaattcttcaaggtcttttatgaccgtatgaaggtagcccagcaggagattaaggccactgtgacagtgaacacttccgacctgggcaacaaaaagaaggatgacgaagtggacagggacgcaccctctcgtaagaaagccaaggaacctactactcagatcacagaggaggttagagatcaactgctagaagcatccgcagcaacccgcaaagcgtttactaccttccgtagagaagccgacccggacgaccactatcagcctggggaaggcacgcaggcaactgccgataaagccaaagatgaccttgaaatgtccgcagtaataacaataatgcagcccatcttgaggtttttacagctgctatgcgagaatcataatagagacctccagaatttcttgaggtgtcagaataataaaacaaactataatttggtgtgcgagacactgcagttcctggattgtatctgtggctccacaacaggtggactaggtctgctcggcctttacataaacgagaaaaacgtagcactcattaatcagactctggagagcctcacagagtactgccagggcccttgccatgaaaaccagaactgtattgctacacacgagtctaacggaatcgatatcatcacggccttgatcttgaatgatattaatcccctgggaaagaagagaatggacttggttctcgaattaaaaaataacgccagtaagctgctgctcgccatcatggaatccaggcacgattccgagaacgcagagagaatcctttataacatgcggcccaaggagctggtggaggtgattaaaaaggcctatatgcagggagaagttgagtttgaggacggtgagaatggagaggatggcgcagcaagtccaaggaacgtggggcataatatctacatcctggcacaccagctggccagacacaacaaagagctgcagagcatgctcaagccaggcggccaggtggatggtgacgaagctctcgaattttacgccaagcataccgcacagattgaaatcgtgagattggaccggacaatggagcagatagtttttcctgtcccttctatctgcgagttcctcactaaggagtcaaagctaagaatttattataccactgaacgggacgagcaaggatctaagattaatgatttcttcctgcgctccgaggacctgttcaacgagatgaactggcagaagaagctccgggcccagcccgtcctgtactggtgcgcaaggaatatgagcttttggagctcaatttcattcaaccttgccgttctgatgaatcttctcgtcgcttttttctatccgttcaaaggggtgcgcggcgggacgctcgagccacattggtccgggctgttgtggacggccatgctgatttctctggccatagtcatcgcgcttcccaaaccccacggaatcagagcactgatcgcttccaccattcttaggttaatcttttctgttggcttacagccgaccttattcctgctgggagcatttaacgtttgtaataaaatcatctttctgatgagctttgtgggtaattgcggcaccttcactcggggctaccgggccatggttctggacgtcgagtttttgtatcacctgctgtaccttgtcatctgtgctatgggcctgtttgtacatgaatttttttattccctgttacttttcgacctggtgtaccgggaagaaacactcctaaacgtcattaagtcagtgaccagaaacggacgttccatcatcttgaccgctgtcctcgctttaatcttggtgtacctcttcagcattgtcggttaccttttcttcaaggatgatttcatcctggaggtggaccgcctgcctaatgaaactgcagtgcctgaaaccggggagtccttggcctccgagtttcttttttccgatgtctgcagggtcgaaagtggcgaaaattgcagctcacccgccccacgcgaagaacttgtgccagccgaggagactgagcaggacaaggaacacacgtgcgagaccctcttgatgtgcatagtgaccgtgctgtctcatgggctacgatctgggggcggcgtcggcgatgtgctgcgaaaacctagcaaagaagaaccgctgttcgcagctagggtgatctacgatttattatttttctttatggtgatcataatcgtgctcaatttgatcttcggggtgatcattgatacgttcgccgacctgaggtccgaaaaacaaaaaaaagaagagatcctgaaaacgacgtgtttcatctgcggcctggaacgggataagttcgataataagaccgttaccttcgaggagcacattaaagaagaacacaatatgtggcactacctgtgtttcatcgtgctggtaaaggttaaagatagcactgaatacacgggcccggagagctatgttgccgaaatgatcaaggagcggaatctggactggtttccccggatgcgggccatgagcctcgtgagcagtgattctgaaggcgagcagaacgagctccgtaatcttcaggaaaaactcgagtctacaatgaaactcgtgaccaacctgtctggtcagcttagtgaattgaaggaccaaatgactgagcagcggaaacaaaaacagcggattggactgctaggacatcctccccacatgaatgtgaatccgcagcagcctgcctag

SEQ ID NO: 120598 - DNA, 2166 bp, synthetic construct
  misc_feature 1..2166: note = Description of Artificial Sequence: Synthetic coding sequence
  source 1..2166: mol_type = other DNA
atgtctgataaaatgtcatcatttctccacatcggggatatatgctcgttgtacgctgaaggcagcacaaacggctttatttcaactctagggcttgtggacgataggtgtgtggtgcagccagaaactggtgatctgaataatccacctaaaaagtttcgagactgcctttttaagctttgtcccatgaatcgctatagtgcacagaaacagttctggaaagccgctaaacctggcgcgaactctaccaccgacgcagttttacttaataagctgcaccacgccgcagatctggaaaagaaacaaaacgagaccgagaatcggaagctgctcgggaccgtcatccaatacggaaacgtcattcagttgctgcatttgaagtctaacaagtatttgactgtgaataagagactcccagctctgctggagaagaatgccatgagggttactttagacgaagctggcaatgagggctcctggttttatatacagccgttttacaagctgaggtctatcggcgattctgtagtgataggcgacaaagtggtgctgaaccccgtgaacgctggacagccactgcatgcctcttctcaccagcttgtggataacccgggatgtaatgaggtgaattctgtgaactgcaacacctcgtggaaaatagtgctgtttatgaagtggagcgataataaagatgacattcttaagggcggggacgtagtgcggcttttccacgccgagcaagagaaattcctcacatgcgacgaacataggaagaagcagcatgtttttctgagaaccacaggtcgccagagcgccacatcagctaccagctccaaggccctgtgggaggtcgaggtggtccagcacgatccatgtagaggaggtgctggttattggaacagcctgtttcgcttcaaacaccttgcaaccggccattacttggccgctgaggttgaccccgattttgaggaggagtgcctggagtttcagccctctgtatgtaacaagataatctttctcatgagtttcgttggcaactgtggtacatttacccgggggtacagagcaatggtgctcgacgtcgagtttttataccacctgctctaccttgttatctgtgctatgggactgtttgtgcacgaatttttttatagtcttctcttgttcgacctggtatacagggaggaaacgctgctgaacgtgataaagtcagttacccgaaatggccgcagtattattttgacggccgtgctggctctcatattggtgtacctattttcgatcgtgggctatttgttcttcaaggatgatttcatcttagaggtggaccgtcttccaaacgagaccgcagtgcctgagaccggggaaagcctggcatccgagtttctgttttccgacgtctgtcgggtggaaagcggtgagaattgcagttctcccgcgccccgggaagagctggtaccagcagaagagaccgagcaggataaagagcatacctgtgaaacactgctcatgtgtattgtgactgtcctgtcccatgggctgaggagtggcggcggagtaggcgatgtgctacgcaaaccgagcaaagaggagccacttttcgcggctcgagttatttatgatcttctgttttttttcatggtgatcatcatcgtactgaaccttattttcggtgtgatcatcgatacatttgccgatctccgctctgagaaacaaaagaaggaagagattttgaagaccacatgttttatctgcggccttgaaagagataagttcgataataagacagtgacgtttgaagagcacatcaaagaagagcataacatgtggcactacttatgcttcatcgttctagtgaaggtaaaagactctactgagtataccggtccggagagttacgtggcagagatgatcaaggagcggaatctggattggtttccccgaatgagagctatgagtttagtgtcatctgattccgagggtgagcagaacgagctgcgcaatttgcaagagaaattggagagtacaatgaagctagtaaccaatctgagcggacagttgagcgaactgaaagaccagatgactgagcaaaggaagcaaaaacagagaatcggcctgctggggcatccccctcacatgaatgtgaatccacagcaacctgcctag

SEQ ID NO: 120599 - DNA, 546 bp, synthetic construct
  misc_feature 1..546: note = Description of Artificial Sequence: Synthetic coding sequence
  source 1..546: mol_type = other DNA
atgacagagaaaatgtctagctttctatatatcggagatatagtctcgctgtatgcagagggtagcgtgaatggcttcatttccacactgggacttgtggacgatcggtgtgttgtgcatcctgaagccggtgacctagctaaccctcccaagaaatttagggattgcctattcaaagtttgcccaatgaatcggtattctgcccagaaacagtactggaaggcaaagcaggccaaacaggggaatcatacagaggccgcgttgctgaagaaacttcagcacgccgctgagttagaacagaaacaaaatgaaagtgagaacaagaagctgctcggagaaatagtgaagtattcgaacgttattcaattgctgcatattaagagcaacaaatacctgacagtcaacaaaaggctaccggcgctgctggagaaaaacgccatgagagtttccctcgatgccgctggaaatgagggcagttggttctatattcatcccttctggaagctgaggtccgagggtgacaatgatgcgagcttttggatctag

SEQ ID NO: 120600 - DNA, 8106 bp, synthetic construct
  misc_feature 1..8106: note = Description of Artificial Sequence: Synthetic coding sequence
  source 1..8106: mol_type = other DNA
atgacggaaaaaatgtctagctttctgtatattggggacatcgtatctctgtacgcagagggctcggttaatggatttatctccaccctcggactggtggatgatcgatgtgtcgtccatcccgaggcaggggatctcgccaacccccccaagaagttcagagactgcctgtttaaagtgtgtccaatgaacagatattctgctcagaaacaatactggaaggctaagcaggctaaacaggggaaccatacagaggctgcactacttaagaagctgcagcacgccgccgaactggagcaaaaacagaatgagtccgaaaataaaaagctacttggcgagatcgtgaaatactccaacgttatccagctccttcatattaagtccaacaaatacctgacggtgaataagaggttgcccgccttgctggagaagaatgctatgcgtgtgtctttggatgctgccggcaacgagggtagttggttttacattcacccattttggaagctacgctctgagggggataatatcgtagtcggagacaaagtcgtgttgatgcccgtcaatgctggtcagcccctgcatgccagcaatatcgaactgctggacaatcctggatgtaaggaagtaaacgctgtgaactgcaacacctcatggaagattactttattcatgaagtacagttcctacagggaggacgtgcttaagggcggagatgtagtgaggctattccatgctgaacaagaaaaattcctgacttgtgacgagtatgagaagaaacagcatattttcctgcgtacaacgctccgtcagagcgccacaagtgctacctcatctaaggccctgtgggagatcgaagtagtccaccacgacccatgccggggaggggccggccagtggaattccctgtttcggtttaagcaccttgcaactggaaactacctggcggccgagctgaatcctgattatcgggatgcacaaaacgaaggcaaaaatgtgcgggacggagtaccaccgacttctaagaaaaaacgccaagctggggagaagataatgtatacgctggttagcgtgccccatggtaacgatattgcctctctgtttgagctggacgccacaacacttcagcgcgcagactgcctggtacctagaaacagctatgtcaggctgaggcacctctgcacgaacacatgggtaaccagtacttctattcctattgataccgatgaggaacgtcccgtcatgctaaagataggtacctgccagaccaaggaagacaaggaagccttcgcaatagtgagcgtgcctttgtccgaagtccgggatctggatttcgccaacgatgcaaacaaggtgctggccaccactgtgaaaaaactggagaatggcacaatcactcagaacgagagacggtttgttacaaagctcctggaggatctaatcttcttcgttgcagatgtgccaaacaatggacaggaggtcttagacgttgtcataactaagccaaatcgcgaacgtcagaagcttatgagagagcagaatatcctggcacaggtgttcgggatcttgaaagcacctttcaaagagaaagccggcgagggcagcatgttgcgtctggaggacctgggcgaccaaaggtatgccccttataagtacatgttgcgactttgttaccgcgttctcagacattcgcagcaagattatagaaagaaccaagaatacatcgccaagaacttttgtgtaatgcagtcgcagatcggctatgacatactcgcggaggatacaatcaccgcactgctacataataaccgtaagctgctggagaagcacattacagctaaagaaatcgagacttttgtgtccctcctccggaggaatcgggaaccaagatttttggactacctgtctgatctatgtgtttccaacacaacagcgatcccagtaactcaggagcttatctgtaagttcatgctgagccctggcaatgccgatattttgatacagaccaaggtcgtatctatgcaggcagataatccgatggagagttccattctgagtgacgatatagacgatgaggaagtgtggctctactggatcgacagtaacaaagaacctcacggcaaggctataagacatctggctcaggaggctaaggagggcacaaaagcggatctggaagtcctcacctactaccgctaccagctcaatctgttcgctagaatgtgtctggaccggcaatacctagcaattaaccagatttcaacacagctgagtgttgacctcattctccggtgcgtgagcgacgagagtttgccatttgatttacgcgcttcattttgtaggctcatgcttcacatgcatgttgacagagacccacaagagtccgtggttcccgtgaggtacgctcgtttgtggacagagatccctactaagattaccattcatgagtacgattcaattaccgacagcagccgtaacgatatgaagcgaaagtttgcactgactatggagtttgttgaagaatatttaaaggaggtggtaaaccagccatttccattcggcgataaagaaaagaataagctgacttttgaagtggttcacctggctaggaacttaatttattttggattctattccttctccgagttgttgcgcctgactcgtactctcctcgccattctggacatcgtgcaggctccaatgagctcttatttcgaaagactcagcaagttccaggacggcggcaacaatgtcatgagaacaattcacggggtcggtgaaatgatgactcagatggtattatctagaggttctatttttccaatgagtgtgcccgacgtcccaccgtccatccacccgagcaagcaggggagtcccacagagcacgaggatgtcactgtgatggatacgaagttgaagatcattgaaattctgcagtttatcctgtccgtcaggttagattatagaatctcatatatgctgagtatctacaagaaagaatttggagaggacaacgacaacgctgagacttcagcctccggaagcccagatacacttctcccctccgccatcgtacctgatatagatgagatcgccgcgcaagcggaaacaatgtttgccggacggaaagaaaaaaaccccgtgcagctggacgatgaaggcggccgcacgttcctcagggtcctcattcacctgatcatgcatgactatccccctctgttaagtggggcactgcagcttctgtttaaacatttcagccaaagggctgaagttctccaagcgttcaaacaggtgcaattattggtctctaaccaagatgtggacaactacaaacaaataaaggccgatctagaccagttgagattgaccgtggaaaaatctgagttatgggtagagaaaagctcaaattacgaaaacggagaaattggcgaaagtcaggtcaaaggcggggaggaaccaatcgaggagtctaacatattgagcccagtgcaggatgggactaagaagcctcagattgattccaataaatctaataattaccggattgttaaggaaattcttatccgtctgtcaaagttgtgtgttcagaataagaaatgtaggaatcaacaccagagactgctgaaaaacatgggcgcacacagtgtagttctggacctgctccagattccctacgagaagaatgatgaaaaaatgaatgaagtgatgaatttagcccatacatttctgcagaacttttgccgggggaaccctcaaaatcaagtcttactccataagcacctgaatttgttcctcacacctggtttgctggaagccgaaaccatgcgccatatttttatgaacaattaccacctgtgtaatgagatatcggaacgggtggtccagcacttcgtccactgtattgagacccacggcagacacgtcgaatacctgagattcttacagaccattgtgaaggccgatggcaaatacgtcaaaaagtgccaagacatggtgatgaccgaactgatcaatggcggggaagacgttttgatattctataatgaccgtgccagcttcccgatactcctacatatgatgtgctctgaacgggacaggggcgacgagtctggacccctggcctaccatataacactcgtcgagcttttagctgcttgcaccgaaggaaaaaatgtctataccgagattaagtgtaatagcctcttaccgcttgacgatattgtgcgggtggtgacacacgatgattgcattccggaagtgaaaatagcctacgtaaattttgtgaaccactgttacgtcgacaccgaggttgaaatgaaagagatctacacaagtaaccatatttggaaattgtttgagaacttcctggtggacatggctcgcgtgtgtaacaccaccaccgatagaaaacatgcggacatcttccttgaaaaatgtgtgactgagtcgataatgaatattgtgtctgggttctttaactcacctttctccgataactccacttctcttcagacacaccaacccgtattcatccagctgctgcagagcgcgttccggatatacaattgtacctggcctaacccagcacagaaagcttccgtggaatcatgtatacggactttggcagaagtagctaagaaccgcggtattgcaatccccgtggacctcgactcccaagttaatactctgttcatgaaaagtcacagtaacatggtgcagcgggccgctatggggtggaggctgtcggctcggtctggaccccggttcaaggaagctctgggaggcccggcgtgggactacaggaacatcatcgagaagctgcaggacgtggtcgcatcccttgagcaccaattttcacctatgatgcaagcagagttcagtgtcttggtggatgtgctgtactcccctgaactcctgttcccagagggatcagatgcaagaatccgctgtggcgcttttatgagcaaactcattaatcacaccaaaaaattgatggagaaggaggaaaaattgtgcatcaagatcctgcagactctccgcgaaatgctcgagaagaaggattctttcgtggaggagggcaacacactgaggaaaattcttttgaaccggtattttaagggagactattcaatcggtgtgaacgggcacttatccggggcctactctaaaactgctcaagtcgggggaagcttctctgggcaagattctgataagatgggtattagtatgtctgatattcaatgtctgctcgataaagagggagcctcagaactcgttattgacgtaatagtcaataccaagaacgacaggatcttcagtgaaggcatatttctaggaatcgccctgctagagggcggaaatactcaaactcagtactcattctatcagcagcttcacgagcagaagaaatcggagaagttttttaaagtcttgtacgataggatgaaagccgcccagaaagagatccggagcaccgtgaccgtgaatacgatagatctcgggaataagaagcgcgacgacgacaatgagcttatgacttctggacccaggatgcgggtgcgcgactcaactctccatttgaaggaggggatgaaagggcagctgacagaggcgagctctgctactagcaaggcatactgtgtctatcggcgtgagatggatccagagatcgatattatgtgcacagggccagaggccggcaatacggaggagaagtctgcagaagaggtgacaatgtctcctgcgattgccatcatgcagcccatattgcggtttctccagctgctctgcgaaaatcataaccgggagttacagaactttctacgcaaccaaaacaacaaaaccaattataatttggtgtgcgaaacactccagttcctcgactgtatttgcgggtccacgaccggaggactaggtttacttggcctatatattaacgaaaaaaacgtggccctagtgaaccaaaatcttgagtctttgactgagtattgccaaggaccatgtcacgaaaaccaaacttgcatcgcgacgcacgagtcaaacggaatcgatataatcattgctctaatactgaacgatattaaccccctcgggaagtaccgaatggatctcgtgctccaattaaagaataacgcgtcgaaattgctgcttgccatcatggagagtaggcatgactccgagaacgctgaaaggatcttatttaacatgcggcctcgcgaactggtggatgtgatgaagaacgcttataaccaggggttagaatgtgaccatggagacgacgaaggcggggacgacggagtgagccccaaggacgtcggacataatatttacatcttagcacaccagcttgccaggcataataagctgctacagcaaatgctcaaaccggggagtgatcctgatgaaggagacgaggctctcaagtattacgcgaatcataccgctcagatagagatcgttaggcacgatcgcactatggagcagatcgtcttcccagtgcctaacatttgtgagtatctcactagagagagcaagtgccgggtcttcaataccaccgaacgggatgaacagggctccaaagtcaatgacttctttcagcagactgaagatctgtataacgaaatgaaatggcagaaaaagatcaggaataatccggccctgttctggttcagtagacacattagcctgtggggttcaatctcattcaatctggccgtctttattaacttggccgtggctctgttttatccttttggcgatgatggcgatgaaggaactctgtctcccctgttttccgtgctgctctggattgccgtggccatctgcacttccatgctgtttttcttctccaagcccgtggggattcggccttttttggttagcataatgttgagatccatctataccataggcctcggccctacactgatcctcctgggggctgcaaacctctgtaacaagattgtgttcttagtctcttttgtcggcaatcgtgggaccttcacccgggggtacagagctgttattctggacatggcattcttgtatcacgttgcctacgtgttggtgtgtatgctcggcttatttgtgcatgagttcttttattcgtttctgctgtttgaccttgtgtatagggaggagactctcctcaatgtcatcaagtctgttacacgtaacggaaggagcataatcttaaccgccgtgctcgccctcatcctggtctacctattctccatcatcggattcctgtttttgaaggacgacttcacgatggaggtggataggctgaagaatagaacccctgttaccggatctcatcaggttccaactatgactctgacaaccatgatggaagcatgcgccaaagagaactgttctcccaccatacccgccagtaataccgccgacgaggaatacgaggacggcatagaaagaacctgcgatacactgcttatgtgcatcgtaacagttctaaatcagggacttaggaatggcggtggggtgggcgatgttttgagacgtcctagtaaagacgagccactgtttgctgcaagagtggtttacgacttgctcttttactttatcgtcatcattattgttctgaaccttatattcggtgtcattattgatactttcgctgatctcaggtccgagaagcaaaagaaggaagaaatcctcaagacgacatgtttcatctgtggactcgaaagggacaagtttgacaataagaccgtgagcttcgaggaacacatcaagtcggaacataatatgtggcactatctgtatttcatcgtgctggtcaaggtcaaggaccctaccgagtataccggacctgaatcctatgtagcccagatgatcgtagagaaaaatctggactggttccctaggatgcgcgctatgagcctggtctccaacgaaggcgattctgaacaaaacgagatccggagtctgcaggaaaaactggagtctacaatgtccctggtgaagcagttaagcgggcagttggccgagctgaaggagcagatgaccgaacagcgcaagaataagcaaaggctgggtttcctgggatccaacactccccacgtgaaccaccacatgcccccacactag

SEQ ID NO: 120601 - DNA, 8016 bp, synthetic construct
  misc_feature 1..8016: note = Description of Artificial Sequence: Synthetic coding sequence
  source 1..8016: mol_type = other DNA
atgtctgagatgagctcgtttctgcacatcggggacatcgtgtccctgtacgcggagggaagcgtaaacgggttcattagcacccttgggctcgtagacgacaggtgcgtcgttgaaccagcagccggagatttagacaatccccctaagaagttccgagactgtctgtttaaagtgtgcccaatgaacaggtattcggcccagaagcagtattggaaagcaaagcaaacaaaacaagacaaggagaagattgccgacgtagtgctcctgcagaaactacagcacgccgctcagatggaacagaaacagaatgataccgagaataaaaaggtgcacggtgacgtggtaaagtacggctcagttatacagctgctgcacatgaagtctaataaatacctgacggtgaataagagattgcctgcccttctggagaaaaacgccatgagggttactcttgacgcaacggggaacgagggaagctggttgttcatacaacctttttggaaacttcggagcaacggtgacaatgtggtggtgggcgacaaggttatcctgaatccggtcaatgcaggtcaacctctccacgcctcgaattacgaattgtctgataacgccggatgtaaagaggtcaattcagtgaattgtaacacttcctggaagattaatctgttcatgcagttcagggatcatctggaagaggtcctcaaaggaggagacgtagtccgcctgttccacgcggaacaggagaagtttctaacctgcgacgagtacaagggcaagctgcaagttttcctgaggaccaccctccgacagtcagctaccagcgcaacctccagcaatgctctgtgggaagtagaggtagtccatcatgatccctgcagagggggtgccggacattggaacggcctctataggttcaaacacctcgcaaccgggaactacctggccgctgaggagaacccctcgtataagggggacgcaagtgatcctaaggccgcagggatgggagctcagggtaggacaggtaggcggaatgccggggaaaagattaagtactgcctggtggctgtaccgcacggaaatgacatcgcaagtctgttcgagttagatcccaccacattgcaaaaaactgatagcttcgttcctagaaatagctacgtgcgcttgcgtcacctctgtactaacacatggattcagagtacgaatgtgcccatcgatattgaagaggaacggccgatcagactaatgctagggacatgccctaccaaagaagacaaggaggccttcgccattgtgagcgttccagtgagcgagattcgtgatttagatttcgccaacgatgcctcttctatgctcgctagtgctgtcgagaagctcaatgagggtttcatcagccagaacgatcggcggttcgtgatccagttgttggaagatcttgttttctttgtctcagacgttcctaacaacgggcagaatgtgctggatattatggtgacgaagcccaaccgcgaaagacagaaactgatgcgggagcagaatatacttaagcaggtcttcggcatcctgaaggccccctttagagaaaagggcggtgagggcccgctcgtgcgcctggaagaactcagcgatcagaagaatgctccttaccagcatatgttcaggctctgctatcgcgtgctacggcattctcaggaggattacaggaaaaaccaggaacacatcgcaaagcagttcggtatgatgcagagtcaaatcggatacgacatactagccgaggataccattaccgctctgttacacaataatcgcaaactgttggagaaacatattactaaaactgaagtcgagactttcgtgtctctcgtgagaaaaaacagggaaccccgttttttggattacttgagtgacctgtgtgtgagcaaccatattgcaattccggtgactcaggaactgatctgcaaatgtgtgctggaccccaagaatagcgatattcttatcagaacagagctgcggccagtgaaagagatggcacaatctcatgagtatctctccattgaatatagtgaagaggaggtgtggcttacatggactgataagaataatgaacaccacgagaaatctgtgcggcagctggctcaggaagcacgcgctggaaatgctcatgacgaaaacgtcctgtcttattaccgctatcagcttaagctctttgcacggatgtgtttggaccggcaatacctggcaatcgatgagatttcacagcagctgggggtggatttaatcttcctgtgcatggctgatgagatgctgccattcgacctgcgcgccagcttttgccatcttatgttgcacgtccatgtggatagggatccacaggaactcgtgaccccagtgaagttcgcccgactatggacagagataccaacagcaattaccataaaagactacgactccaatctaaatgcatcccgcgatgataagaagaataaatttgctaataccatggagttcgtggaagattatctaaataacgtagtctccgaagctgtaccattcgctaatgaggaaaagaacaagctcaccttcgaggtcgtttctcttgctcataacctgatctactttggcttctacagtttctcagagctgctcaggctgaccaggaccctgctcggtatcatcgactgcgtccagggtcctcccgccatgcttcaagcatacgaggaccctggtggcaaaaacgtgcgccggtccatccaaggggtggggcacatgatgagcaccatggtactgagtcgcaagcagtcggttttcagtgcgccctctctgtccgctggcgcctcagcagccgagcccctggacaggtctaaatttgaggagaacgaggacattgtggtcatggagactaagctaaagatacttgaaattctgcaattcatactgaacgtgcgacttgactaccgcattagctacctcctatccgtgtttaagaaggagttcgtcgaggtttttcctatgcaggactcaggagccgacgggaccgcacccgccttcgactcaactacagccaatatgaatctcgatcggattggggagcaggctgaagcaatgttcggagtcggcaaaacaagcagcatgcttgaagtggacgacgaaggcggccggatgttcctcagagtgctgattcaccttacaatgcacgattacgctccgcttgtttccggtgcgctacaactgctgtttaaacacttcagccagcgccaagaagccatgcacacattcaagcaggtgcaactactcatttccgcccaggacgtggagaactacaaggtgatcaagagtgagcttgaccgtctccggaccatggtggaaaaatccgaactttgggtggacaaaaaggggagtggtaaaggagaggaagtggaagctggcgcagctaaggacaagaaggaacggcccacagacgaagaaggcttcttgcacccgcccggcgaaaaatcaagtgagaattatcagatcgtgaagggcatactcgaacgactgaataaaatgtgtggggttggggaacagatgcgcaagaagcaacagcgcctgttaaagaacatggatgcacataaagtgatgctagatctcctgcagataccatatgacaaaggggacgctaagatgatggagatcctccgctatacccatcagtttttgcaaaaattttgtgcaggcaaccccgggaaccaggcactgctccataagcatctgcacctgttcctgactccgggcctcttagaggcagaaaccatgcagcacattttcctgaacaactaccagctgtgcagtgagatatcggaacccgtcctgcagcacttcgttcatctgctcgccacacatgggcgccatgtacagtatcttgatttcctgcatacagtgatcaaggccgagggaaaatatgtcaagaagtgccaagatatgatcatgacagagctgacaaatgcaggtgatgatgtggtggttttttacaacgacaaggccagccttgctcacctgctggacatgatgaaggcggcaagggatggagtcgaggatcattcacccttaatgtatcatatctctctggtggacctgttagccgcatgtgctgaaggtaagaatgtgtataccgagattaagtgcacatccttactgccacttgaagatgttgtgtccgtggttacacacgaggactgtatcaccgaagtaaagatggcctacgtgaacttcgtgaatcactgttatgtggacactgaggtcgagatgaaagagatttacaccagtaaccatatctggactttatttgagaattttacgttggacatggccagggtgtgtagcaaacgggagaagcgagtggcagatccgaccctcgaaaagtatgtgctctcagtggtgctcgataccatcaatgcctttttcagcagcccatttagcgagaactcaacctcgctgcagacccatcagacgatcgtagttcaactgctgcagagtactacccgattgctggagtgcccatggttgcagcaacaacacaaggggtcagtggaggcctgtatacgcactttagctatggtagcaaaaggacgagcaatactgctgccaatggatcttgacgcacacattagttctatgttatcttcaggggcctcctgtgcagcagctgctcagaggaacgcgagtagctacaaggctacaactcgggcattcccaagggtgacccccacagccaaccagtgggactacaaaaacattatcgagaagctgcaagacataattaccgcactagaggaaaggttaaaacctctcgtccaggccgagctatctgttctagtggatgtgttacattggcctgaactcctcttcctggaaggcagtgaagcatatcagagatgcgagtcagggggattcctttcgaagcttattcagcacacaaaggacctgatggagtccgaggaaaagctgtgcatcaaggtgttgcgtacattgcagcagatgctgctgaaaaagaccaaatacggcgaccgcggaaatcagctaaggaaaatgctcctgcagaattacttgcagaacaggaaatctacgagtcggggagacctacctgatccgattggaactggactggacccggactggagcgcaatagcggccacccagtgcagactggacaaagagggcgccactaagttagtgtgcgatctaatcactagcaccaaaaacgagaagatcttccaggagtccattggactggcaatacacctccttgatggtggtaatactgagatacagaaatctttccataatttaatgatgtctgataaaaaatctgaaagattttttaaggtgttgcatgacagaatgaagcgcgcccagcaggagactaaatctaccgtggccgtcaacatgaacgacctaggtagtcagccccatgaggatagagagccggtcgatcccactacgaaaggtcgtgtggcctctttttctatccccggatcgagctccaggtacagtttggggccttctctgcggcgcgggcacgaagtttcagaacgtgtgcaatccagcgagatgggtacatcagtgcttattatgcagcctatactgagattcctgcagctgctgtgcgagaaccacaaccgggacctgcagaattttcttagatgccagaacaataaaactaattataacctggtgtgcgaaacactgcagttcctagacataatgtgcggaagcactacagggggcttagggctgctgggcctgtatataaatgaagacaacgtcggcttggtgatccagacactagaaactctgaccgagtactgtcagggcccctgccatgaaaaccaaacctgtatcgtgacccacgaatcaaacgggattgatataatcacagccctgatactaaacgacatatcacccttgtgcaaatatcgcatggaccttgtcttacagcttaaggacaatgcatctaaacttcttctggcactgatggaaagccggcatgattccgaaaatgccgaacggattctgatctctctgcgacctcaggaactcgtggatgttatcaagaaagcttatcttcaggaggaagagagggagaactccgaagtgtccccacgggaagtgggacataacatctatattctcgccttgcagctcagtcggcacaataagcaactccagcatctcttgaagccagtcaaaagaattcaagaagaggaggccgaaggaatttcttcaatgctgtctctgaacaataagcagcttagccaaatgctcaagagctccgccccagcccaggaggaagaggaggatcccttggcttactatgaaaaccataccagccagattgaaatcgtccgccaagaccgatccatggagcagatagtgtttccggttcccggtatctgccaattcctcaccgaggaaaccaaacatcgtttgtttacaaccactgaacaggacgaacagggttccaaggtgtctgactttttcgaccagtcttcgtttctccacaatgagatggagtggcagagaaaactcagaagcatgcccctcatctattggttctcccggagaatgactctttgggggtccatttcgttcaacctcgctgttttcatcaatatcatcatcgctttcttctacccgtatatggagggagcatccacaggcgtgctcgatagccctctgatctcccttctcttttggattttgatttgcttttccatcgctgccctgtttaccaagcgatattccatacggcctctgatagtcgccctcatccttcgcagcatctactacttaggcataggtcccacattgaatatcctgggagctttaaacctgaccaacaaaattgtctttgtggtatcattcgtgggcaacaggggcactttcatcaggggctataaggcaatggtaatggacatggaatttctttaccatgtaggatacatcttgacctcagtgttaggcctgttcgcccacgaactcttttacagcatcctgctattcgacctgatctatagagaggaaaccctctttaatgtgatcaaaagtgtgactagaaacggtagaagcatccttcttactgccttactcgcacttatcctggtctatttattcagcatagtcgggttccttttcttgaaggatgacttcatattggaggtcgaccgcctaccaaataaccattccactgcaagccccttgggcatgccacacggggctgccgcctttgttgacacctgctctggggataagatggattgtgtgtcaggcctctctgttccagaagtgctagaggaagatagagagctcgattccactgagcgtgcctgcgataccctgcttatgtgcattgtgactgttatgaaccatggcttgcgaaacggcggaggggtaggtgacatcctgaggaagccttcgaaggatgagtcactgttcccagctagggtagtatatgacctactgtttttttttattgtaatcattatcgttctgaatctcatcttcggcgttatcatcgacacctttgccgacctgcgcagtgagaaacagaaaaaggaggaaatcctcaaaaccacatgctttatctgtggactcgaaagggacaagttcgataataaaaccgtctcattcgaagaacacatcaagctggagcacaacatgtggaattacctctactttattgtgctggtgcgtgtgaagaataaaaccgactatacagggccagagtcttacgtggcacagatgatcaaaaataagaaccttgattggtttcccagaatgagagccatgtctctcgtctccaacgagggtgagggggaacagaatgagatccggattcttcaagataaactgaatagcacaatgaagttggttagtcacctgacagcgcagctaaacgaactcaaagaacagatgactgagcagaggaagaggcgtcaacgtctgggcttcgtcgatgtccaaaactgcatttcaaggtag

SEQ ID NO: 120602 - DNA, 1326 bp, synthetic construct
  misc_feature 1..1326: note = Description of Artificial Sequence: Synthetic coding sequence
  source 1..1326: mol_type = other DNA
atgtgtgtgtgtcagacgatggaggtgggccagtatgggaagaatgcatcgagagcaggcgaccggggggtcctgttggagcccttcattcaccaggtgggcgggcattccagtatgatgagatacgacgatcatacggtgtgtaaaccactgatatctcgcgagcaaaggttctacgaaagcctgcctccggagatgaaggaattcactcccgaatataagggcgttgtgagcgtgtgtttcgagggtgattccgatggatacatcaatcttgtagcctacccatacgtcgaatctgaaactgtggagcaggatgataccacggagagagagcagcctcgaaggaaacactcccggagatccctacacagatcaggctctggatcagaccataaagaggagaaggccagccttagcctggagaccagtgaatcctctcaagaggctaagagtcccaaggtggaactgcacagccactccgaagtcccttttcaaatgctagacggaaattccggactgagcagcgagaagatctctcacaacccatggtcgctgaggtgtcacaagcaacaacttagtaggatgcgcagcgagagcaaagaccgtaagctctacaaatttttgctcctcgagaatgttgtccatcattttaagtacccttgcgtcctggatttgaaaatgggtaccagacagcacggggatgacgcatctgccgagaaggcagcccgccagatgcgaaaatgtgaacagagtacctctgccacgctaggcgtaagagtctgcggaatgcaggtttatcagctggacaccggccactatctgtgccgtaataaatattacggacgaggcctgtccatagagggatttcgcaatgccctctaccagtacctgcataatggtcttgacctgaggagggacctcttcgagcctattttgtctaagctccggggactgaaggccgtacttgaaaggcaggctagttacagattttactcttcgagcctgctcgttatttatgatggtaaggaatgtcgcgccgaatcatgcctggatcggagaagcgaaatgaggctgaaacacctggacatggtgttgccggaagtggcctcatcttgtggtccaagtacatccccaagcaacacgtctccggaggcgggtccttcgtcacagcccaaggtggatgtacgaatgatcgatttcgctcactctacgtttaaagggtttagggacgacccaacagtccatgatgggcccgaccgaggctacgtctttgggctagaaaacttgatcagtatcatggaacaaatgcgagacgagaatcagtag

SEQ ID NO: 120603 - DNA, 831 bp, synthetic construct
  misc_feature 1..831: note = Description of Artificial Sequence: Synthetic coding sequence
  source 1..831: mol_type = other DNA
atgttggacggcaattctggcctgagctctgagaagatatcacacaatccctggagcctgcggtgccacaaacaacaactgagtagaatgcgctcagaatccaaggaccggaagctgtacaagttcctgctactggagaacgtcgtccaccacttcaaatatccatgtgtgctggatctgaaaatgggcactcgccagcacggcgatgatgcaagtgctgagaaggctgcgcgccagatgaggaagtgtgaacagtccacctccgcaacattaggggtccgcgtgtgcggcatgcaagtttatcagctggatactgggcactacctgtgccggaacaaatactatggtagaggactctcaatagagggcttccgcaacgcgctgtaccagtacttgcacaatgggctggatctcaggagggatctgtttgagcccatcctgtcgaaactgagggggctgaaggcggtcttagagagacaggcgtcttacaggttttatagtagctcgttactcgtgatctatgacggcaaggagtgtcgagcagaatcatgtttagacaggcgctctgagatgcgcctgaaacatttggacatggtgttacctgaagtggcctcctcatgcggtccgtctacatcaccaagcaacacatcgcccgaagcaggaccatcctcccagccaaaagttgacgtgcgcatgatagattttgcccactcaacctttaaaggctttagggatgatcctacagtccatgatggcccagatagaggctatgttttcgggcttgagaacttaatctccatcatggaacaaatgcgagacgagaaccaatag

SEQ ID NO: 120604 - DNA, 831 bp, synthetic construct
  misc_feature 1..831: note = Description of Artificial Sequence: Synthetic coding sequence
  source 1..831: mol_type = other DNA
atgctagacggcaacagtggcttgtccagcgagaagatctcacataacccctggagcctcagatgtcataagcaacagttgtcccgaatgaggagcgagtcaaaggataggaaactgtacaagttcctgctcctggagaatgtcgttcatcatttcaagtacccctgcgtgctcgacctgaagatgggcacgcgacagcacggtgacgacgcgtccgccgaaaaggccgctcggcagatgagaaagtgcgaacagagtacttctgccaccttaggcgtcagggtgtgcggaatgcaggtgtatcagctggacacagggcattacctgtgtcgaaacaaatactatgggagaggcctgtctatcgaaggcttcagaaatgctctttaccagtacttgcacaacgggctggatcttagaagagatctgttcgaaccaatcttgtctaaacttaggggtctcaaggctgtgctcgaacgacaggccagctatcgattttattctagctccctgctggtgatatatgatggcaaagagtgccgagccgagagctgtctggaccgccgaagcgagatgcgtctgaagcatctggacatggtgctcccagaggtcgcctctagctgtggcccatcaacttccccctctaacaccagcccggaagctggtcctagcagccaaccaaaggtggatgtgcggatgatagacttcgcgcattccacttttaaaggttttagggatgacccgactgtacatgatgggcccgatcgggggtatgtgtttgggctcgaaaatcttatttctattatggaacaaatgagggatgaaaatcagtag

SEQ ID NO: 120605 - DNA, 1281 bp, synthetic construct
  misc_feature 1..1281: note = Description of Artificial Sequence: Synthetic coding sequence
  source 1..1281: mol_type = other DNA
atgagtcccgctttcagggcgatggacgtggaaccacgcgccaagggcgtgctgttagagcctttcgttcaccaagtgggggggcatagctgcgttctgcgcttcaacgaaaccacactgtgtaagcctctcgtcccacgcgagcatcagttttacgaaacgttgcctgctgaaatgcgtaaattcaccccacagtataagggggtggtgagcgtgcggttcgaggaggatgaggatagaaacctctgtcttatagcgtatccactcaagggcgaccacgggatcgtagacatagtggacaattctgattgcgagccaaaatctaaattgctgcgttggaccacaaacaaaaaacaccacgtgctggagactgaaaaaacaccaaaggattgggttcgccaacaccggaaagaggagaagatgaagagccacaaactcgaggaagagtttgaatggcttaaaaagtctgaagtgctctattacaccgttgagaagaagggaaacatctcaagccagcttaaacattacaatccatggagcatgaaatgccatcaacaacagctccagaggatgaaggaaaatgcgaagcatcgaaaccagtacaagttcatacttctcgagaacctaacatcgcgctatgaagtaccatgtgtactggatctcaagatgggcaccagacagcatggcgacgatgcctcagaagagaaagccgcaaatcaaatcagaaagtgccagcagtcaacctctgccgtaattggagtgcgcgtctgtgggatgcaggtgtaccaagcgggttctggacagctcatgttcatgaacaagtaccatggccgcaagctcagtgtgcagggcttcaaggaggctttgttccaattttttcataacggtcggtatttaaggagggagcttctggggccggttctcaagaaattgacggagctgaaagccgtgctcgagcggcaggaatcctataggttctattcctcttcgctgctcgtgatctatgatggaaaggagcgacccgaggtggtcctggatagcgacgcagaggatctcgaagacctgtctgaagagtccgccgacgagtcggccggcgcctacgcctacaaacccataggcgcgtccagtgtcgacgtgaggatgatagacttcgcccacacaacttgcagactgtatggggaggacaccgtggtgcacgaaggccaggatgctgggtacatttttggcttgcagtccttgatcgacattgtaactgagatttccgaggaatcaggcgagtag

SEQ ID NO: 120606 - DNA, 294 bp, synthetic construct
  misc_feature 1..294: note = Description of Artificial Sequence: Synthetic coding sequence
  source 1..294: mol_type = other DNA
atgtcgcccgcatttcgggccatggatgttgagccccgggcgaagggggtccttctggagccattcgtgcaccaggttggggggcattcatgtgtgcttagatttaacgagacaaccctctgcaagccattagttccaagagagcatcaattctacgagacattaccagcagagatgagaaaattcacacctcagtataaggggcagtcgcaaaggccgttggtctcatggccttcactgccgcactttttcccctggtccttccctctgtggcctcaaggatctgtagcgtag

SEQ ID NO: 120607 - DNA, 294 bp, synthetic construct
  misc_feature 1..294: note = Description of Artificial Sequence: Synthetic coding sequence
  source 1..294: mol_type = other DNA
atgagtccagcctttcgggctatggatgtcgagccacgggccaagggggttttgctcgaaccattcgtccaccaggtgggtgggcattcttgcgtgctgcgttttaacgagacgaccctttgcaagccattggtccctagagagcaccagttttatgaaaccttacctgccgagatgcgcaagtttactcctcaatataagggtcaatcccagcggccgctcgtctcttggccttccctccctcactttttcccctggagtttccctctgtggcctcagggttcagtggcttag

SEQ ID NO: 120608 - DNA, 558 bp, synthetic construct
  misc_feature 1..558: note = Description of Artificial Sequence: Synthetic coding sequence
  source 1..558: mol_type = other DNA
atgagtctgaacctgccggaggcatcactgctctcccgcgcctcatggccagaacaagctaaggagcctaggcgcgagggtcacactgataaacagcagacagaggacgtgctagcggcaggcttaagatgcttgcctcacctaccagccatctgcgctcggagaatgtctccggcatttcgagccatggacgtggagccacgcgctaagggcgtccttctggagccctttgttcaccaggtggggggccattcatgcgtattgagatttaacgaaacaactctctgcaaacccctggtgcccagagagcaccagttttacgagaccctgccagccgagatgaggaaattcaccccccagtacaaaggtaaatcacagctgctggaaggtttgcctcactggaggggggacgttagagaccggggccacggcagaccctggcaaccaagcctcgaaccatcgcttcctcccactttgtgttttccaagcctcagcagcttctcgtccagctggccctccgctcagcacctgaccccttctgtgttcaatccatggtag

SEQ ID NO: 120609 - DNA, 264 bp, synthetic construct
  misc_feature 1..264: note = Description of Artificial Sequence: Synthetic coding sequence
  source 1..264: mol_type = other DNA
atgtcacctgccttccgtgctatggacgtggaaccccgcgccaagggcgtcctgctggagcctttcgtgcaccaggtaggaggccacagctgtgtactgcggttcaacgagactacgttatgcaagccccttgtacctcgtgagcaccagttctacgagacgctcccggccgagatgcggaaattcaccccacagtacaaaggcgatattagcagccatcagcacgggggcgtgtttgtaggggaatggggatccctgctgtag

SEQ ID NO: 120610 - DNA, 567 bp, synthetic construct
  misc_feature 1..567: note = Description of Artificial Sequence: Synthetic coding sequence
  source 1..567: mol_type = other DNA
atgaacctgtgtcagtctcccttccaagaaggatgccagtcgttgctggcatcgtggcctgagcaggccaaagagcccagaagagaaggccatacggacaagcagcaaacagaagacgtgttagccgctggcctcaggtgtctgcctcatctgccggcaatctgcgccagacggatgagccctgccttcagagctatggacgtggagcctagggccaaaggcgtactgttagagccttttgttcatcaggtaggcggacatagctgcgtgctgagattcaatgagactaccctgtgtaagcccctggtgccgcgtgaacaccagttctacgagacgcttcccgctgagatgcggaagtttactccccagtacaaggggaaaagccaattgctcgaggggcttccacattggcgcggagacgtgcgcgacagaggccatggccggccgtggcagcccagcctggaaccaagcctgccccctactctgtgcttcccaagcctgagttcctttagctccagttggccatccgctcagcatctgacccccagtgtgttcaatccctggtag

SEQ ID NO: 120611 - DNA, 1233 bp, synthetic construct
  misc_feature 1..1233: note = Description of Artificial Sequence: Synthetic coding sequence
  source 1..1233: mol_type = other DNA
atggttgtgcaaaattcagcggacgctggggacatgagagccggagtccagcttgagccctttctccaccaagttggaggccacatgagtgtcatgaagtacgacgaacatacagtttgcaaaccattggtatcgagagagcagcggttctacgaatcccttccccttgccatgaagcggtttaccccgcaatacaagggcacagtcaccgtgcatctatggaaagactctactgggcatctctctctggtggccaatcccgtaaaggagtctcaggaacctttcaaggtgagcaccgaatccgccgcggtggccatatggcagacgctgcagcaaactaccggttctaatggttccgactgtacactcgctcaatggccacatgcgcaactcgccagaagcccaaaggagtccccagccaaggctctgttgcgctctgaacctcaccttaatacccctgctttctctctggtggaggacactaatggtaaccaggtggagcgaaagtcctttaacccatgggggcttcagtgccatcaggcccatctcactagactgtgctccgagtaccctgagaacaagcggcatcgcttccttcttctggaaaacgtagtgtctcagtatactcatccgtgtgtgctcgacctaaagatgggcacgcgtcagcatggcgacgatgcgtcagaggagaagaaggcacgtcatatgcgaaaatgtgcccagagcacaagcgcgtgtctgggggtccggatatgcggaatgcaggtgtaccagaccgacaaaaaatactttttgtgtaaagacaaatactacgggaggaaactgagcgtcgagggtttccgccaagcactgtatcagttcctccataatggcagccatctccgtagggagctgcttgaacccattctccatcagttaagggccctgctatctgtgatcagatcccagtcaagctacagattctattcatcatccctgctggtgatctacgacgggcaggaaccccccgagcgcgcaccaggctccccccatcctcatgaggccccgcaggccgctcacggctcctcccccgggggcctcactaaggtggacattagaatgattgacttcgcgcacactacatataagggctactggaatgaacacaccacttacgacggccctgaccccgggtatatcttcggactagaaaatctcatccgaatcttgcaagacatccaggagggagagtag

SEQ ID NO: 120612 - DNA, 1233 bp, synthetic construct
  misc_feature 1..1233: note = Description of Artificial Sequence: Synthetic coding sequence
  source 1..1233: mol_type = other DNA
atggtggttcagaatagcgccgatgctggcgatatgagggcaggtgttcagcttgaaccatttctccaccaggttgggggacatatgagtgttatgaagtatgacgagcataccgtgtgcaagccactcgtatctcgcgaacagagattctatgagagtctgccattggccatgaaacgtttcacaccgcagtacaaaggtaccgtgactgtccatctgtggaaggattcaacaggccacttgtccctggtagcaaatccagttaaggagagtcaggagcctttcaaagtcagcactgaatctgctgctgtggccatctggcagaccctacagcaaaccactggctctaacgggagcgactgtacactggcccagtggcctcacgcacagcttgccaggtccccaaaggagagccctgccaaggccctattaagatcagagcctcaccttaacactccagccttcagtctcgttgaagacactaacggaaaccaggttgagcggaagagcttcaacccttggggcttacagtgtcaccaggctcatcttacgcgtctctgttcggaatatcctgagaacaaacgacacagattcttgctgcttgaaaatgtcgtgagccagtatactcatccgtgcgttcttgacttgaaaatgggaaccaggcagcacggtgatgatgctagcgaggaaaaaaaggctaggcacatgcggaagtgcgctcagagcacctctgcttgtctcggagtacggatctgtggtatgcaggtttatcaaacagataagaagtacttcttgtgcaaggacaagtactatggccggaagctgtctgtcgaaggcttcagacaggcactttatcaattcctccataatggctcacacctgcggcgagaattgctagagcctatcctccaccagcttcgggcattactgtctgtgattcgcagccagagctcctatagattctattcatcttcactgctggtaatctacgatggccaggagccacctgagagggccccagggagcccacatcctcacgaggccccacaggccgctcacgggtcctctcccgggggcctaaccaaagtggacattcgaatgattgattttgcccataccacatacaaaggatattggaatgagcacacgacgtacgacggccctgatcccgggtatatcttcggactggagaatttgattaggattcttcaagacatacaggagggtgagtag

SEQ ID NO: 120613 - DNA, 1080 bp, synthetic construct
  misc_feature 1..1080: note = Description of Artificial Sequence: Synthetic coding sequence
  source 1..1080: mol_type = other DNA
atggcaccaatgggcattagattgagtccattaggcgtcgcagtgttttgcttactgggtctcggggtgctctaccatttgtactctggatttttagctggccgcttttcactcttcggtcttggcggtgaaccaggggggggggcagccggccccgcggctgccgctgacggggggaccgtggatctcagagagatgttggccgtcagtgtgctggccgctgttcgggggggagatgaggttcgacgagtcagagaaagtaatgtgctgcacgagaagtcgaaaggcaagacacgtgagggagccgaagataaaatgaccagtggtgatgtgctttctaatcgcaagatgttctatctgcttaagactgctttcccgagtgtgcagatcaacactgaagaacacgtagatgccgccgaccaagaagttatcctgtgggatcacaagatacctgaggacatcctgaaggaagtgacaacaccaaaggaggttcctgctgagtcagtgactgtgtggatcgacccgctggacgcaacacaggagtacacggaggaccttcggaagtatgtaacaacaatggtatgtgtggccgtcaacggtaaaccaatgctcggggtcatccataagcctttttcagagtatacagcctgggccatggtagatgggggaagcaatgtcaaagctagatctagttataacgagaaaacgccaagaatcgtggtgagccgtagccactctgggatggtgaaacaagtggccctacagacgttcggaaatcagaccactattattcccgcgggcggcgccggctacaaagtccttgccctattggatgtcccagataagagccaggagaaggccgacctttacattcacgtgacctatattaaaaaatgggacatttgcgcaggcaacgctatcctgaaagcacttggtggacacatgaccacactgagcggagaagagatcagttatacaggcagtgatggcatcgaggggggcctccttgccagcatcaggatgaatcatcaggcattggtgcgaaaactgccagatctggagaaaaccggccacaaatag

SEQ ID NO: 120614 - DNA, 1251 bp, synthetic construct
  misc_feature 1..1251: note = Description of Artificial Sequence: Synthetic coding sequence
  source 1..1251: mol_type = other DNA
atggccacagagccacctagtcctctgcgcgtcgaagccccagggccaccggagatgagaacctctcctgccattgagagtacccctgaggggacaccccagccagctggggggcgcctgaggtttctgaacggttgtgtgcccctgtctcaccaagtcgcaggccacatgtatggtaaggataaggtcgggattttacagcatcccgatggcacagtccttaaacagcttcaaccccctcccaggggaccgcgcgagctggagttctataatatggtatacgctgccgactgttttgatggcgtgctgctggagctgaggaaatacttgccaaaatactacggcatttggtccccccctactgcccccaacgacctctacttgaagttggaggatgtcactcataaatttaataaaccatgcattatggacgtaaaaatcggacagaaatcctatgaccccttcgcgtcctccgagaaaattcagcagcaggtgagtaagtacccactgatggaggagatagggtttcttgtgctggggatgcgcgtgtatcacgttcatagtgatagttacgagaccgagaatcaacattatggccgcagtctgactaaggagactatcaaagacggcgtcagcagattttttcataacggctattgtttacgcaaagatgccgtagccgcctccatccagaaaattgagaaaatcctccaatggtttgagaaccaaaagcaacttaacttctacgctagcagcctgctgtttgtctacgagggcagttctcagcctaccacaactaaattgaacgacagaaccctcgctgaaaaatttctgtctaaaggccagcttagtgacactgaggtcttggaatataataataacttccatgtgttgagctccacagctaatggaaagatcgaatcctctgtgggcaaaagcctaagtaagatgtacgcacgccacaggaaaatctacactaaaaagcaccattcacaaacttccctgaaggtcgagaacctggagcaggacaacggctggaagagcatgtcccaggagcacctgaacggcaacgtactctctcaactggagaaggtgttctaccacctgccaacaggatgccaagaaattgcagaggtagaagtgcggatgatcgactttgctcacgtgttcccatctaatacaatcgatgaggggtacgtgtatggtctcaagcacctaatttctgtgctgcggagcattctggataattag

SEQ ID NO: 120615 - DNA, 3777 bp, synthetic construct
  misc_feature 1..3777: note = Description of Artificial Sequence: Synthetic coding sequence
  source 1..3777: mol_type = other DNA
atggcatccgcatgcggcgccccaggccccggcggtgcattaggcagccaagccccttcttggtaccaccgtgatctgtcccgagctgcagccgaagagctgctcgcccgagcgggtagggacggctccttcttagtacgagattctgagtcggtggccggggccttcgccctttgtgttctctaccaaaagcatgtacatacttatagaatcctgccagatggggaggattttctggccgtgcagacaagtcagggcgttcctgtccgccgattccagactctgggtgagctcatcggactttatgcccagccaaatcagggtctggtttgcgccctgttgctcccagtggagggggagcgcgagcctgaccctccagacgatcgggacgccagtgatggcgaggatgagaagccacctctgccccctaggagcggctccaccagcatctcagctcctaccggaccctcttctcctctgcctgcgccagaaacaccaactgcacccgccgcagaatcagcacctaatggcctgtccaccgtaagccatgactatctgaaaggcagctacggcctcgacttggaagcagttagagggggcgcttcccacttgccccacctaactagaaccctggctaccagctgtcgtaggctacattcagaagtggacaaggttttgtccgggctcgaaatactgtctaaggtgttcgaccagcaatcgagccccatggtcactagactattacagcagcagaacttgccccagaccggcgaacaggaacttgagagccttgtgttaaaactttctgtcttgaaagattttctgagtggtattcagaagaaggcactaaaggctcttcaagacatgtccagcaccgcccctcccgcccctcagccatctaccagaaaggcaaagacgataccagtccaagcgtttgaagttaagttagatgttaccttaggcgatctcaccaagataggtaagtcgcaaaaatttacactctccgttgatgtcgaagggggacggcttgtgttactgcggcgccagcgagactcccaggaagattggacaacctttacgcacgatcgcattcgccagctcattaaatcccaacgtgtgcaaaataagttaggggtggtctttgagaaggagaaagaccgaactcaacgcaaggattttatttttgtgagcgcacgaaagagagaagccttctgtcagctgctccagctgatgaagaacaaacattccaaacaagatgagcccgatatgattagcgtctttatcggcacttggaacatgggctccgttccgccaccgaaaaacgtcacaagttggtttacaagcaagggactaggaaaaactttagatgaggtgacagttaccatccctcatgatatttatgtcttcgggacccaagagaacagtgtgggggatcgagagtggttggatctgctccgaggcgggctgaaagagctgaccgacctggattacagacccatcgccatgcagagcctgtggaatatcaaagtggccgtgctggtcaagccagaacacgagaatcgcattagtcacgtctcgacatcgtcagtaaagactgggatcgctaatactctgggtaataaaggcgccgttggagtcagtttcatgttcaacgggacctccttcggctttgtcaactgtcatttaaccagcgggaatgagaagacagcccggcggaatcagaactatctcgatatactcagactactatccctcggagataggcagctgaatgctttcgatatctccctccgtttcactcatctgttttggtttggggatcttaactaccgacttgacatggacatacaggagattctgaattatatcagcagaaaggagtttgagcctctgttgcgcgttgaccaactgaacctcgagcgggagaaacataaagtattcctgcggttttccgaggaagaaattagttttccccctacttatcgctacgaacggggatccagggacacatacgcctggcacaaacaaaaacccacaggggtgcgtacaaatgtcccctcctggtgtgaccgcatcctctggaaatcctatccggaaacccatatcatttgtaattcctacgggtgcactgacgacatcgtgacatcagatcactcccctgttttcggaacgttcgaagttggagtaacaagtcagtttatctcaaaaaaagggctgagtaaaacaagcgaccaagcctatattgagtttgagagcatcgaagctattgtcaaaaccgcttccagaaccaagttttttatcgaattctatagcacctgtttagaggagtataagaaaagttttgagaatgacgcccaaagctctgacaacatcaacttcctcaaggtccagtggagcagcaggcagctgcccacgctgaaaccaattctggctgacattgagtaccttcaggaccagcatctgcttctgaccgttaagtctatggatggttacgagtcttatggggagtgtgtggtcgctcttaaaagcatgatcgggagcacagcacagcagtttctcacgtttctgagccataggggagaagaaaccgggaatattagaggctccatgaaagtccgagttcctactgaaagactggggactcgcgagcgattatacgaatggatatctatagacaaggacgaggccggcgccaagtctaaagcaccatcagtgagcagaggttctcaggagcctcggtcaggaagtcgaaagccagcttttacagaagcttcctgtccactgtcccgactttttgaagagcccgaaaagcctccccctactggacggcccccggctccacctagggccgcccccagagaggagcccctgactcccagactcaaacctgaaggtgctccagagcccgaaggcgtagctgcccctccgcccaagaacagcttcaacaatcctgcttattacgtgctggaaggagtgcctcaccagctgctgcccccagaacccccgtcgcccgccagagcccctgtcccctccgctactaagaacaaggtcgccattactgtgccagccccccagctgggccatcatagacatccaagagtgggggaaggctcatcttctgacgaagaatctggcggtacccttcctcccccagacttccctcctcctccgctgcctgattccgccattttcctgcctccgtccctagacccattgccaggccctgtggtcagggggaggggtggcgctgaagctcgaggccccccaccccctaaggctcacccccgcccacctcttccccctggccccagtcccgcatccaccttcctcggcgaagttgcgtccggtgacgacagatcatgtagcgtcctacaaatggccaaaaccctgtccgaggtcgactatgcccccgccggccctgctcggagcgcgctgctccccggacccttagagttgcagcccccgcggggcctgccttcagactatggcagaccactgagcttcccaccacctagaattagagagtccatccaggaggatctggcagaagaagccccttgcctgcaaggggggagggcctcggggttgggagaagcaggcatgtctgcttggctcagggctatcgggctagaaaggtacgaggaaggactagtgcacaatggttgggatgatctcgaatttctgagcgacatcactgaggaggatctagaggaagccggcgttcaagatcctgcacacaagcgactccttctcgatacattgcaattgtcgaaatag

SEQ ID NO: 120616 - DNA, 105 bp, synthetic construct
  misc_feature 1..105: note = Description of Artificial Sequence: Synthetic coding sequence
  source 1..105: mol_type = other DNA
atggtgacacgcctgctgcagcagcagaacctcccgcagacaggggagcaagagttagaatccctagtgctgaagctgagcgtgctgaaagacttcctctcctag

SEQ ID NO: 120617 - DNA, 3051 bp, synthetic construct
  misc_feature 1..3051: note = Description of Artificial Sequence: Synthetic coding sequence
  source 1..3051: mol_type = other DNA
atggttaccagactgcttcagcagcagaacctccctcagactggggagcaagaattggagtcattggtgcttaaattatctgttcttaaagactttcttagcggcattcagaaaaaggccttgaaggccctgcaggacatgtcatccactgctcctcctgctcctcaaccgtccactagaaaagcgaaaaccatccccgtccaggcattcgaggtcaagctggacgttactctcggagatctgactaaaatcggtaagagtcagaagtttaccctgagtgttgatgtggagggagggcgtctggtgcttcttcgacggcagcgtgattctcaggaggattggaccacgttcacccacgatcgcatccgacagctgattaaaagtcaacgggtgcagaataaactaggagtggtcttcgagaaggagaaggacaggacccagaggaaagacttcatctttgtcagcgcgaggaaaagggaggccttttgtcagctgctacagctgatgaaaaataagcactcaaagcaggacgaacctgacatgatttccgtcttcatcggtacttggaacatgggctctgtgccccccccaaagaacgtgacatcctggttcacatcaaaaggtctgggaaaaaccctcgacgaagtgaccgtaaccatccctcacgacatatatgttttcggtacacaggagaatagcgttggggaccgggaatggctggacctgctcagagggggcctgaaagagctgaccgatctggactatagacctatcgcgatgcagtctctatggaacatcaaggtagctgtgctggttaagcctgaacatgaaaatagaatctcccacgtctctactagctccgtcaaaactggtatcgccaataccctcgggaacaagggggctgtcggagtgtcctttatgttcaatggaacatcgtttggctttgtcaactgccatttaacttctggtaacgaaaagactgcgagaagaaaccagaactatctggacattctgaggctgttgagtctgggtgataggcagcttaatgcttttgatattagtctgaggttcacacatctgttttggttcggcgacttaaactatcggttggatatggatatccaggagatcctcaactatatttcaagaaaggaatttgaacccttactgagagtggatcagctcaacctggaacgcgagaagcataaagtgttccttcggttcagtgaggaagaaatctcattcccaccaacataccgatacgaacgtggctccagagatacttacgcttggcataaacaaaaaccaaccggagtgcgaacaaatgttccttcttggtgcgacaggatcttgtggaaatcttatcctgagacccacatcatttgtaactcctacggctgtaccgatgatatcgttacgagcgatcactccccagttttcgggacattcgaggtgggcgttacctctcagtttattagtaagaagggcctaagtaagacgtccgaccaggcctacatcgagtttgagagcatcgaggcaatcgtaaagaccgccagtcggactaaattcttcattgaattctattccacttgccttgaagaatataaaaagtcattcgagaacgatgcccagtcttcagacaatattaacttcctgaaggtgcagtggtctagtcggcagcttcccactcttaaacctattctcgccgatatcgagtacctgcaggatcagcacctgctgcttacagttaagtccatggacggctacgagtcttatggcgagtgtgtggtggccttgaaatccatgatcgggtcgaccgctcagcagttcttgacctttttaagccatagaggagaggagacaggcaacatcagggggtctatgaaagtgagagtgccaacagaaagactgggaacaagagagaggctttatgagtggatcagcatcgacaaggacgaggcgggagctaagtccaaagctcctagcgtgtctcgcggaagccaagaacccagaagcggtagtcgcaagccagctttcacagaggccagctgtccgctctcaagactgttcgaggagccggaaaagcctcctccaaccggccggcctccagcccccccccgcgcggcgcctagggaagagcctcttactcccaggctgaagcctgaaggcgcacccgaaccagaaggcgttgccgccccgccaccaaaaaactcctttaataatccagcctactacgtgctcgaaggagtcccacatcagttgcttcctcctgaaccaccctctccagctagagccccagtcccgtccgccaccaagaataaggtggcaatcaccgttcccgctccccagctgggccatcaccgccatcctcgcgtcggtgaggggagctcttctgacgaggagagcggaggaaccctgccaccccccgactttccccccccccccctccccgacagtgcaatcttcctacctccctctctggacccactccctgggccagtggtcaggggtagggggggcgcagaagccagaggcccaccaccacccaaggcacaccctaggcctcctttgcctcctggtccatcccccgcctcaacatttttgggagaagttgcctcaggagacgaccgcagttgtagcgtccttcaaatggctaaaacattgagtgaagttgactacgctccggccggacccgcgaggagcgcactgttgccaggccctcttgagctacagcctcctcgagggcttccctctgattatggacggcctctctcattccctccccctaggattcgggaatctatccaagaggacctggcggaggaagccccctgtttgcaaggtggacgggcgtcaggactgggtgaggctggaatgtccgcttggctccgcgccatcgggctcgagagatatgaggagggcctggtgcataatggatgggacgacctcgagttcctgagtgacattaccgaggaagatctggaggaagcaggcgtccaggacccggctcacaagagactgctactggacacgcttcagctgtcgaagtag

SEQ ID NO: 120618 - DNA, 69 bp, synthetic construct
  misc_feature 1..69: note = Description of Artificial Sequence: Synthetic coding sequence
  source 1..69: mol_type = other DNA
atggcctcagcctgtggcgctcctggtcctggtggagcgttaggcagccaggctccctcatggtactag

SEQ ID NO: 120619 - DNA, 3051 bp, synthetic construct
  misc_feature 1..3051: note = Description of Artificial Sequence: Synthetic coding sequence
  source 1..3051: mol_type = other DNA
atggttactcggctcctccagcagcagaacctgccacaaacaggcgagcaagagctagagtccctggtcctaaagttgagcgtcttgaaggacttcctgtcaggcattcaaaaaaaggccttaaaggccttgcaggatatgagcagcacggcacctccggccccacaaccgagtacaagaaaggctaagaccattccagtgcaggcatttgaggtgaaattggatgtgactctgggtgaccttaccaagatcggcaaaagccaaaaatttacactctcagttgacgtcgagggcggcaggcttgtgctgctgaggcggcagagggacagccaggaggattggaccacatttacccatgacagaattagacaacttataaagagtcaacgggttcagaacaaactgggcgtggtatttgaaaaggagaaggataggactcagagaaaagatttcatcttcgtctctgcacggaagcgtgaagctttttgtcaactgttgcagctgatgaagaataaacacagtaagcaagacgaacctgatatgatcagcgtgttcatcggcacgtggaatatgggctccgtcccaccccccaagaatgtcacatcttggtttacttctaagggattgggtaagacattggacgaggtcaccgttactatcccacatgatatttacgtgttcggtacacaagaaaactccgtgggagaccgagaatggctagatctgctgcgtggtggacttaaggagttgacggacttggattatagaccgatcgctatgcagtctctgtggaacataaaagtcgctgtcctggtgaagcctgagcatgagaaccgaatctctcatgtcagtactagttcagtcaaaaccggcattgcaaacacattagggaacaaaggagctgttggtgtgagcttcatgtttaacgggaccagcttcggattcgtgaattgccacctgacctcagggaatgaaaagacagccagaaggaatcagaactatctggacatcttgaggttactgagtctgggggatcggcagctcaatgccttcgatattagcctccggttcacacacctgttttggtttggcgacctgaactacaggttggacatggacatccaagagatcctgaattacatctcaagaaaggagttcgagcctctgctgagggtcgatcagttaaacctagaaagggaaaagcacaaggtttttctaagattctccgaggaggaaatctcctttcccccaacatatcgctacgagcgcgggtcgagagacacttatgcttggcacaagcagaaacctactggggtcagaactaacgtgccttcgtggtgcgacaggatcctgtggaaatcttatcctgagactcacattatttgcaatagctacggatgtactgacgatatcgtgacaagtgatcattccccagtattcggcacttttgaagtgggagtgacctctcaatttatctctaagaagggattgagtaagacctcagatcaggcgtatattgagttcgagtcaattgaagctatcgtgaaaactgcaagtagaacaaagttttttatcgaattctacagtacctgcttagaagaatacaaaaaatcctttgaaaacgacgcccagtccagtgacaatatcaactttctgaaggttcagtggtcatcccgtcagcttcctacactgaagcctattctggctgatatcgaatatttacaggatcaacacctgctcctcacggtcaagagtatggacgggtatgagtcatatggagagtgcgttgtcgccttgaagagcatgatcggctctacggcccagcagttcctgacgttcttgagccaccgcggtgaggaaacaggaaatattaggggctcgatgaaagtgagagtacccacagagcggctcgggactcgggagcggttgtacgaatggatttctatagacaaagatgaggccggtgcaaagtcaaaggctccatccgtttcaagaggctcccaggaacccagatcagggtctcgcaaacctgcatttactgaagccagctgtccactttcacgattgtttgaggaaccagagaaacccccccccactggtcgccctcccgcccctccaagagccgcaccaagggaagagcccctgaccccgagattgaaaccagagggcgcacctgaacccgagggcgtagctgccccacctccaaaaaactccttcaacaatccagcctactatgtcctcgagggcgtgccccatcaactcttaccccccgaacctcctagtcccgcacgcgcacctgtgccaagtgccaccaagaacaaggttgccataacagtacccgcaccccaactggggcatcaccgacatccacgagtgggcgagggaagttcatccgacgaagaatcaggggggaccctgccccctcccgactttccgccgcctcctttgcctgacagcgccatcttcctccctccttccctggatccgctaccagggcccgtcgtccgcggcaggggaggggcggaagccaggggcccacccccaccaaaagcccatccaaggccaccccttccacctggccctagtccggcaagcacttttcttggcgaagtagcgtcaggcgatgaccgatcctgttctgtgctgcagatggccaagacactcagtgaggtagactatgcccctgccggaccagcacggtccgccctgctccctggcccattagagttgcagcctcccagagggctcccatccgactacgggcgtcctctgtccttcccacccccgaggatacgtgagtccatacaggaggacctcgccgaagaggccccgtgcctgcaggggggccgggcatccggtctgggggaagcgggaatgtccgcctggcttcgcgctataggcctcgagcgctatgaggagggacttgtccacaacggatgggatgacttagaattcctcagcgacatcaccgaggaagacctggaggaggccggtgtccaggacccagcacacaaacggttactgctggacactctccagctttctaaatag

SEQ ID NO: 120620 - DNA, 57 bp, synthetic construct
  misc_feature 1..57: note = Description of Artificial Sequence: Synthetic coding sequence
  source 1..57: mol_type = other DNA
atggctagcgcctgcggcgccccaggcccaggcggcgcactgggttcacaagcttag

SEQ ID NO: 120621 - DNA, 474 bp, synthetic construct
  misc_feature 1..474: note = Description of Artificial Sequence: Synthetic coding sequence
  source 1..474: mol_type = other DNA
atggtcacacgactgctgcaacaacaaaaccttccgcaaacgggcgaacaggagctggaatccctagtgctcaagctaagcgtcttgaaagattttctgtccggtatccagaaaaaagccctcaaggctcttcaggatatgtctagtaccgccccaccagctcctcagcctagtacccgaaaggctaagacaatcccagtgcaggcttttgaagtgaagctcgatgtgacgcttggtgatctcacaaagataggaaaatctcagaagtttactctcagcgtcgacgtggaaggtgggcggctggttttactgcggagacagcgagacagccaagaggactggacaaccttcactcacgacagaattcggcagttaatcaagtcccaacgcgtgcagaacaagctgggtgtcgtattcgagaaagagaaggatcggacccagcgcaaagattttatcttcgtttccgctcggtag

SEQ ID NO: 120622 - DNA, 1200 bp, synthetic construct
  misc_feature 1..1200: note = Description of Artificial Sequence: Synthetic coding sequence
  source 1..1200: mol_type = other DNA
atgagcgatattcttcgcgagctgctgtgtgttagcgaaaaagcggccaacattgccagagcctgtcggcagcaggaagcactctttcagttgctgattgaagagaaaaaggaaggagaaaagaataaaaagttcgctgtcgactttaaaacgcttgccgacgtcctcgtccaggaggtgataaaacagaatatggagaataaattcccgggcctggagaagaacatctttggggaagagagtaatgaatttaccaatgactggggggaaaagataaccctgcgcctctgctcaactgaggaggagaccgccgagctgctcagcaaggtgctaaacggtaataaagtcgcctccgaggccctggcaagagtggttcaccaggatgtcgccttcaccgatccaaccctcgattctacggaaataaatgtcccgcaagatatcttgggaatttgggtcgaccccattgattccacttaccagtacatcaaaggaagtgccgacattaagagcaatcagggcatctttccttgtggattgcagtgcgtaaccatcctaatcggagtgtacgatatacagaccggagtgccgcttatgggagtcatcaatcagccattcgtgtcaagggaccctaacacactacggtggaagggccaatgttattggggactgtcttatatgggaacaaacatgcatagtcttcagttaacgattagccgaagaaatggctcagagactcacactggaaacaccggcagcgaggccgctttttcgcccagcttctctgctgtgatctctacgtccgaaaaagagacaatcaaagctgcgttaagtagagtctgtggggacagaatctttggagcagctggggcaggctacaaatctctttgtgtcgtccagggactagtggatatctacatatttagcgaagacacaactttcaagtgggattcttgtgcagcccacgccatcctgcgcgccatgggtggcggcatagtcgatctgaaggaatgtctcgagcggaacccagagaccgggctggacttgcctcagctcgtgtatcatgtcgagaatgagggcgcggcgggggtggatcggtgggccaataaaggcggcctgatcgcatatagaagtcggaagcgattagagacattcctcagcctgctggtgcaaaacttggcgcctgcagaaactcacacatag

SEQ ID NO: 120623 - DNA, 1200 bp, synthetic construct
  misc_feature 1..1200: note = Description of Artificial Sequence: Synthetic coding sequence
  source 1..1200: mol_type = other DNA
atgagcgacatcctaagagagttgctgtgcgtttccgaaaaggctgcaaatattgcaagagcatgcagacaacaggaggccctttttcaactgcttatagaagagaaaaaagagggagagaaaaacaaaaaatttgccgtggatttcaagaccctggctgacgtcctggtgcaagaagtgattaagcagaacatggaaaacaaatttccaggactagagaaaaacatcttcggagaagagtcaaacgaatttaccaatgactggggagagaaaattactttgagactatgttccaccgaggaggagacggccgagctgctctcaaaagtgttgaatggaaacaaagtggctagcgaagctttggcaagagtagtccaccaggatgtagccttcacggaccccactctcgactctacagaaatcaatgtgccccaagacatacttggcatctgggtggaccctatcgattccacttatcaatacatcaagggaagcgcagacatcaagtctaatcaaggcattttcccatgtggacttcagtgcgtaacgattctcataggtgtgtatgacatacaaaccggggtgccattgatgggtgtgattaaccaaccttttgtgtctagggacccgaatactcttcggtggaagggacagtgttactggggcctgtcatacatgggcacaaatatgcatagtctccagctgacgattagcaggagaaacggatctgaaacacacacagggaatacagggtctgaggcagctttttccccgagtttttccgctgttatttctacaagtgaaaaagagaccattaaagccgctctgtctagagtctgcggtgaccggatcttcggcgctgccggcgcgggttataaaagcctctgtgtggtccaggggttggtggacatctatattttttcggaggacaccacctttaaatgggacagttgcgctgcacatgctattctcagagcgatgggaggcggaattgtcgacctgaaagaatgcctggagcggaaccctgaaacaggcctggatttgccccagctcgtgtaccacgttgaaaatgaaggcgcagctggagtagatcgttgggcaaacaagggcggcttgatcgcttacagatcacgaaagcgattagaaacattcctctctcttctagtgcagaacctggcacccgctgagacacacacttag

SEQ ID NO: 120624 - DNA, 468 bp, synthetic construct
  misc_feature 1..468: note = Description of Artificial Sequence: Synthetic coding sequence
  source 1..468: mol_type = other DNA
atgtccgatatcctgcgcgaactgctctgtgtctccgaaaaggcagctaatatagctcgtgcttgccggcagcaggaagctctctttcagttacttatcgaggagaaaaaggaaggagaaaagaacaagaaattcgcagtagattttaaaaccctcgcggacgtgctggtgcaggaagtaattaagcaaaacatggagaataagtttcctgggttggaaaaaaacattttcggggaagagtccaacgagttcactaatgattggggagaaaagattaccctgcgcctgtgtagcactgaagaagagactgcagaactccttagtaaagttctgaacggaaacaaggtcgcctcagaagccttggctagagtggttcaccaggacgtggccttcacggatccaacccttgactctaccgagattaacgttccccaggacattctcggtatctgggtggatccaatttag

SEQ ID NO: 120625 - DNA, 267 bp, synthetic construct
  misc_feature 1..267: note = Description of Artificial Sequence: Synthetic coding sequence
  source 1..267: mol_type = other DNA
atgtccgatattctcagggagcttctgtgtgtgtccgaaaaagcagccaacatcgccagggcctgcaggcaacaggaagcccttttccagctgctgatcgaagaaaaaaaagaaggagagaagaataaaaagtttgccgtggacttcaagaccctggctgatgtgcttgtacaggaggtgattaagcagaacatggaaaataagttcccgggcctcgaaaagaacatattcggtgaagagagcaacgaattcaccaacgattggtag

SEQ ID NO: 120626 - DNA, 639 bp, synthetic construct
  misc_feature 1..639: note = Description of Artificial Sequence: Synthetic coding sequence
  source 1..639: mol_type = other DNA
atgagcgatatcttgcgcgaactgctatgtgtgagcgagaaagccgcaaatatagctcgtgcgtgccggcagcaggaagccctgttccagcttctcatcgaagagaagaaggagggcgaaaagaacaaaaaatttgccgttgatttcaaaacactcgctgacgtgctggtccaggaggtgatcaagcagaacatggagaacaagtttcccggcctcgagaagaacatcttcggggaggagagcaatgagtttaccaatgattggggcgaaaagataactcttagactgtgctcgacggaggaggaaacagcagagctgctctctaaggtcctaaatgggaacaaggtcgcatcagaagccctggcccgagtagttcatcaggatgtcgcattcactgatccaaccctagatagcacggagatcaacgtgccccaggatattcttggaatatgggttgacccaattgatagcacctaccaatacataaaagggtccgcggatatcaaaagcaaccagggcatctttccgtgcggccttcagtgcgtcactatactgattggtgtgtatgatatccaaaccggagttccactgatgggggttatcaaccaaccatttgttagtcgagatcctaatacttag

SEQ ID NO: 120627 - DNA, 30 bp, synthetic construct
  misc_feature 1..30: note = Description of Artificial Sequence: Synthetic coding sequence
  source 1..30: mol_type = other DNA
atgagcgatatccttcgcgagctactgtag

SEQ ID NO: 120628 - DNA, 642 bp, synthetic construct
  misc_feature 1..642: note = Description of Artificial Sequence: Synthetic coding sequence
  source 1..642: mol_type = other DNA
atgtctgatatactcagggaactgctgtgcgtttcagaaaaggccgcaaacatcgctcgtgcatgccgacaacaagaagcgttatttcagctcctgatcgaggagaaaaaagaaggtgagaagaacaaaaagttcgcagtcgatttcaagacactcgcagacgtcctggtccaggaagtgatcaaacaaaacatggagaataagtttcctgggttggagaaaaacattttcggagaggaatcaaacgaattcacaaatgactggggagaaaagattaccttacggctgtgcagcacagaagaggaaacagccgaactgttaagcaaggttcttaatggaaataaagtggccagcgaggctctggcccgagtcgtacatcaagacgtggcttttacggaccccactctcgactcgactgaaattaatgtgccccaggacattttaggtatctgggtggatcccattgactctacttatcagtatattaaagggtccgctgatatcaaatctaatcagggaatattcccctgcgggctccaatgtgtgactatccttatcggggtatacgatatacagaccggagtgccgctgatgggggttattaatcagcccttcgtttccagagacccaaataccctgtag

SEQ ID NO: 120629 - DNA, 573 bp, synthetic construct
  misc_feature 1..573: note = Description of Artificial Sequence: Synthetic coding sequence
  source 1..573: mol_type = other DNA
atgagtgacatcctacgagaactgctgtgcgtatctgagaaggccgcaaacatcgcccgcgcctgtcgccaacaggaggccctgtttcagcttctgattgaagagaaaaaggaaggggagaagaacaagaagttcgctgtcgacttcaaaaccctggctgacgtgctggtgcaggaggtgataaagcagaacatggagaataaattcccaggtctcgaaaaaaatatattcggcgaggagtccaatgaattcacaaacgactggggtgaaaaaatcaccctgagactatgctctactgaggaggagacagcagagcttctcagcaaagtgctgaatggcaataaagtggccagcgaagccctggccagagtggtgcatcaggatgttgccttcaccgatccaacactggacagcactgaaattaatgttcctcaggatattttggggatctgggtagatccaatagactcgacttaccagtatattaaaggatctgccgacatcaagagcaatcaaggcatcttcccatgcggactgcaatgcgtcactattctgattggggtttacgactag

SEQ ID NO: 120630 - DNA, 93 bp, synthetic construct
  misc_feature 1..93: note = Description of Artificial Sequence: Synthetic coding sequence
  source 1..93: mol_type = other DNA
atgagcgatatcctgagagagcttctctgcgtgagtgagaaggctgcaaacatcgccagagcttgcagacagcaggaagctctgtttcagtag

SEQ ID NO: 120631 - DNA, 207 bp, synthetic construct
  misc_feature 1..207: note = Description of Artificial Sequence: Synthetic coding sequence
  source 1..207: mol_type = other DNA
atgtcagatatcctcagagagcttctgtgcgtgagcgagaaggccgccaatatcgcacgagcttgccggcagcaagaggcattgtttcaactcctgattgaggaaaaaaaagagggagagaagaacaaaaagttcgccgttgattttaagaccttggcagacgttttagtgcaagaagtgattaaacaaaatatggaaaataagtag

SEQ ID NO: 120632 - DNA, 432 bp, synthetic construct
  misc_feature 1..432: note = Description of Artificial Sequence: Synthetic coding sequence
  source 1..432: mol_type = other DNA
atgagcgatattctgcgggagctgctctgtgtctctgaaaaagccgccaacatcgccagagcctgccggcagcaagaagccctcttccagcttttaatcgaggagaaaaaggagggcgaaaaaaacaagaagtttgccgtggattttaaaacattggccgacgtgttggtgcaggaggtgattaaacagaatatggaaaacaaatttcctgggcttgaaaagaacatcttcggggaagaaagtaatgaattcactaacgattggggagagaagattacactgcgtttatgctccacagaggaagagaccgccgagctgctatccaaggtgctgaacggaaacaaagtcgctagtgaagctttggcccgcgtggtgcatcaagatgtggcctttactgaccccaccctcgactctaccgagataaatgtttag

SEQ ID NO: 120633 - DNA, 1200 bp, synthetic construct
  misc_feature 1..1200: note = Description of Artificial Sequence: Synthetic coding sequence
  source 1..1200: mol_type = other DNA
atgtcagacattctacgcgagctgctgtgtgtctccgaaaaggctgccaacatcgcccgggcctgcagacagcaggaggcactattccaacttctgattgaggaaaagaaggagggggaaaaaaataaaaaatttgccgttgacttcaagaccctggcagatgttttagtacaggaagtcatcaagcaaaacatggagaacaagtttccaggcctcgaaaagaacatttttggcgaagaatccaacgagtttacaaatgactggggcgaaaagatcacccttaggctctgctcaaccgaagaagagacggccgaactgctgagtaaagtgttgaatggcaacaaggttgcttcagaggcgctggctagagttgtgcaccaggacgttgcctttacggaccctactcttgattccactgagatcaacgtacctcaagacatcctgggaatttgggtagaccctattgacagcacttaccagtacatcaaggggagcgccgatattaaatccaaccaaggaatcttcccatgcgggctgcaatgtgtgactatcctcatcggggtatatgacattcagacaggtgtcccgttgatgggcgtgatcaatcagccctttgtctcaagggatcctaatactctgcgttggaagggacagtgttattggggattatcttatatgggaacaaatatgcattccctgcagctcacaatttcccggcggaacggcagtgagacccataccggtaataccggaagtgaagctgccttttctccctcgttttccgccgtgattagtacaagcgaaaaagagaccattaaagctgctctctctcgcgtttgtggtgacaggatttttggtgcggccggagcgggctacaaatctctctgcgtagttcaagggcttgtcgatatttatatatttagcgaagacactacctttaagtgggattcttgtgctgcccatgccatcctcagggctatgggaggtggtatcgtcgacctgaaggagtgcctggagcggaacccagagacggggctggatcttcctcaactcgtgtaccacgttgagaatgagggggcagctggggtggatcgttgggcaaataagggcggactgatcgcttaccgcagcagaaaacgcctggaaacgtttttgtctctgcttgtacagaacctggcaccggctgaaacgcatacttag

SEQ ID NO: 120634 - DNA, 2934 bp, synthetic construct
  misc_feature 1..2934: note = Description of Artificial Sequence: Synthetic coding sequence
  source 1..2934: mol_type = other DNA
atgaccgcccgagaacacagcccgaggcatggagccagagcccgcgcgatgcagcgcgcctctactatcgacgtcgctgccgatatgcttgggctctctctggcagggaatatccaggaccctgatgagcccatcttggagttttcgctggcctgctcagaattacacaccccctctctggacagaaaaccaaactcattcgtcgccgtcagcgttaccacaccaccacaagctttctggaccaaacacgctcaaactgagattatcgaggggacaaacaaccccattttcttgtctagcatcgcattcttccaggacagcctgatcaaccagatgacacaggtgaagttatcagtctacgacgtgaaagatcgcagccaagggaccatgtacttgttgggttcgggtacattcatcgtcaaagatctgctgcaggaccgacaccatcgcctgcacttgacactcagaagcgccgagtccgatagagtgggcaacattactgtcattggctggcagatggaggaaaagagtgaccaacggccacccgtgacccggtcagtggacacagtgaacggccgcatggtactgcccgtagatgaaagcctcactgaggcactaggcatccgctcaaaatatgcatcccttcgaaaagatacactgttgaaatcagtgtttggaggcgcgatctgcaggatgtatcgatttccgacaacagacggaaaccatttgcggattcttgagcagatggcagaatctgtcctgagcttacatgtccctagacagttcgttaaattgctgctggaggaagatgctgcgcgagtgtgtgagttagaggaactgggcgagttgagcccatgctgggagagcctacgccggcagatagtgacgcaatatcagaccatcatactgacctaccaagaaaatctgaccgatttgcaccagtaccgcggtcctagttttaaggctagctctcttaaggcggacaagaagctggaatttgtgcccacaaacctccatatacagcgaatgagagtccaggatgatggaggatccgatcaaaactatgatattgtcaccattggagcaccagccgcccactgtcaagggttcaagtctggtgggcttaggaaaaagctacataaattcgaggagaccaagaaacatttcgaggaatgttgtaccagttcaggctgtcaaagcatcatatacatcccccaagatgtcgtccgggccaaggagattatcgctcagataaacacgctgaaaactcaagtgtcctactatgccgaaaggctgagcagagctgcgaaagatcggtccgcgacaggtttggaaaggactctggcaatcctggccgataagactaggcagttggtcaccgtatgcgactgcaaattattggcaaacagtatccacgggctgaacgccgcccgccccgactatatcgctagcaaggcctcgcctacgtcgaccgaagaagaacaggttatgttaagaaacgaccaagatacactgatggctagatggacagggagaaattcccggtcctccctgcaggtggattggcacgaggaagaatgggagaaagtatggttgaacgtagataagagcttggaatgtatcatacaaagggtggataaactgttacaaaaagagcggctgcatggggaaggatgtgaggacgtttttccttgcgctggatcctgtacatctaagaaggggaatccggatagccacgcttactggatccgacccgaggaccccttttgcgatgtgccctcttccccatgtccgtccaccatgccctccaccgcatgtcacccccacttaacaactcattgcagtcctcctccagaggaaagttccccgggcgagtggtcagaggccctgtacccactcctcaccaccctaaccgattgtgttgccatgatgtccgataaggccaagaaggctatggtttttctgttgatgcaggactccgcgccgaccatcgccacctatttgagtctgcagtacaggcgtgacgttgtgttctgccaaacgttaaccgctcttatctgcggcttcattattaagcttcggaactgtctccatgatgatggatttcttcggcagttatataccattggtttgctagcccagttcgaatctctgctgtccacatatggagaggagctagccatgcttgaagacatgtctctgggtatcatggacctgaggaatgtgacgttcaaagtgacccaggctacctctagcgcatctgctgacatgctgcctgtgatcactggcaatcgggatggatttaatgtgagagtgcccctcccaggcccgctgtttgacgctctgccaagggagattcaaagtgggatgctcctccgtgtacagcccgtcctgttcaacgtgggtatcaacgagcagcagacattggctgagcggttcggcgacacctctctgcaggaagttataaacgtggaatcccttgttcggttgaattcctacttcgaacagtttaaagaggtcttacctgaggactgcctaccaagatctcgttcacagacctgccttccggagttattacggttcttaggtcagaacgtccatgcgcggaaaaacaagaacgtggatattctttggcaggctgcggagatctgtcgccgcctcaatggagtgcgcttcactagttgtaagagtgctaaggatcgcacagccatgagtgtcacgctcgaacagtgtctgatcctgcaacatgagcatggcatggccccccaggtgtttacgcaggctctggaatgcatgcggtctgagggatgccgacgtgagaacaccatgaagaatgtaggctcacggaagtacgccttcaatagcttacagctgaaagcattccccaagcattaccgaccaccagagggtacatatgggaaagtggagacatag

SEQ ID NO: 120635 - DNA, 2817 bp, synthetic construct
  misc_feature 1..2817: note = Description of Artificial Sequence: Synthetic coding sequence
  source 1..2817: mol_type = other DNA
atgacagcacgggagcactctccgcgccatggcgcgcgcgcccgagctatgcagagggctagcacaatcgacgtggctgctgacatgctgggacttagccttgctgggaacattcaagatccagatgaacccatcttagagttctccttggcctgctccgaactccacacgccatcactggaccggaaacccaattcgttcgtggctgtatctgtgacaactcctcctcaggccttttggacaaaacacgcccagactgagattatcgagggaacgaataaccctatcttcttgagctcaattgccttttttcaagatagccttataaaccaaatgacccaggtgaaactgtcggtctacgatgttaaggacaggagtcaaggcacgatgtatctcctggggagcggaaccttcatcgtgaaggatctgctgcaggacagacaccatcggcttcacttgacgctcaggtctgctgaatcagatcgcgtcggcaacataaccgttatcgggtggcagatggaggagaaatccgatcagcgcccgcccgtgacacgcagtgtcgacaccgttaacggaagaatggtgctgccagtagacgagtccctaacagaggccctggggatcagatcaaagtacgcctcattgcggaaggataccctgctcaagagcgttttcggcggcgccatctgccgaatgtatcggttcccaaccaccgatggcaatcatctgcgcattctggaacagatggcggagtctgtgctgtcactgcatgtcccacgtcagttcgtgaaactgctgcttgaagaagacgccgctagagtctgtgaacttgaggagctcggtgaactgagtccatgttgggagtctctcaggaggcagatcgtgactcagtaccagacaattattttaacataccaagagaacttaacagacctgcaccaatacagggggccctcatttaaagcctcctcacttaaggctgataaaaagttagagtttgtgccaacgaacctgcatattcagagaatgagagtccaagatgacggtggatcagaccagaattacgatattgtgacaatcggcgcccctgccgcgcattgtcagggttttaagtccggtggcctaaggaagaagctacacaagtttgaagaaacgaagaagcattttgaggagtgctgcacatcctctggctgccaatctatcatctacatcccccaggatgtggttcgggcgaaggagattatagcgcagattaatactctaaaaacacaagtttcttattatgcagaacgtctaagcagggccgccaaagatcgcagcgctactgggctggagcgaactctggccatcttggctgataagactaggcagctagtaaccgtttgcgactgcaaactccttgctaattctattcacgggcttaatgccgctagacccgactacatcgcttctaaagcgtccccaacctctacggaagaggaacaggtgatgctgagaaacgaccaggacaccctgatggctcggtggaccggtcgcaactccaggtcaagtttgcaggtggactggcacgaggaagaatgggaaaaggtttggcttaacgtcgacaagtcactggagtgcatcattcaaagagtagacaagctgctgcagaaagagcgccttcatggagagggctgcgaagatgtctttccgtgtgccgggtcctgtacctccaagaaggactgttctcctccacccgaggaatcatctcccggcgagtggagtgaagccttgtatcctctactgaccactttaaccgattgcgtcgccatgatgtccgataaggccaagaaagccatggtattcctgctcatgcaggatagcgcacccacaattgctacctacctaagcctgcagtaccgacgcgatgttgtgttttgccaaacgctcacagctttgatctgtgggttcataataaagctgcggaactgtctccacgacgacggattcttacgtcaattatacaccatcgggctactcgcccagttcgaaagcttgttgtccacctatggggaggagttggctatgctagaggacatgtctctgggcataatggacctgcgcaatgtcaccttcaaagtcacccaggccacgagcagtgcttctgccgatatgttacccgtaataactggaaatagggacgggtttaacgtgagggtaccactcccaggacccctattcgacgccctgcctagggaaattcagtccggtatgctcttgagagtgcaacctgtgctgtttaacgtgggcataaatgaacagcagacccttgcggagaggttcggggacacatcattgcaggaagttattaatgttgaatccttggtaaggctgaactcatactttgagcagtttaaggaggtgctgccagaggactgcctgccccggagccgatctcaaacatgtctgccagaattgctgagattcttgggtcagaatgtgcatgcccgcaagaataagaacgtggatattttatggcaggcagctgagatatgtagaagattaaatggcgtgaggtttacatcatgcaaaagcgctaaagaccgcaccgctatgtccgtcactttagagcagtgcctgatccttcagcatgaacacggaatggcgccccaagtttttacccaggcattagaatgtatgcggtctgaaggctgccgtagggagaacactatgaagaatgtcggatctaggaaatacgcatttaattccctgcaattgaaggcattccctaagcattaccgccctcccgaaggcacctacggcaaggtcgagacgtag

SEQ ID NO: 120636 - DNA, 2865 bp, synthetic construct
  misc_feature 1..2865: note = Description of Artificial Sequence: Synthetic coding sequence
  source 1..2865: mol_type = other DNA
atgacagctagggagcactcccctcgccatggagcgagagcccgagccatgcagagagcctctaccatcgacgtggccgcagatatgctggggctctctctcgcgggaaatattcaagatcccgacgaacctatactggagttcagcctggcttgtagtgagctgcatacgcctagtctggatcgtaagcctaacagtttcgttgcagtgtcggtgacaaccccacctcaggccttttggaccaaacatgcgcaaacggaaattattgagggcaccaataatcccattttcttgtcttccatagcctttttccaggactctctaatcaaccagatgacgcaagtgaagctctcagtctatgacgtgaaggaccgatctcagggcaccatgtatcttctaggctctggcactttcattgtgaaggacctcttgcaggaccgccatcatagattacacctaaccctgaggtcagctgaatctgacagagtgggcaatataactgtcatcgggtggcagatggaagagaaatcagaccaacggccccccgtgactcggtccgtagatactgtcaacggacgcatggttctgccagtggacgaaagtttgactgaggctctcggcattaggtccaaatacgcctcccttcgaaaagataccctgctgaagtccgtgttcggaggtgcaatttgtcgcatgtataggttcccgacaaccgacggcaaccatttaaggattctggagcagatggccgagtcagtactgtcccttcacgtgcctaggcaattcgtgaaactgctgcttgaggaagatgcagcacgagtgtgcgagctggaagagctgggggagctttccccctgttgggaatccctgagaagacaaattgtgacacagtaccagacgatcattttaacatatcaggaaaacctgactgacttacatcagtaccgagggccctccttcaaagcttcctccctaaaggctgacaagaagcttgagtttgtccccacaaacctccacattcagcggatgcgcgtgcaggacgacggtggaagtgaccagaactacgatatcgtcacaatcggggcaccagctgctcattgtcaaggctttaagagcggcggactgaggaaaaagttgcataagtttgaggagacaaaaaagcatttcgaagaatgctgcacttcctctggctgtcagagcatcatctacatcccacaagatgtggtgagagcaaaggagatcatagcccagataaacaccctgaagacacaggtgtcctactatgctgagaggctgtctcgtgcagccaaggatcgatcggccactgggctggaaagaaccttggctatccttgccgacaaaacccgacaattggttaccgtttgtgattgcaagctattagccaactccattcacgggttaaacgccgcacggcctgattacatagccagcaaggcctcgcccacaagcaccgaagaagagcaggtgatgttgcgtaacgatcaggacacactcatggcaagatggactgggcgcaatagcaggtctagcctgcaggtggactggcatgaggaggagtgggaaaaagtgtggctgaatgtcgacaagtctcttgagtgtatcatccaacgcgtggataagctcctgcagaaagagaggctgcacggagagggttgtgaagatgtgtttccgtgcgccggtagttgcaccagtaaaaaagattgcagcccacctcctgaagagtcaagccccggcgagtggtccgaggctctgtacccactcctgactaccttaacggactgtgtcgctatgatgagtgacaaagcaaaaaaagccatggtgttcctactcatgcaggatagcgctcccacaattgctacttatctaagccttcagtaccgccgagacgtggttttctgccagacattgaccgctttgatatgcgggtttatcatcaaactcagaaactgccttcacgacgatggtttcttgagacagctgtatacgatcggacttttggcccagttcgagtccctactatcaacttatggcgaggagctggctatgctggaggatatgtccctgggcattatggacctgcgaaacgtgactttcaaggtgactcaggctacttccagtgcttctgccgacatgttgcccgtgattacaggtaaccgggacgggttcaatgttcgcgtgcccctaccaggccctctcttcgacgccttgccaagggaaattcagagcggtatgctgctgcgggtgcagccagtgctgttcaatgttgggatcaacgagcagcagacactggcggagagattcggggacacttccctccaggaagtaatcaatgtcgaaagcctagtgagactgaactcctatttcgaacagttcaaagaggtgttaccggaagactgtcttcctcgttcacggagtcagacctgccttcctgagctcttgcgctttctagggcagaacgttcatgcacggaagaacaagaatgtagatatcctctggcaggccgcagagatttgtcgcagacttaatggtgtcaggtttacatcgtgtaagtccgccaaggaccgcactgcgatgtcggtcaccctcgagcagtgcctgattttgcagcatgagcacggtatggctccccaggtgtttacacaggccctggagtgtatgcgctccattggtacccgagaggtggttactcaaaagaacctgagcggactggttcctatcagggacctccggcttgacccaagcctgctgtgcagcattcccctcctagccctgtcaccaaacctgctgatcgtctggttgtttttgagcattgcctacctggtcacaaaacttaggtgcaagtag

SEQ ID NO: 120637 - DNA, 2919 bp, synthetic construct
  misc_feature 1..2919: note = Description of Artificial Sequence: Synthetic coding sequence
  source 1..2919: mol_type = other DNA
atgactgcgagggaacatagtccgcgccacggggctcgcgcgagagctatgcaacgcgcaagcactatcgatgttgcagcagacatgctgggtctgagcctcgcaggcaacatccaggaccctgacgagccaatcctcgaattttctttggcgtgcagcgaattgcatacacctagcctagaccgaaagccaaatagcttcgttgcagtgagtgtaactacccctccccaggccttttggaccaagcacgcccagaccgagattatcgaggggactaataatccaatttttctttctagcatcgctttttttcaggatagtcttatcaatcagatgactcaagtaaagttgagcgtgtacgacgtgaaggaccgatctcagggaactatgtacttgctgggttctggcacattcatagtgaaagacctgctccaggatcgccaccatagacttcacttaacactgagatctgccgagtcggaccgggtagggaacatcacagtcattggctggcagatggaggaaaaatcagatcaacgcccgcccgtgacccgcagtgttgacacagttaacggtcggatggttctgcctgtggacgaatctctgaccgaggccctgggcatccgaagtaagtacgcatccctacgcaaggacacactcttgaaaagtgtcttcggaggagccatttgtcgaatgtacaggtttcctaccacggatggcaatcacctgagaattctcgaacaaatggccgaaagcgtgctgtctctacacgtgccccgccagtttgttaaactcctgctggaagaagatgcagcccgcgtctgtgagctcgaggagttgggtgagctatcgccatgctgggagtcactgcgccgccagatagtcactcaatatcagactattattttgacgtaccaggaaaacttgactgacctacatcagtatagggggcccagcttcaaggcaagtagtctgaaggccgataagaaactggagttcgttcccacaaacctgcatatccaacgcatgcgtgttcaggacgatggcgggtccgaccaaaactatgatatcgtaacaataggagcgcccgctgcccactgccagggttttaaatctggaggtctgcgcaaaaaattgcacaaattcgaggagactaagaaacacacctctagtggttgtcagtctattatctacattccccaggacgtcgttagagcaaaagaaatcatcgcgcaaataaacaccctgaagacacaggtatcctactatgctgagcgcctcagccgcgcagctaaagaccgcagcgcgacgggtttggaaagaacactggctattttggccgataaaacacggcagctggttacggtgtgtgattgcaagctgctggccaactccattcatggcttgaacgcagcacgccccgattacatcgccagcaaggcttctcctacatcgaccgaagaagagcaggtgatgctcaggaatgatcaggatacacttatggcacgatggaccggtagaaatagtagatcttccctgcaggttgactggcatgaggaggaatgggaaaaagtatggctaaacgttgacaagtcacttgagtgcattatccagcgggtggataaattactgcagaaggaaaggcttcacggcgagggatgtgaagacgtgttcccctgcgcgggctcttgcaccagcaagaaaggcaatcccgactcccacgcctattggatacggcctgaagacccgttctgtgacgtgcccagcagcccttgtccttccacgatgccctccacggcgtgccatcctcatctcactacgcattgcagccccccaccagaagaatcctcacctggagagtggtcagaggccctctacccattgctgaccactttaacagactgtgtcgccatgatgagtgataaagctaagaaggctatggtttttctcctcatgcaggactcagccccgaccattgccacatatctgagcttgcaatatagaagggatgtggtgttctgtcaaaccttgacggctctgatctgtggctttattatcaagctaagaaattgcctgcacgatgacggatttctgcgccagttgtatactatcggtctgctggcacagtttgagagtctgttatccacatacggggaagagcttgcaatgctggaggacatgtcattgggcattatggacctgaggaacgtgacgttcaaggtgactcaagcaaccagcagcgcttctgcggatatgctgccagtgattacgggtaatcgagatgggttcaacgtaagagtgccgctgcccggccctttatttgacgcattaccacgcgaaattcagtctggcatgcttcttagagtgcagcccgtgttgttcaacgtgggcatcaatgagcagcagactctggcagagcggttcggggatacttccctccaagaagtaatcaacgtggagagtctggttcgcctgaactcatatttcgaacagtttaaggaggtgttaccagaagattgtctgcctaggtcccgatcgcagacatgcttgcctgagctactccggttcctagggcagaacgtgcacgcaaggaaaaacaagaacgtcgatattctgtggcaggcagcagaaatctgtcgtagactgaatggggtgcgctttacgtcatgcaagtccgccaaagatagaacagctatgagtgtgacacttgaacagtgtttgatactccaacacgagcatggtatggccccccaggtctttacccaggctcttgagtgtatgcggtccgaggggtgccgccgtgaaaacacgatgaaaaatgtgggctcccgcaagtatgcgttcaatagcctgcagctgaaggcattcccgaagcattatagaccacccgaaggtacatacgggaaggtggagacttag

SEQ ID NO: 120638 - DNA, 2934 bp, synthetic construct
  misc_feature 1..2934: note = Description of Artificial Sequence: Synthetic coding sequence
  source 1..2934: mol_type = other DNA
atgacagcaagagaacactcccctcgacatggggcccgggcacgggctatgcaaagagcgtctactatcgatgttgccgccgacatgctgggcctgagccttgccggtaacattcaggatcccgatgaacccattctcgagttctcactggcttgttccgagctacatacccccagtctggataggaagcccaactcttttgtggccgtcagcgtcacaaccccaccccaagccttttggactaagcatgcacagacggagattatcgagggtacaaacaatcccatttttctgtccagtatagctttttttcaagacagtttaattaaccaaatgacacaggtaaagctgagtgtttacgacgttaaagaccgctcacaaggtacaatgtacctgctaggaagcggcacattcatagtgaaagacctgcttcaggataggcaccataggcttcacctgaccctgagaagtgccgagagcgacagagtcggaaacatcacagtgatcggctggcaaatggaagagaagagcgaccaaaggccgcccgtaacacgcagcgtggatacggtgaacggaagaatggtactccccgtggacgaatccctgaccgaggctttaggcattcgaagtaagtatgcgagcctaagaaaagacaccctgctgaaaagtgtgtttggcggcgctatctgccgtatgtataggttccctaccactgatggaaaccatctgcgtatcttggagcaaatggcagagtcggtgcttagtttacacgtccccaggcagtttgtaaaactactgctggaagaagatgctgcccgtgtttgtgagcttgaggagctcggggaactaagcccctgttgggagtcactgaggagacagattgttacacaatatcagacaatcatcctgacataccaggaaaatctgaccgacctgcaccagtacaggggtccctctttcaaagcaagcagtcttaaagctgataaaaaactggaattcgttccgaccaacctacacatccagaggatgagggtgcaggacgacggcggtagcgatcagaactacgacattgtcactattggcgcccccgccgcccattgtcagggcttcaagagtggggggttgcgaaagaaactgcacaagtttgaagaaacaaagaagcacttcgaagaatgctgtacgtcctccggctgccagagcattatatacatcccccaggacgtggtgagagccaaagagatcatagcacaaatcaatactttaaaaacacaggtaagctactacgccgaacgactgtcgcgggccgcaaaagacagaagcgcaaccggcctggagcgtacactggcaatcctggccgacaagacacgtcagctggtcactgtgtgcgattgcaagctcctggccaacagtatccatggtttgaacgccgccaggcctgattacatagctagtaaagctagtcctaccagcaccgaagaagagcaggttatgctccgcaacgatcaagatactctgatggctcgctggactgggaggaactcccgatcctcactgcaggtggattggcacgaagaggaatgggagaaggtgtggttgaacgtggataaatccttagaatgcatcatccaaagagtggacaaacttttacagaaggagagactgcatggcgagggatgcgaggacgtctttccatgtgccgggtcttgcaccagtaaaaagggtaaccccgattcacatgcttactggatcagaccagaggaccccttttgcgacgttcccagttctccctgcccgagcacgatgccttccactgcatgccatccacacctcaccactcattgtagtcctccgcccgaagagtcatcccctggcgagtggtccgaagcgctgtacccactactcacaacactgacagactgcgtagccatgatgagcgacaaagccaagaaggccatggtgttcctgctgatgcaagattcagccccgaccatcgctacttatctcagtctgcagtacaggagggacgtggtgttctgccagaccctgacggctctgatctgtggatttattataaaactgcgaaattgtttgcacgatgatgggttcttgcggcagttgtatacgatcggcctgcttgcccaatttgagtccctgctgtcaacgtatggagaagagcttgccatgcttgaggacatgagccttggcataatggacctgaggaatgttacttttaaagtcactcaagccacatcctccgctagcgccgacatgttaccagtgatcaccggtaatcgcgacggattcaacgtgagggtgccgctgccaggccctctattcgatgcattaccccgcgaaatacagagtggaatgctgctaagagtccaacctgtcctgttcaatgtgggtatcaatgaacagcagaccctggcagaacgttttggcgacacgtcactacaggaggtgattaatgttgaaagtctggtgcgccttaattcctattttgagcagtttaaggaggtcctgcctgaagattgcctgccaaggagccgcagccaaacctgcctgcccgaactgctgaggttcttaggacagaatgtacacgcgcgaaagaacaaaaacgtggatattctctggcaagctgccgaaatttgtaggaggctgaatggggtgcgattcacaagctgtaagtccgctaaggatcggaccgctatgtcagtcaccctggaacaatgcctgatcctgcaacacgaacacgggatggccccccaggtgttcacacaagctcttgagtgcatgcgatctgaaggctgtcgtagggagaacacgatgaagaatgtgggctcccggaagtacgcattcaactctctccagctgaaagcatttccgaagcactatcggccaccggaaggtacctacggaaaggtggagacttag

SEQ ID NO: 120639 - DNA, 2817 bp, synthetic construct
  misc_feature 1..2817: note = Description of Artificial Sequence: Synthetic coding sequence
  source 1..2817: mol_type = other DNA
atgaccgccagagagcactccccccggcacggagcacgtgcacgagctatgcaacgcgctagtactatcgacgttgcggcggacatgctgggcctgtccctggccggcaacatccaggacccggatgagcccattttggagttctccctggcctgttcggagttgcacacgccctccctggatcggaaacccaattcttttgtagctgtgtccgtgaccactcctccacaggccttctggacaaagcacgcacagacagagattattgaggggactaataatccaatctttctttcgagcatcgccttctttcaggatagtttaatcaatcaaatgactcaggttaaactgtctgtatacgacgtgaaggatcgttcccaggggaccatgtacctcctgggctctgggacatttatcgtgaaagacctactgcaggatcggcaccaccgactgcacctaaccctgagatccgctgaatcggaccgggtggggaacatcaccgtaattggctggcagatggaagagaagagcgaccaacggccacctgtgactcgctcggtcgacactgtgaatggtcgcatggttctccctgtcgatgaaagcctgacggaggctctgggcatacgatctaaatacgcgagtcttcggaaagacacactgctcaaatctgtgttcggaggcgccatttgcagaatgtaccgtttccctacaacagatggaaatcacttgcggatactcgagcagatggccgaatctgtcctgtctctccatgtcccacggcagttcgtgaaactactgctggaagaggatgccgcacgtgtgtgcgagctggaggagctgggagaactgtcaccttgctgggagtctctgagaagacagattgtcacccaatatcagacgattatactgacctaccaggagaatctaacagatcttcatcaatacagggggccctcttttaaagcatcctccctgaaagccgacaaaaaactggagtttgtgcctacaaacctgcacatccagaggatgagagtccaggacgacggcgggagcgatcagaattatgatattgtgacaattggcgctcccgctgctcactgccagggctttaaatcaggcgggctaaggaagaagctgcacaagttcgaggaaaccaaaaaacagcaagaagaatcacggacaagctccggctgtcagtccatcatctacatcccacaggacgtcgtccgggctaaagagataatagcacagattaacaccctgaaaacccaggtgtcctattatgcagagaggctgtcgagggccgctaaggatagatccgccactgggctagagagaacactcgccatactggccgataaaacacgtcagctcgtgacggtatgtgattgcaaattgctcgctaactccatccacggtcttaacgctgccaggcccgattatatcgcgagcaaagcttcacccaccagcaccgaggaggagcaagtgatgctgaggaatgaccaagacactttgatggcaagatggacgggaagaaattctaggtcatctctgcaggtagattggcacgaggaggaatgggagaaggtgtggttgaacgtggataaatctctggaatgtatcattcaacgggtcgataagctgttacagaaggagagattacatggagagggctgtgaggacgtctttccttgtgctggttcttgtacatctaaaaaggattgttctccgcctcccgaggagagtagccctggtgaatggtctgaagcactctacccgttattaaccaccctgaccgattgcgttgctatgatgtccgacaaagctaagaaggcaatggtgtttctgctgatgcaggactccgcacctacaattgcgacttacctgagcctacagtatcgccgcgatgttgtcttttgccaaactcttacagccctcatttgcggattcatcataaagcttcgcaattgtttgcatgacgatggcttcctaaggcagctgtatactataggtctcctcgctcagtttgagagcttgttatccacatacggcgaagagttggcaatgcttgaagacatgagtctgggcatcatggacctgcggaacgtcaccttcaaagtgacgcaagcaacctcgagcgcaagtgcagatatgctccctgtgatcacagggaatcgagacggatttaatgtgagggtgcctctccctggaccactgttcgatgccctgcccagggagatccagtcaggcatgctcttacgggtccagcccgtcctgttcaacgtgggtattaacgagcagcagacgttggctgaaagatttggggacacgtcactgcaggaagtgataaacgtggaatctttagtaaggctaaattcctatttcgaacagttcaaagaagtactacccgaggattgtctccctagatcaagatcgcagacctgtctccccgaactgctccggttcctaggtcagaatgtccacgctagaaaaaataaaaacgtcgatattctgtggcaggctgccgagatttgtcgaagactgaacggcgtgaggtttacaagctgcaaatctgctaaggatcggacggctatgagtgttacgttagaacagtgtctaatcctccaacatgaacatggaatggctccccaagtgtttacacaagctttagagtgcatgcggtccgagggctgccgccgggagaacactatgaaaaacgtggggagccgcaagtacgccttcaactctctgcagttaaaggcgttccctaagcactatcgtccgccggaaggaacctacggcaaggtggagacgtag

SEQ ID NO: 120640 - DNA, 3021 bp, synthetic construct
  misc_feature 1..3021: note = Description of Artificial Sequence: Synthetic coding sequence
  source 1..3021: mol_type = other DNA
atggagggccagtctagcagaggatccaggagacctggaactagggccgggctcggatcactgcccatgcctcagggagttgctcagacgggagcgcctagcaaggtggactcgagctttcagctcccggctaagaagaatgctgcgttgggaccatccgagcctcgcctggctctggctcctgttggccctcgcgccgcgatgtctgcctctagcgagggtcctagactggcgctggctagccctcggcctatcctggcccccttgtgtactcctgaaggacagaaaactgctactgcccataggagctcaagcctggcccctacctcggttggccagctggtcatgagcgctagcgctgggcccaaacctccaccggccacaactggctccgtccttgcaccgacatcgctcggactggtaatgcccgcctctgctggccctagatcgccccctgttaccctcggacctaaccttgccccaacaagccgtgaccagaaacaagagccccccgcatccgtcgggcccaagccaactctggcagcctcaggtctttccctcgccttggcatcagaagagcagccgcccgaactgccttccaccccttctccagtgcccagtcccgttctttctccaactcaggaacaagcacttgcacctgcttccacagcctcaggggccgcgtcggtgggacagaccagtgctaggaaacgggatgctcccgctccacgccccctgcccgccagcgaaggccatttacagccaccagcccaaacatccggccctacaggttccccgccctgtattcagacaagcccggatcccaggctgagcccctcttttcgggcaagaccagaagctctccactcttctcccgaagaccctgtgctgcccagaccaccacagacgctgccacttgacgtgggtcaaggtcccagcgagcctggcacacacagccctggactgcttagtcccacattcaggccaggagccccatccgggcagactgttccaccacccctgcccaaaccacccaggtcccccagccgtagcccatcccacagtcccaacaggagcccgtgcgtcccacccgcacctgacatggcacttccgcggctcggcactcagagcaccggtccaggccgctgtctgtcccctaatttgcaggcccaggaagcccctgctccagttacaacctcctcaagcaccagcactctgtccagcagcccgtggagcgcacagcccacctggaaatcagatccaggcttccggattaccgtagtgacgtggaacgtagggacagctatgccacctgatgacgttactagtctcttgcatctgggcggaggggatgattccgacggcgcggatatgatcgcaattggcctacaggaagtgaatagcatgctcaataagagattgaaggacgccctgtttactgatcagtggagcgagttgttcatggacgccctgggacccttcaatttcgtcctcgtgagtagcgtgaggatgcagggggtgatccttcttctgtttgcaaaatactatcacctgccctttctcagggacgttcagacagactgtactcggaccggtctgggcggctactggggcaacaaaggtggggtgagcgtacgcctggccgctttcggtcacatgctgtgcttcttaaattgtcatctaccagcccacatggacaaagccgagcagcgcaaagataattttcaaaccatcctgtcactgcagcagtttcaaggcccgggcgcacaggggatccttgaccatgacctcgtgttttggttcggagatttgaacttcaggatagagagttatgatttgcactttgtgaagtttgcaattgatagtgaccagctgcatcagctgtgggagaaagatcagctcaacatggcaaagaacacatggcccatactcaaaggcttccaggaaggaccactcaactttgctccaacattcaagtttgatgtagggacgaacaaatacgacacatcagctaagaaaagaaagcctgcttggacagaccgcatcttgtggaaagtcaaggcacccgggggtggccctagcccctctggaagaaagagccaccggctgcaggtgacgcaacattcctaccgtagccatatggagtacacagtgtcagatcacaagcccgtagccgctcaatttctactgcaatttgctttccgcgatgacatgcctctggttaggctagaagtagctgacgagtgggttcgccctgagcaagctgtggtgcgatatcgcatggaaacggtattcgcgcgctctagttgggattggatagggttatatagggttggcttccgccattgcaaggactacgttgcctatgtttgggccaagcacgaggacgtggacgggaacacataccaagtgacgttctcagaggagtcactgccaaagggccacggtgacttcattctgggctattactcgcacaatcatagcattctgatcggcatcacggaaccattccagatctctcttccctcaagcgaactcgccagctcaagcacagacagttcaggcacaagcagcgaaggggaggatgatagcacactggaattgctggcccctaagtctaggagcccctccccaggaaaatcaaaacggcatagaagccgttcgcccgggctggcccgcttccccggcctggctctgaggcccagtagcagggaacggcgtggcgcctctcgttctccttccccacagagccgccgattgtcgcgggtagcaccagacagaagttccaacggatctagtcggggctcatcagaggaaggtccgtcaggacttcccggcccatgggctttcccgccagcagtgccaaggtccctggggttgctgcccgccctcagattagagaccgttgatccaggcggtggaggatcttggggccctgaccgagaggctctggcccccaattcactgtctccaagtcctcaaggccaccgcggattggaggaaggcggccttggtccttag

SEQ ID NO: 120641 - DNA, 1920 bp, synthetic construct
  misc_feature 1..1920: note = Description of Artificial Sequence: Synthetic coding sequence
  source 1..1920: mol_type = other DNA
atggcactgccccgtctgggaactcaatcaacagggcccggccggtgtctgagccctaatctgcaggcacaagaggcacctgcccccgtgacgacctcatcctccactagtaccctctcttcctccccatggagtgcacagcccacgtggaagtctgatccaggcttcagaattacagtcgttacctggaacgtgggaacagccatgccccccgatgatgtcactagcctgctacacctcggagggggagatgattctgacggggccgacatgatcgctataggccttcaagaggtgaattccatgctaaataaacggctaaaagacgcactgtttaccgatcaatggtcagagctgtttatggatgccctgggcccattcaatttcgtgttggtgtcttccgtgagaatgcaaggggtcatcctcctgctgtttgccaagtactaccatttacctttcctcagggacgtccagacagactgtacgcggaccggactgggcggctattgggggaataaagggggagtgagcgtgaggctggcagcatttggccatatgctctgtttcctcaattgtcatttgccagcacatatggacaaagcggaacagagaaaagataactttcagacaatattatccctgcaacagtttcagggccccggtgcgcaaggtatcctggatcacgatcttgtcttttggtttggtgacctgaacttccggatcgagtcctacgacctacattttgtcaagttcgccatcgattccgaccaactacatcagctgtgggaaaaagaccaactgaacatggctaaaaatacatggcccattttgaaaggcttccaggagggccctttaaacttcgcccccaccttcaaatttgacgtcggcacaaacaagtatgatacctctgctaagaaaaggaaacccgcctggacagaccgcatcctctggaaagtgaaggctccaggcgggggcccctctccatcaggccgtaagtctcaccgcctccaagttacccagcactcataccgctcacacatggagtacacggtgagcgatcacaaaccggttgcggcacagtttctgctgcagttcgcctttcgcgacgacatgcccctggtccgcctggaagtcgccgatgaatgggtgcgccccgagcaagccgtggtaaggtacagaatggaaacagtcttcgcgcgtagctcttgggattggattggactctaccgcgtaggatttagacattgtaaagactacgtcgcctatgtttgggccaagcacgaggacgtggatggaaatacctaccaggtgactttttccgaagagagtctgcctaagggacatggcgacttcattcttgggtattattctcataatcattctatcttaatcggcatcacagagccctttcagatcagccttccatcatccgagttggccagctcttccacggacagttccggcacctcctccgaaggagaagatgactccacccttgagcttctcgcgcctaagtccaggtccccaagtcccggaaagagcaagcggcatcggtccagaagtcctggcctggccagattcccaggcctggccttgaggccctcgtctagggagcggcgaggcgcttccagatccccatcccctcagtccagaaggctgtctcgggttgcacccgaccgcagttccaatggctcctctagggggagttctgaggagggaccgtccgggctgccaggaccttgggctttcccacccgcagtgcccagatccctaggccttctacccgccctacggctggagaccgtggacccgggggggggcggctcttggggcccggaccgggaagccctggcacccaactccctgtccccttcgcctcagggccacagagggctggaagagggcggcttaggcccgtag

SEQ ID NO: 120642 - DNA, 1917 bp, synthetic construct
  misc_feature 1..1917: note = Description of Artificial Sequence: Synthetic coding sequence
  source 1..1917: mol_type = other DNA
atggagggccagtccagccgcgggtcacgtcgaccaggcacccgagcaggcttagggtccctgccaatgcctcagggcgtcgctcagactggcgccccttccaaagtggacagtagcttccagctgcctgccaagaagaatgccgcgcttggacctagtgaaccaagaattacagtggttacttggaatgtcgggaccgctatgccacccgacgacgtgaccagtctcctacacttaggcggtggagacgattccgatggcgctgatatgatagccatagggctgcaggaagtgaatagcatgctgaacaaaaggctcaaggatgctctgttcactgaccaatggtccgagctgtttatggatgccttgggccccttcaatttcgtgctcgtgtcctctgtgcgaatgcagggggtcattcttctcctcttcgctaaatattatcacctgcccttcctgagggacgtccagactgattgtaccaggactggtctgggaggctactggggaaataaaggcggagtgagcgttcgacttgcagctttcggtcacatgctttgtttcctgaactgccatctgcccgcacacatggataaggcagaacagcgcaaggataactttcagacaattttgagccttcagcagtttcagggccctggcgcccagggcattttggaccacgacctcgtgttttggttcggcgaccttaattttcggattgagtcctacgacttgcactttgtaaagttcgctattgattctgaccagctgcatcagctctgggaaaaagatcaactcaacatggcaaagaatacttggcctattctgaaagggtttcaagaaggcccactgaactttgcaccaacctttaaatttgatgtcggaactaataaatatgatacctccgctaagaagagaaaaccagcctggacagataggattttgtggaaagttaaagctcccggcggaggcccgagcccctcaggcaggaaaagccaccgccttcaggtgactcagcatagctatcgctcacacatggagtataccgtgagcgatcataaacccgtggccgcccaatttctgctccagttcgccttccgcgacgacatgccactcgtcaggctggaggtggcagatgagtgggtgcggcccgagcaggctgtcgtacggtatcggatggagacagtgttcgcacgctcctcatgggattggatcggcctctatagagtagggttcaggcattgtaaggattatgtcgcctatgtgtgggcgaagcacgaggatgttgacggtaacacataccaggttacttttagtgaggagagcctgcccaagggacatggcgattttattctcggatattattctcacaatcactccatactgattggcatcactgagcctttccagatcagcctacccagcagtgaactggctagcagctcaaccgactcctctggcacatctagcgaaggtgaggacgatagcaccctggaacttctggcgccaaagagcaggtctccatcccccggcaagtcaaagagacatcggagcaggtcaccagggcttgcacggtttcctgggcttgcactccgcccctcctcccgggagcggaggggggcctctcggtcacctagccctcagtctcgtcggctatcccgggtcgcaccagataggagctcaaatggctcttcccgcgggagcagcgaggagggccctagcggtctccccggtccctgggctttccctcccgctgtgcctcgatccctgggtttgttgcccgctctgcgattggagacagtggatcctggagggggcggcagttggggccccgaccgggaggctctggcccccaactccctaagcccatcaccacagggacatcgggggctggaggaagggggcctgggcccctag

SEQ ID NO: 120643 - DNA, 1920 bp, synthetic construct
  misc_feature 1..1920: note = Description of Artificial Sequence: Synthetic coding sequence
  source 1..1920: mol_type = other DNA
atggcattgccgcgtcttgggactcaatccacaggaccgggcagatgcctgagtccaaacctgcaggctcaggaagctccagcccccgtgaccactagcagcagcacaagcaccctgtcgtcctccccctggtcagcacagccaacttggaagtcggatccgggatttcggatcaccgtcgttacgtggaacgtaggcaccgccatgccgccagatgacgtgaccagtttactgcacctggggggcggcgatgactcggacggtgccgacatgattgccatcggactgcaggaggttaacagtatgctgaataagcgactcaaggacgcgctgttcactgatcagtggtctgagctttttatggatgcccttggacctttcaacttcgtcttagtcagctccgtaaggatgcaaggcgttattctgcttctgttcgccaagtactaccatttaccctttttgagagacgttcaaaccgactgcacccgcactggcctgggcggctattggggaaacaagggtggtgtttcggttcggcttgctgccttcggccacatgttgtgctttttgaactgccaccttcccgcccacatggacaaggcagaacaacgaaaggacaacttccaaactatcttatctctgcagcagttccagggacccggagcacaagggatactagaccacgacttggtattctggtttggagacctgaacttccgcatagagtcctacgacctccacttcgtcaagttcgctattgattccgaccaactgcaccaactctgggagaaagaccagcttaatatggcgaaaaatacttggcctattctgaaggggttccaggaaggcccactgaattttgcccctacctttaaattcgacgtgggaactaacaagtacgacacttctgccaagaagagaaaaccagcctggaccgaccgaatcttatggaaagtgaaagcacctgggggtggcccatcgccatccggccgcaagagtcacaggctgcaggtcactcagcacagctaccggtcgcatatggaatatacggtgagcgaccacaaaccagtagctgcacagtttctgctccaattcgcttttcgggatgacatgccactagtacgcctggaagtggctgacgaatgggtgcggccagaacaggcggtggtgagataccggatggagacagtgtttgcacgcagcagctgggattggatcggcctctatagggttgggttccgacactgcaaagattacgtggcttacgtctgggcaaagcacgaagatgtggatggtaacacctaccaggtgacttttagcgaggagagcttgccaaaaggccatggtgatttcattctggggtactacagtcataatcattccatacttatagggattaccgagccttttcaaattagcctacccagctcagaactggcctccagctccacggactcatctggcaccagttccgagggggaggatgatagtactctggaactccttgcccccaaatctaggtcaccctcgccaggcaaaagcaaacgccaccggtctagatcgcccggtttagcaaggtttcccgggttagccctccgcccaagctcacgcgagcggcggggcgcatcaagaagcccttcaccccagtctcgccgtttgtccagggttgctccagaccgctctagtaatgggtccagtcgcgggagctccgaagaaggcccatcaggactccctggaccatgggcattcccccccgcagtccctaggagcctaggcttactgcctgctttacggttggagacagtcgaccccggtgggggggggagctggggcccagatcgcgaggcattagcaccaaattcactgtcccccagtccgcagggacacagaggcttagaggagggcggattgggtccttag

SEQ ID NO: 120644 - DNA, 2820 bp, synthetic construct
  misc_feature 1..2820: note = Description of Artificial Sequence: Synthetic coding sequence
  source 1..2820: mol_type = other DNA
atgtcggcctccagcgaagggccacggctagccttggcctctccaaggcctatcttggctcccctgtgtacacccgaggggcagaaaactgcaactgcacatcgttcaagctcactcgcacctacctccgtagggcaactggtgatgagcgccagtgccgggcccaagccaccaccagccacaactggtagcgtgcttgcgcctaccagcctgggccttgtgatgcccgccagtgctggtcctagatcgccgccggtgacactcggccctaaccttgctcccacctctagagaccaaaaacaggaaccccctgcttcagtcggccccaagccgaccttggcagcatcaggcctctccctggccctggctagtgaggagcagccaccagagcttccctctacgccatccccggtgccaagcccggtcctgtcacctacccaggaacaggccctggctcccgcctcgacagcatcgggggccgctagcgtggggcagacttcggcccgcaaacgggatgctcccgccccgagacctttgcctgcctccgaaggtcacctacagccccctgcgcagaccagtggaccgaccgggagccctccttgtattcagacaagccccgacccccggttgtccccgtctttcagggccaggccagaagctttgcattctagtccagaagaccctgtgctccctaggcccccacagaccctgccattggatgtgggccaagggcctagtgagcctggaactcactctccgggcctcctgtcccccacattccgccccggagctccgtccggacaaacagttcctccccctttgcccaaacctcctcgcagtccaagtaggtctccatcacattctcctaatcggagcccgtgcgtaccacccgctccagacatggccctgccgaggttgggtacccagtccactggtccagggaggtgcctcagtcccaatctgcaggctcaggaggctcccgcacctgtaaccacctccagttcgacctcgacactcagtagtagcccttggtcagcacagcccacctggaagtcagaccctggctttcgaatcactgtggtgacatggaatgtgggcaccgccatgccgccagatgacgtcacatcacttctgcatctgggagggggggatgattcagacggcgcggatatgatagccataggccttcaggaagtcaattctatgttgaacaagcggctgaaagacgccctcttcacagatcagtggtccgagctctttatggatgcactgggacccttcaatttcgtgctggtatcctctgttcgcatgcagggcgtgatcctactcctgttcgctaagtactaccacctccccttcctccgagatgttcagacagactgtacacgaacaggtctaggcggatactgggggaataagggaggggtgtccgtgaggcttgccgccttcggtcacatgctttgcttccttaactgccatcttcctgcacacatggataaagcagaacagcggaaggataacttccagacaatcctctcgctccagcagttccagggacccggagcgcaggggatcctggatcacgacctggttttctggttcggggatcttaacttcagaattgagagctatgatcttcacttcgtcaaatttgccattgacagcgaccagctgcaccaactgtgggagaaggatcagttgaacatggctaagaatacatggcctattctgaagggattccaggagggtcctctgaactttgctcccacttttaaatttgatgtggggaccaataaatatgatacctctgcaaagaaacgtaagccggcatggaccgaccgaattctctggaaggtgaaggctcccggaggaggacccagccccagtgggcggaagtctcatagacttcaggtgacccagcattcatatcgatcacacatggagtacactgttagtgaccacaagcctgtggctgcacaattcctactccagttcgccttccgcgacgacatgcccttagttcggctggaggttgcggacgagtgggtgcgtcccgagcaggccgtggtgcgttatcggatggagacagtatttgcaaggagctcctgggactggatagggttgtacagggtcgggtttcggcactgcaaggactatgtggcatatgtgtgggccaagcatgaggatgtcgacgggaatacctaccaggtgacattctccgaagagtccttgccaaaaggccatggggactttattctcgggtattattcccataatcatagtatactgatagggataactgagccgtttcagattagtttgccatcttctgaattggcaagctcaagtacagactccagtgggactagttcggagggtgaggatgattccaccctcgaactgctcgcccccaaaagtcgaagtcctagtcctggcaaatctaagcgccatcggtcacgatcccctgggctggcacgcttcccaggcctggcccttcgcccctcctcaagggagaggagaggtgcttccagatccccatcccctcaatccagaaggctgtccagggtggctccagaccggagcagtaatggcagctctagaggtagtagtgaggaggggccaagcgggctgcccggtccctgggccttccccccggcagtgcctcggagcttgggtcttctgccagcccttaggcttgaaactgttgacccaggaggcggtggatcctggggccctgacagagaggcgttggcgcccaattcgctgtctcccagcccacagggccatcgcggacttgaggaagggggcctgggaccgtag

SEQ ID NO: 120645 - DNA, 3534 bp, synthetic construct
  misc_feature 1..3534: note = Description of Artificial Sequence: Synthetic coding sequence
  source 1..3534: mol_type = other DNA
atggtgccctgctggaatcacggcaatatcacgagatctaaggccgaagagctcctttcacgcacagggaaagacggaagctttctcgtcagagctagtgagtccatctcacgggcctacgctctgtgtgttctttatcgcaattgtgtttatacctaccggatcctgccaaatgaagatgacaagttcactgtgcaggccagcgaaggcgtgtcaatgcgcttcttcacgaaattagatcagctaattgaattttataaaaaagagaatatgggacttgtgacacacctacagtatccggtgccactggaagaggaggacacaggcgatgatcccgaagaggacactgtcgaatctgtagtgtccccccctgagctgccacctaggaatatccctctgacagcgagttcatgtgaagccaaggaggtgccattttccaatgaaaatccacgagcgacagaaacgtcgcgtccttctctgagcgagaccctcttccagcgcctccagagcatggatacatcggggctcccagaggagcatctgaaagcgattcaagactacctttcaactcaattggcgcaagattccgaattcgtcaagactggctcaagctcactgccccacctaaaaaaacttacaactctgctgtgcaaagagctgtatggccaaatgctgagaactgtgccaggaattggaaaagttaaggaggaggaccacgtaccgggtgaagccaatcccatcaacatggtgagtaagctgagtcagctgacttcactcttatcgagcattgaagataaggtcaaggccctgttgcacgaagggcctgaaagcccccatcgtcctagtctgatcccgcccgtgactttcgaagtgaaagccgaatccttgggcatccctcagaagatgcaactgaaggttgatgtcgagtccggtaagctgattatcaaaaaaagcaaggatggctccgaagataaattctacagccataagaagatcttacaactgattaagtcacaaaagtttctcaacaagcttgtcattctggttgagactgaaaaggagaagatcctgaggaaggaatacgttttcgccgatagcaaaaagagagaaggcttttgtcagctgctccagcagatgaaaaataaacactccgaacagccagagcccgatatgattaccatttttataggaacctggaatatgggtaatgctcctccacctaagaagatcacctcctggttcctctctaaaggtcaaggcaaaaccagagatgactctgctgattacatcccccacgatatctatgtcattggtacccaggaggaccctttatcagaaaaagagtggcttgaaattttgaagcacagccttcaggaaattaccagcgtgaccttcaagacggttgctattcatactctgtggaacattagaatcgttgttctggcaaaacctgagcatgaaaaccgcatttctcatatctgtacagacaacgttaagacaggtattgcaaacacacttgggaacaaaggcgcagtcggagtctcttttatgtttaacggcacctccttaggctttgttaattcccacctgaccagcggctctgaaaagaaactgaggcggaaccagaactacatgaacatattgagatttttggcgctcggtgacaagaagcttagtccattcaatattacgcatcggttcacacacctgttttggttcggcgacttgaactaccgagtggatctgccaacgtgggaagccgagacaataattcagaagataaagcagcaacagtatgccgatctcctgagtcatgaccagttattgactgaacgcagagaacaaaaagtgttccttcatttcgaggaggaggaaatcacctttgcgccgacgtacaggtttgaaaggctcactagggacaagtatgcctatacgaagcaaaaggcgactgggatgaaatataacctgcctagctggtgtgatcgtgtactgtggaaatcctaccctttagtgcatgttgtttgccagtcttacggcagcacgtccgacatcatgacctccgaccactctcctgtgttcgcgacctttgaggccggggtcacatcccaattcgtctccaaaaacggcccaggcaccgttgactcacagggccagatcgagttccttcggtgttatgccacgctgaaaacaaaaagtcagacgaagttttacctggagttccacagtagctgtctcgagtcatttgtaaaaagccaagagggggaaaatgaagaaggctctgaaggggagctggtggttaaattcggtgaaaccctgcctaagctgaagccaatcatttccgatcccgaatacctgctcgatcaacacatcctgatttccataaaatcttcggatagcgacgaaagctacggtgagggctgtattgcactgaggctggaggcaaccgaaacgcagctacctatttacactccactgacccatcacggcgaattaactggccacttccagggcgaaattaaactgcagacctcacaaggcaaaactagagaaaagctttatgatttcgtgaaaaccgagcgagatgaatcttccggtcctaaaactctgaaatctttaacatcacacgatccgatgaaacagtgggaagttaccagtcgcgctcctccctgctctggatcttcaatcaccgagattatcaatcccaactacatgggtgtgggcccatttggcccccccatgcccctgcatgttaaacagaccctttctccagatcagcagcccacagcctggtcttatgatcaacctccaaaggattccccactgggcccatgtagaggagaaagcccaccaacccctcctggacagcctcccatttcccccaagaaatttctgccctccaccgcaaacagaggtctaccacccagaacccaggagagtcgtccgtccgacctggggaagaacgccggggatactttacctcaggaggacctgcccctcaccaagcctgagatgtttgagaacccactttacggctcactgtctagttttcccaaaccggctcctcgcaaagatcaggagtctcccaagatgccaagaaaggagccccccccttgcccagagccggggatcctttccccctcgatcgtgttgacaaaggctcaagaggcagacagaggagagggacctggcaaacaagtcccagccccaagacttcggtcatttacctgcagtagctccgccgaaggccgggccgccggaggcgataaatcccagggtaagcccaagactcctgtgagctcccaggctcctgtcccagctaaaaggcctatcaaaccctcgcgatctgagatcaaccagcagacccctcccactcccacgccccgtcccccactcccggtgaaaagtcccgccgttctgcacttgcagcactcaaagggtagagactatagggataacaccgaattgccacaccatggcaagcatcgtccagaggaaggccctcctggaccccttggccggaccgccatgcagtag

SEQ ID NO: 120646 - DNA, 2433 bp, synthetic construct
  misc_feature 1..2433: note = Description of Artificial Sequence: Synthetic coding sequence
  source 1..2433: mol_type = other DNA
aaacgcgaaggcttctgccagctgctgcaacagatgaaaaacaaacacagcgaacagcccgagccggacatgattacaatctttataggcacctggaatatgggtaacgccccccccccaaagaagatcacaagctggtttttgagcaaggggcaaggcaaaacgcgagacgacagcgcagattacatccctcatgatatttacgtgatcggcacacaggaggacccgctttccgagaaggagtggctcgaaatccttaaacacagccttcaggaaataaccagtgtcacattcaagactgtcgcaatccataccttgtggaatatcagaatcgtagtgttagcaaagccagagcacgaaaatcggatttctcacatctgtactgataacgtgaaaaccggcatcgctaacactcttggcaacaaaggggctgtgggcgtgagttttatgtttaacggcaccagccttgggtttgtgaatagccacctcacctcaggttctgagaaaaaattgagacgaaatcaaaattacatgaacattctcagattcctggcccttggcgataagaaattgagtccatttaacatcactcacaggtttacccacctcttttggttcggcgacctgaactaccgggtggatctgcctacatgggaggccgagaccattatacaaaaaatcaaacagcagcaatatgcggatctgctatcacacgaccaactcttaaccgaaagacgcgaacagaaggttttcttacactttgaagaagaagagataacttttgcgccaacctaccggtttgagaggttaactagagacaaatatgcgtacacgaagcagaaggcaactggcatgaagtacaatctgccgagttggtgtgacagggttctgtggaaatcgtatcctctggtccatgtcgtgtgccagagctatggatccaccagcgatataatgacctcagatcattcacctgtcttcgctactttcgaagctggcgttacctctcagtttgtctctaaaaatggccctgggaccgtggattcacagggacagatcgaatttttgaggtgctacgctaccctgaagacaaagtcacagacaaagttttacctcgaatttcattcttcatgcctggagtctttcgtcaagtcccaagagggggaaaacgaggaggggtcagaaggagaattggtggttaagttcggcgaaactctgcctaagctgaagcctatcatatctgacccagagtatctcctcgatcagcacatcctgatatcaatcaaaagctctgactctgatgagagctatggggagggctgcatcgctctgagactggaagccaccgaaactcagcttcctatatatacgcccctaacacaccacggagagcttacagggcacttccagggggagatcaaactgcagacatctcaggggaaaaccagagaaaaactctatgatttcgttaaaacagagcgcgacgagtcctcggggccgaaaacactcaaaagcctgacaagccatgaccctatgaaacagtgggaggtgacaagccgtgctcctccgtgctccgggtcttccataacagaaataataaatcccaactacatgggggtagggccctttggcccacctatgcccttgcatgtgaagcaaacgctgtctccagaccagcaacctactgcttggtcctacgatcagccacccaaagattcgcctttaggcccatgccgcggcgaatcccctcccacacctccaggtcagccgcccatttctcccaagaagtttttgcctagcaccgcaaaccgtggattgccacctcggacccaagaaagcagacccagcgacctcggcaagaatgccggtgatacattaccgcaggaggatttgcccttgactaagcctgagatgtttgaaaatcctctgtacggttcactcagttcgttccccaagcccgccccaagaaaggatcaggaaagtcccaagatgcccagaaaagagccgcccccctgtcccgagccaggtatcttgagccccagcatcgtgctgacaaaggcacaggaggcggatcgaggcgagggcccaggaaagcaagtccctgccccccggctcaggtcatttacatgctcctccagcgcggagggccgcgccgccggaggcgataagtcacagggcaaacctaagactcccgtctcctcccaggctcccgtccccgctaaaaggccaatcaaaccatccagatcggagattaaccagcagacacctcctaccccaacaccccgccccccattgccagttaaaagccccgcagtgttgcacctgcaacacagcaaagggagagactatcgggataacacagaactgccacaccacggaaaacaccgaccggaagagggaccgcccggcccactggggaggacagctatgcagtag

SEQ ID NO: 120647 - DNA, 666 bp, synthetic construct
  misc_feature 1..666: note = Description of Artificial Sequence: Synthetic coding sequence
  source 1..666: mol_type = other DNA
atggtcccctgttggaaccacggcaatataacccggtctaaggcggaagaacttttgtcgagaacgggcaaagacggaagctttctggtcagagcctcagagagcataagccgtgcctacgctctctgtgtactgtacaggaattgtgtctatacctaccgcatcctcccaaacgaggatgataagtttacagtgcaggcctctgaaggcgtgtccatgcgctttttcaccaaactcgaccagctgatcgaattttacaaaaaagagaatatgggcctggtgacacacctgcagtatcccgtccccctcgaggaggaggatacaggtgacgaccccgaggaggatactgagagtgtggtctctcccccggaactgccaccgagaaacattcccctgaccgcctcttcatgcgaggctaaggaagtgcctttctcgaacgagaaccctagagctaccgaaacttccagaccctccctttccgagaccctattccagcggctgcagtcaatggacacatccggtctcccagaggagcatttaaaagccattcaggactacctttcaacacaactagctcaggactccgagtttgttaagaccggcagctccagtctgcctcacctgaaaaaattgaccaccctgctgtgtaaggagctgtatggatag

SEQ ID NO: 120648 - DNA, 2433 bp, synthetic construct
  misc_feature 1..2433: note = Description of Artificial Sequence: Synthetic coding sequence
  source 1..2433: mol_type = other DNA
aagcgagaaggcttctgtcagttgctccagcagatgaaaaacaagcactccgaacagcccgagccggatatgataaccatatttatcggcacttggaatatggggaacgcacctcctccaaagaaaatcacttcgtggttcttgtctaaaggacaaggcaagacccgggacgattccgcagactatatcccacatgacatatatgtgataggtactcaggaggaccccctcagcgaaaaagaatggctcgaaatcctcaagcacagccttcaagaaatcaccagcgtgaccttcaaaactgtagctatccatacgctgtggaacataaggatcgtggtgttggctaaacctgaacatgaaaatcgcatctctcatatctgcactgacaacgtgaaaacaggtattgcaaacacactgggcaacaagggcgccgtgggcgtgtcttttatgttcaacggtacatccctgggctttgtcaactcccacctgaccagtggatcagagaagaaactgcggcgaaatcaaaattacatgaacattctccgctttctggcgctaggcgacaaaaaactgtcccccttcaacataactcaccgattcacccacctgttctggttcggcgatctcaactatcgggtcgaccttcctacctgggaagccgagaccataatccaaaagatcaagcaacaacagtacgctgacttgttgtcccacgatcagttgcttaccgagcgtagggaacagaaagttttccttcacttcgaggaggaagagattacatttgccccaacttatagattcgagcgcctgactcgagataaatacgcttacaccaagcaaaaagccacaggaatgaagtacaacctcccgagctggtgtgacagagtgttgtggaagtcctatcccctggtgcacgtagtctgccagtcctacggatcaacatccgatatcatgacttcagatcacagcccggttttcgcaacattcgaagctggagtcacatctcagtttgtttcaaaaaatggacctggcacagtggactcacagggtcagatagagttcctcaggtgctatgccacattgaaaactaagagccagacaaagttttatctggagttccactctagctgtctagaatcgttcgtcaagtcccaggagggggaaaatgaggaggggagcgaaggggaactggtcgtgaaatttggtgagaccctgcctaagctcaagcctattatatctgatccagaatacctgctcgaccagcacattctgatctctattaagagttctgatagcgacgaaagctacggagaaggttgtatagccctcagacttgaggccacagaaacgcagttacccatctacacaccgctgacacatcatggcgagctcaccggccatttccaaggagagattaaactgcaaacctcgcagggtaagactagagagaagctgtacgatttcgtgaagaccgaaagagacgaaagctctggtcctaagacgttaaaaagcctgacatcacatgatcctatgaaacagtgggaagtcacctcccgggcccctccgtgttctggctcctccataaccgaaattatcaatccaaattatatgggggtgggtcctttcggccctcccatgccacttcatgtaaaacagaccctgtctccagaccagcagcccaccgcctggagctacgatcagccacccaaggattcccccctgggcccatgtcgcggcgagtcacccccgacgccccccggacagccccctatttcacccaagaagttcctgccaagcacagctaaccgggggctgcctccacggactcaagagtctcgcccttcagatctaggcaagaatgctggagacactttgccgcaggaagacctaccacttacgaagccagaaatgtttgaaaaccccctctacggcagcctgtcatcatttcccaaacctgctcctagaaaggatcaggagagcccgaagatgccccgcaaagagccccctccctgtcctgaaccaggaattctgagtccttctattgtcttgacaaaagcccaggaagccgatagaggagagggccctggtaagcaggtgccagcccccagacttcggtcttttacctgctcctcaagtgcagaagggagagctgccggaggtgataaatcacaaggaaaacccaagaccccagtgagcagccaggcacccgtccccgccaaaagaccaatcaagccaagtcgctcggagattaaccagcagacaccaccgaccccaacccctcgacctcccctgcctgtgaaatcaccagcagtgctgcaccttcagcattccaaaggacgggattatcgggacaacaccgaattgccacaccacggcaagcaccggcccgaagaaggcccgcctggtccgctcggaaggaccgccatgcagtag

SEQ ID NO: 120649 - DNA, 2433 bp, synthetic construct
  misc_feature 1..2433: note = Description of Artificial Sequence: Synthetic coding sequence
  source 1..2433: mol_type = other DNA
aagcgggagggtttttgtcagttgctgcagcagatgaagaataagcacagcgaacagcccgagcctgacatgatcactattttcatcggtacatggaatatggggaatgcacccccccccaagaaaattactagttggtttctctcaaagggtcaagggaaaactagggacgactctgcagactacatcccccacgacatatacgtgatcggcacccaggaagatccattgagtgagaaagagtggcttgagattctgaagcatagcctgcaggagatcacctctgtgaccttcaagaccgtagcaatccacaccctgtggaacatccgtatagtggtgctcgccaagcctgagcatgaaaataggatcagccacatatgtacagataatgtgaagacagggatagctaacaccttggggaacaaaggagcagttggggtgagctttatgtttaatgggacctccttggggttcgtgaattcacatctaacctcaggatccgagaagaagctgcgacgcaaccagaattacatgaacatccttcggtttctggcccttggcgataaaaagctgtccccattcaacattacacatagattcacccatctgttttggttcggtgacttgaactaccgtgtggacctgcccacatgggaggctgagaccattattcagaaaatcaagcaacagcagtacgccgatctgctttctcatgatcaactactaacagaaaggagagagcaaaaagtgttcctccattttgaggaggaggagatcacattcgctcccacataccgctttgagagactcacccgtgataaatacgcatacacaaagcagaaggccacaggtatgaaatacaacctgccttcctggtgcgaccgggtcctctggaagagttatcccctcgttcacgtcgtatgccaatcatacggaagcacaagcgacatcatgacgtcagaccactcccctgtgtttgcaaccttcgaagcaggggtaacgtcacagtttgtgtccaagaatggccctgggaccgtggattctcagggccagatcgaattcctgcggtgctacgctaccctgaagactaaaagccaaaccaaattctacctagagtttcactcctcctgcctggagtcctttgttaagagtcaggagggcgaaaacgaagagggcagcgaaggggaattagtcgtgaaattcggcgagacactgccaaaactgaaaccgataatatccgatcccgagtatttgctagatcagcacattctaatcagcatcaagtcgagtgactccgatgaatcctatggggaaggatgcatagcactgaggctggaggccacagaaacccagcttcccatctatacacctctcacacaccatggtgagctgacgggccattttcagggagagattaaactgcaaaccagccagggaaaaactagagaaaagctatatgactttgttaagacggagcgggacgaatccagcggtcctaagaccctcaagtccctgacctctcacgatcctatgaaacaatgggaggtaacctcccgggcacctccttgcagcgggtcttccatcactgagattataaaccccaactacatgggtgttggtccattcggccctccaatgccactgcacgttaagcagacactgagtcctgaccagcagcctacagcctggagttacgaccaacctcctaaggactcaccattgggcccctgccgcggagaatcgccgcccacgccccccggccagcccccgatttcacctaagaaattcctgccttctacggctaatagagggctaccacctcggacccaggagtctaggccatccgacctgggtaagaacgctggcgacactctcccccaggaggacttaccactcactaagccagaaatgttcgagaatcctctgtatggctctttgagttcctttccaaaaccggcaccacgtaaagaccaagaatctcccaagatgcccagaaaagagcccccaccgtgtccagaaccaggcattctgagcccttctattgtgctgactaaagcgcaggaggccgataggggtgaaggaccggggaaacaagtccctgccccccgcctgagatcatttacctgctcctcttccgccgaaggccgtgctgccggcggagacaaatctcaaggtaaaccaaagacccctgtcagttctcaggcccccgttccggctaagaggccaatcaagcctagccgctctgaaattaatcagcagactccacccacacctacccccaggccacctctcccagttaagagtcctgctgtactccacttacaacattcaaagggcagggactatcgggataacactgagctcccacatcacggaaagcacagacctgaagaagggccacctgggccactcggccgcaccgccatgcagtag

SEQ ID NO: 120650 - DNA, 2826 bp, synthetic construct
  misc_feature 1..2826: note = Description of Artificial Sequence: Synthetic coding sequence
  source 1..2826: mol_type = other DNA
agaccccaggtgccaggggaagctaatcctatcaacatggtgtccaaactctcacagcttacatccctgttatcctctatcgaggataaggtgaaagcactcctccatgagggcccagaaagcccacaccggccaagtttgatccctcctgttactttcgaggtcaaggccgagagcctggggatccctcaaaagatgcagctgaaggtggacgtagaatcaggaaagctgattataaagaagtccaaagacggctctgaggataaattttattcgcacaagaagatcctgcagttgataaagtctcagaaattcctgaataaactggtgatcttggtagagaccgaaaaggaaaagattttgcggaaagagtatgtgtttgccgattctaagaagcgggaaggattctgccagctcctccagcagatgaaaaataagcacagtgaacagcccgaacccgacatgatcactatcttcattggaacttggaatatgggtaatgcacccccacccaaaaaaattacgtcgtggttcctttctaaaggccagggaaagacccgagacgattccgcagactatatcccccatgatatatacgtcatcgggacgcaggaggaccctttatccgagaaggagtggctcgaaatactcaaacattcgttgcaggagattacttcagtgacttttaagaccgtggctatccataccttgtggaatataagaatcgtcgtgcttgccaagccagaacacgaaaaccgcatctcccacatctgcactgataacgtgaagacgggcattgccaatacattaggtaacaaaggtgccgttggcgtgagcttcatgtttaacggcacctctctgggctttgtgaacagccacctgacgtctggctcagaaaagaagctcagacgcaatcagaattacatgaacatcctcaggttcttggccctaggagacaagaaactgtctccgtttaatattactcaccgattcacccaccttttttggttcggcgatctgaattaccgggttgatcttcccacctgggaagccgagactattatccagaaaataaagcaacagcagtatgcggatttactttcccatgaccagctcttgactgaacggcgtgagcagaaagtgtttctccacttcgaagaggaggaaattaccttcgcaccgacgtaccgttttgaacgactcacgcgtgataaatatgcctataccaagcagaaggctacaggaatgaaatataacttgccctcttggtgtgaccgggtcctttggaaatcctaccccctggtccatgttgtgtgccaaagctacggctccacaagcgacattatgaccagcgaccactctccagtgttcgcgaccttcgaggccggcgtgacttcccagttcgtgtccaaaaacggcccaggaaccgttgatagccagggccaaatagagtttctccgttgttacgccactttgaagacaaaatctcagacaaagttttacctagaatttcactcaagctgcctcgagtcttttgtaaagagtcaagagggcgagaatgaggaaggctccgagggggagctggtcgtgaaatttggggaaactcttcccaaattgaaacccatcatctcggatccagagtacttgctcgaccagcatatcctgatttcaattaaatcatcagactctgatgagtcgtacggcgaaggatgtattgccttaaggctcgaggccacagagacccaactacccatttacacccctctgacacatcacggcgagctgacaggtcactttcagggcgaaattaagttgcagacttcacaaggcaaaacccgggagaaactttacgactttgtcaaaaccgagcgcgacgagtcaagcgggcccaagacattgaaaagcttgacctcccacgaccccatgaagcagtgggaagttacttcaagggcaccaccttgctcaggatcttccatcaccgaaattatcaaccctaactatatgggtgttggcccatttggcccaccgatgcctctgcatgtcaagcagaccctctccccagaccagcaacctacagcttggagttacgatcagcctcctaaggattcccctttaggaccgtgtcgcggtgagtcccctcccacccctccaggccagcctccgataagtcccaaaaaatttctgccctcaacagccaatcgcggtttaccaccacggacccaggaaagccgccctagtgatctgggtaaaaatgcaggcgacacactcccgcaggaggacctccctctcaccaaaccagaaatgtttgagaatccgctatacggatccctgagctctttcccaaagcccgcacccagaaaggaccaggaatctcccaagatgccaagaaaagagccccccccgtgtcctgagcccgggattttgagcccttcgattgtgctgactaaagcacaggaagcagatcgcggagaaggcccaggcaagcaggtgcctgctcctaggttgaggtccttcacatgttctagctctgctgagggaagggctgccgggggcgacaagtctcaaggaaagcctaaaacaccagtatccagccaagcgcccgtccccgcgaagcgccctataaaaccatctcgctctgagattaatcaacagaccccccctactcctaccccaagaccacctctgccagttaagagtcccgccgttctgcacttgcagcacagtaaaggccgggactaccgcgacaacacggagttgccccaccacggcaaacatcgccctgaggaggggcccccaggccctctgggccggactgccatgcagtag

SEQ ID NO: 120651 - DNA, 669 bp, synthetic construct
  misc_feature 1..669: note = Description of Artificial Sequence: Synthetic coding sequence
  source 1..669: mol_type = other DNA
atggtcccctgctggaaccatggtaatataaccagaagcaaggctgaggagctgctctccagaaccggcaaagatgggagttttctggtgcgagcctcagagtctatctctagggcatacgccctgtgcgttttatacagaaactgcgtttacacataccggatcttaccgaatgaagatgataagtttactgttcaggcgtcagaaggggtgtcaatgcgcttctttaccaaacttgatcagctgattgagttctataaaaaggaaaatatgggtctggtgacccacctgcagtaccccgttccgcttgaggaagaggataccggtgacgatcccgaagaggatacagtagaatctgtcgtttctccacctgagcttcctccgcgcaacattccgcttaccgcctcttcttgtgaggccaaggaggtccccttcagcaatgagaatcctcgagccacggaaactagccggcccagcttgtcggagactctctttcaacgcctgcaatcgatggacacatctggactgcctgaggagcatctcaaagctattcaggactatctgtccacgcagctcgctcaggacagcgagttcgtcaagaccgggtcaagctccttgccgcatctgaagaagctgacaactctcctttgcaaagagctgtacgggtag

SEQ ID NO: 120652 - DNA, 2826 bp, synthetic construct
  misc_feature 1..2826: note = Description of Artificial Sequence: Synthetic coding sequence
  source 1..2826: mol_type = other DNA
ccccctcaggtgccaggagaagccaatccgattaatatggtgagcaagctctctcagcttacaagtctccttagttctatagaagacaaggtaaaggctcttctgcatgagggtcctgagagcccacatcgaccgtccctcattccaccagtcaccttcgaggtcaaagcagagtcactggggatccctcagaaaatgcagctgaaagtggatgtggagtccggcaaactaataatcaaaaaatcaaaagatggaagtgaggacaaattctactcccacaagaaaattttacaactgattaagtcacagaagttccttaacaagctggtaatacttgttgagactgaaaaggagaaaatactgcggaaggagtacgtgtttgcagacagcaaaaaacgagaaggcttttgtcaactactgcagcaaatgaagaataagcacagcgaacaacctgagccagatatgataaccatctttatcggcacatggaacatgggcaacgctccgccgccaaagaaaatcacctcttggttcctgagcaaggggcagggcaagactagagacgattctgccgactacattccacacgatatttatgtcattggaactcaggaagacccacttagcgagaaggaatggcttgagattttaaaacacagcctccaggaaattacatccgtgacgttcaaaaccgtcgctatccacaccttgtggaatattagaatcgtggtcttggctaagccggagcatgagaacaggatatcgcatatctgtacagataacgtcaaaaccggcatcgctaacaccctggggaacaagggcgccgtgggcgtgtcatttatgtttaacgggacttctttgggatttgtcaactcacacctgacttcaggctctgaaaagaaactgaggaggaatcagaattacatgaatatcctcagatttctcgccctgggagataagaaactatccccttttaacatcactcatcggttcacgcacctcttctggttcggcgatctgaactaccgcgtcgacctgcctacatgggaagctgagactattatccagaaaatcaaacagcagcaatacgctgacctcctcagtcacgatcagctattgaccgaacgccgggagcagaaggtcttcctgcactttgaggaagaggagataacatttgcacccacctacaggttcgagaggctgacaagggacaaatacgcatataccaagcagaaggcgacaggtatgaaatataatcttcccagttggtgcgaccgggtgctctggaagagctacccgctggtgcacgttgtctgccagtcatatggctccacctccgatataatgaccagtgaccattcgccagtgttcgccacttttgaggcaggagttacctcacagttcgtgagcaagaacggaccaggaacagtggactctcaaggccaaattgaattcctaagatgctacgccactctgaagactaagagtcagaccaaattctatctggagttccatagctcctgcctggaatccttcgtgaagagtcaggagggggagaatgaagagggatctgagggcgaactcgtggtgaagtttggcgaaaccctgcctaagttgaaacccataatctcagatcctgaatatcttcttgatcagcacattttgatttctattaaatcatcggactcggatgaaagttacggcgaaggatgcatcgctctgaggctcgaagcgactgaaacacagctgcccatatatacaccactaacccatcacggtgaactgacaggtcacttccagggggaaatcaaactccagacatctcagggcaaaacacgcgagaaactctatgatttcgtcaaaacggagcgcgatgaaagctccggtccaaaaactctcaagtccctcacatctcacgatcccatgaagcagtgggaagtgaccagccgagccccgccctgctctggttctagtatcactgaaatcattaatccgaactatatgggcgtggggccgtttggtccaccgatgcctctgcacgtgaaacaaaccctttcccccgaccagcagccaaccgcctggtcctatgatcagccacctaaggacagtccgcttgggccatgtcggggcgagtcgccacccacccctccaggccagccacccatatcccctaagaaattcctacccagcacggcgaacagagggctcccacctcgcacacaagagtctcgccccagcgacctagggaagaatgcaggggacacgctaccgcaggaagatctgccccttaccaagcccgaaatgttcgagaatccgctgtatggatccctgagctccttcccgaagccagccccccgaaaggaccaggagagccctaagatgccgcggaaagagcccccgccctgtcctgaacccggcattctctctccttcaatcgtgctcacgaaggcacaggaagcagacagaggagaagggccaggcaagcaggtccccgccccccgtctgcggagcttcacttgctcctcaagcgcagaaggccgagccgcaggcggtgacaagagccaaggaaagcccaagactcctgttagtagtcaagcaccagtgccagcaaagcgaccaattaaaccaagcagatctgaaattaaccagcagacaccccccactcctactcctcgaccacctctcccagtgaagagcccagcggtgttgcatcttcaacattctaaaggacgcgactacagagacaacaccgagctgccccaccatgggaagcacagacccgaggaagggcctcctgggcccttggggaggacagctatgcaatag

SEQ ID NO: 120653 - DNA, 1791 bp, synthetic construct
  misc_feature 1..1791: note = Description of Artificial Sequence: Synthetic coding sequence
  source 1..1791: mol_type = other DNA
atggtgccatgctggaatcatgggaacatcaccaggagtaaagccgaggaactcctgtcaagaacaggtaaggatggaagtttcctggtgcgggccagcgagtccatcagccgtgcctacgctctgtgtgtactctatcggaattgcgtctatacttatcgcatactaccaaatgaggatgacaaatttacagtccaggcatccgagggagttagtatgagatttttcacgaaattagatcagctgatcgagttttacaagaaagaaaacatgggcctcgtaacacatttgcagtaccccgtcccactggaggaagaggatacgggggatgacccggaagaagacacggtggagtctgttgtgtccccccccgagctacctccccggaacattcctcttacagccagctcctgcgaagccaaggaggtccccttttccaacgagaaccccagggcaaccgagaccagtcgaccctctctgtctgagaccctcttccagcgcttgcagtctatggacacgtctgggcttcccgaagaacatttgaaagcgatccaggattacctctccacacagcttgcacaggatagcgagttcgtcaaaacaggtagctccagcctgccacaccttaaaaaactgaccacactgctatgtaaggagctatacggttattgcctcgaggtcctgttgtcctatcctctttcattgttgagtcaggtccccggcgaagctaatcctatcaatatggtgagcaaactgagtcagctgacttcactccttagctccatcgaagacaaagtaaaggccctgcttcatgaaggcccagagagcccccatagaccaagcctcattcccccagtcacttttgaagtgaaagcagaaagccttgggattccacagaagatgcagctgaaggttgacgtagagtccgggaagcttattatcaagaagagcaaggatgggagcgaggacaagttttactcccacaaaaagattctgcaattgattaaatcacagaaattcctgaacaagctggtaatactcgtcgaaaccgagaaagagaaaattttgcggaaagaatatgtttttgccgactcgaagaaaagagagggcttttgtcagctgctgcagcagatgaagaataagcatagcgagcagcctgagccagatatgatcacgatttttatcgggacatggaacatggggaatgcccctcctccaaaaaagattacgtcatggtttctctcaaagggacaggggaaaactagagatgatagtgctgattacattccacatgatatttatgtaattggtactcaagaagaccccttaagcgagaaagaatggctggaaattctgaagcacagcttgcaagaaattaccagcgttacatttaagactgttgcaatccacaccctgtggaacatcaggattgttgtgctcgccaagccggagcatgaaaatagaatttcccatatatgcacagataacgtcaaaactgggattgccaatacattgggcaataagggcgccgtaggcgttagctttatgtttaacggcactagtttggggttcgtgaatagccacttaacgtcagggtccgagaagaagctgagacgcaatcagaactacatgaacattctccggttcctagccctaggggacaaaaaactctccccttttaacatcactcaccgctttacacatctgttttggtttggagatctgaactaccgggtagacttgcccacttgggaggctgaaacgataattcagaagataaaacagcaatag

SEQ ID NO: 120654 - DNA, 837 bp, synthetic construct
  misc_feature 1..837: note = Description of Artificial Sequence: Synthetic coding sequence
  source 1..837: mol_type = other DNA
taacagaagaattggctgagggagttctaccaagtggtccatacccacaagcctcattttatggccctacactgtcaagagttcggaggcaagaactacgaggcatccatgagccacgtggataaatttgtcaaagagttgctcagtagcgacgctatgaaagagtacaacagagcccgggtctacttagacgaaaactacaagtcccaggaacacttcaccgcactgggaagcttctactttctgcatgagtctctgaagaacatctatcaatttgactttaaagccaagaagtacaggaaagtcgctgggaaagagatttatagtgatacgctggaatcaactcctatgttggagaaggaaaaattcccacaggattactttccagagtgtaagtggtcccggaagggattcatcagaactcgctggtgcatcgccgattgtgcattcgacctcgttaatattcacttgttccacgacgccagcaacctagtagcttgggagacaagcccctccgtgtattccgggattcgccataaagcattgggctacgtactggatcgcattatcgatcaacgctttgagaaggtcagttatttcgtgttcggagatttcaatttcaggctcgactctaaatcggtggtggaactgttagaatttgacaaggaactcagcgtgttcaaagaccgactctatgagctggatatctcttttcctccttcttatccctatagcgaggatgccagacaaggggagcagtacatgaacacacgatgcccagcttggtgtgacaggatcctaatgtcgccttctgctaaggaactggtcctgagatag

SEQ ID NO: 120655 - DNA, 1164 bp, synthetic construct
  misc_feature 1..1164: note = Description of Artificial Sequence: Synthetic coding sequence
  source 1..1164: mol_type = other DNA
atggcagggaaggctgccgctcctggcacagccgttctgctggtcactgctaatgtggggtctctgttcgatgaccccgaaaacctgcagaaaaattggctgcgggagttttaccaagttgtgcatacacacaagccccattttatggcgttgcactgtcaggagttcggcgggaaaaattatgaggcctctatgtctcacgtcgataaatttgtaaaggaactgttgtcctctgacgctatgaaagagtacaacagggcccgtgtctatctcgatgagaattacaagtctcaggagcattttaccgccctcggctctttctattttttacatgaaagtctcaagaacatctaccagtttgactttaaagcaaagaagtataggaaggtcgctggcaaagagatatacagtgacaccctggaatccaccccaatgctcgaaaaggagaagtttcctcaggattacttcccggagtgtaagtggagccgtaaggggtttattcgaacacgttggtgcatcgccgactgcgcttttgatttggtgaacatacacctgtttcacgatgcgtcaaaccttgtggcgtgggagacatcaccctccgtctactcaggaatacggcacaaagctctgggttatgtcctcgatcgcatcattgaccagagattcgagaaggtgagttattttgtctttggagacttcaacttccgcttggactctaaatccgtggtggagacattatgcacgaaagctaccatgcaaacagttcgtgcagccgacactaacgaggtggtgaagctgattttcagagagtctgataacgatagaaaggtcatgctgcagcttgagaagaagttgtttgactacttcaaccaggaggtattccgggataacaatggcaccgctcttctagagtttgacaaggaactctctgtttttaaggatcggttatatgaattggacatctcctttccacccagctacccatattcagaggacgcgagacagggcgaacagtacatgaatacccgctgccccgcctggtgcgaccggatactaatgtcaccctcagccaaagagttggtcttgcgggtgtccgtgtgctgcccctcccctggtcacagaggtatgtggtcagcaggatcaggactggctcagccttggtag

SEQ ID NO: 120656 - DNA, 1239 bp, synthetic construct
  misc_feature 1..1239: note = Description of Artificial Sequence: Synthetic coding sequence
  source 1..1239: mol_type = other DNA
atggcgggtaaagctgctgctcccggcaccgctgtgctcctggtcacagcgaacgtgggatctctgtttgacgatcccgagaatctgcagaagaattggctgcgcgagttctatcaagtcgtccatactcataaaccacacttcatggccctccactgccaggaatttggcggtaagaactatgaggcatctatgtcccatgtggataaattcgtcaaagagcttctatcctccgacgctatgaaggaatacaacagggcgcgggtttacctcgacgagaactacaaatcgcaggagcatttcaccgccctgggtagcttctactttttacatgaatcactgaagaatatctatcagttcgacttcaaggcaaagaaatacagaaaagtcgccgggaaggaaatatactccgacaccctcgaatccacgcccatgcttgagaaggaaaagtttcctcaggattacttccccgaatgcaaatggtcccgtaagggcttcatccgcactagatggtgcatcgccgattgtgcattcgacctcgtgaatatccatctctttcatgatgcctccaatctcgtggcttgggaaacaagcccctctgtctactctggcatccgacataaagctctcggttatgtgctcgacagaataatcgaccagcgctttgagaaagtctcctatttcgtgttcggcgacttcaacttccgcctggatagcaaatcagtggtggagacactctgcaccaaagccactatgcagacagtgcgggccgcggacactaacgaagttgttaaactgatcttcagggaatctgataacgatcgaaaagttatgctccagctggagaagaagctgttcgattacttcaatcaggaagtcttccgcgacaacaacggcacagcgctgctcgagttcgataaggaactttctgtgtttaaggaccgtctttacgagttggacatttcatttccccccagctacccgtacagtgaggatgcccgacagggagagcagtacatgaataccagatgtcctgcctggtgtgatcgtattttgatgagtcccagtgcaaaggagttagtgctgcgctcagagagtgaggaaaaggtggtgacttacgatcacattggccctaatgtctgtatgggagatcacaagccagtctttttagcctttcgcattatgcctggggcaggcaagcctcacgcccacgtccacaagtgttgtgtggttcaatag

SEQ ID NO: 120657 - DNA, 558 bp, synthetic construct
  misc_feature 1..558: note = Description of Artificial Sequence: Synthetic coding sequence
  source 1..558: mol_type = other DNA
atggctggtaaggccgctgcccctggtaccgccgttctgctggtcacggcaaacgtcggttctctgttcgacgacccagaaaacttacagaaaaactggctgagggagttctaccaggtcgtgcacacccacaaacctcactttatggccctgcattgtcaagagtttgggggcaagaattatgaggctagcatgtctcacgttgacaaatttgtgaaagagctgctgtcctcagacgccatgaaggagtataatcgggcaagggtgtacttggacgagaactacaaatcacaagagcactttaccgctcttgggagcttctacttcctgcatgagagcctcaagaacatctaccagttcgactttaaagccaagaaatatcgaaaggtagcggggaaagaaatctactctgacacactggagagcaccccaatgttggagaaggaaaaattcccccaagactattttccagagcggcacgttccacatacctcacttgaagcgttgcttatcctgcacgaggaccctcagttgcctgatccacacctgcccctttag

SEQ ID NO: 120658 - DNA, 1068 bp, synthetic construct
  misc_feature 1..1068: note = Description of Artificial Sequence: Synthetic coding sequence
  source 1..1068: mol_type = other DNA
atggcgggaaaagccgccgcacctggaaccgccgtccttctggtgacagctaatgttggatctctgtttgatgatcctgaaaacctccagaaaaactggctgagggaattctaccaggtggtacatacccacaagccccactttatggccctgcattgtcaggaattcggagggaagaactatgaagccagcatgtcccacgtggacaaattcgtgaaagagctactgtctagcgatgctatgaaagagtacaaccgagccagagtgtatctggatgagaattacaagagtcaggaacactttactgctctaggttcattctacttcctgcacgagtctctgaagaatatctaccagtttgactttaaagccaagaaataccgaaaagtcgctgggaaagagatttacagcgacaccttggaaagcacccccatgctcgaaaaggaaaagtttccccaagactatttcccggaatgtaagtggtcacggaagggattcatccgcactcgctggtgcatagccgattgcgctttcgacctcgttaatattcacctctttcatgatgcgtctaacctcgtcgcctgggagacgtctccaagcgtgtactctggcattagacacaaggctctgggttacgttttagatagaattatcgaccagcggtttgaaaaagtcagctatttcgtgttcggtgactttaactttcgactcgatagcaaaagcgtcgtcgagctgttagagttcgataaagaactgtctgtgttcaaagataggctgtacgagctcgacatctcctttccgccatcttatccctatagtgaagacgccagacagggcgagcaatatatgaacacacgatgtcccgcctggtgcgaccgcatcttgatgtctccaagtgccaaggaactggttctgcgatcagagtcagaggagaaagtcgttacctacgatcacataggaccaaacgtatgcatgggcgatcacaaaccagtgttcctggcctttagaattatgcctggcgccggaaagccacacgcccacgttcataaatgttgcgtggtgcagtag

SEQ ID NO: 120659 - DNA, 417 bp, synthetic construct
  misc_feature 1..417: note = Description of Artificial Sequence: Synthetic coding sequence
  source 1..417: mol_type = other DNA
gtgactgccaatgtgggaagtttgttcgatgacccagaaaatcttcagaagaattggctgagagaattttatcaagcccttggttccttttacttcctgcatgagtctctgaaaaacatttaccagtttgatttcaaggctaaaaagtataggaaggtcgccggtaaggagatctatagcgatacattggaatctacacctatgttggagaaggagaaatttcctcaagactattttcctgagtgtaagtggtcacggaagggctttattcgaaccagatggtgcatcgccgattgcgcatttgatcttgtcaatatccacctgtttcatgacgcctcgaatctggtggcatgggaaaccagtccttccgtgtactcgggaattcggcataaagccctgggttacgtgctggactag

SEQ ID NO: 120660 - DNA, 990 bp, synthetic construct
  misc_feature 1..990: note = Description of Artificial Sequence: Synthetic coding sequence
  source 1..990: mol_type = other DNA
atgaaggaatacaatcgggcacgagtctacctcgacgagaactataagagccaggaacattttacagcgctcggcagcttctacttcctccatgaaagtttgaaaaatatttaccagttcgacttcaaagctaaaaaatatcgcaaagtggcgggaaaagagatttattcagacactctcgaaagcactcccatgctggagaaggagaaattccccttgctgccacgggtccagatggtgaaaaagcgtttacatcccgacgaggtcatcgcggattgtgccttcgacttagtcaacatacacctttttcacgatgcctccaacttggtagcctgggagacatccccttcggtatactcagggattagacataaagctctcgggtacgtgctagatcgtatcatcgaccaaaggttcgagaaagtatcttacttcgtatttggagattttaattttaggttggactcgaagagtgtcgttgagactttgtgtacgaaagccacaatgcagaccgtgagggctgccgacacgaatgaggtcgtcaagctgatcttccgcgagtcagataatgaccgcaaagtcatgctgcagcttgaaaagaagcttttcgactacttcaatcaggaggtttttagggataataacggaacagctctacttgaattcgataaagaactgagcgtgttcaaagatcggctatatgagctcgatatctccttcccaccttcctacccatacagcgaagacgcaagacagggcgaacaatacatgaacacccgatgtcccgcatggtgcgatcgcatcctgatgagtcccagcgccaaggagctggttttgcgatctgagagtgaggagaaggtggtcacctacgatcacatcggaccaaatgtttgcatgggggatcacaagccggttttcttggctttccgcatcatgcctggggcaggcaagccccacgcgcatgtgcacaaatgctgtgtggttcagtag

SEQ ID NO: 120661 - DNA, 315 bp, synthetic construct
  misc_feature 1..315: note = Description of Artificial Sequence: Synthetic coding sequence
  source 1..315: mol_type = other DNA
ctcgacatttcctttccaccttcatacccctattccgaggatgctcgacagggggagcagtatatgaatacgagatgtccggcttggtgcgaccggatcttgatgtctcccagtgctaaggaactcgttctacgctcagagtccgaagagaaggtcgtcacttatgatcacattggtcctaatgtctgcatgggcgatcacaagcctgtgttcctagcgttccgcatcatgccaggagccggtaagcggtgccaacgccacgaacgaaccctacgggaaccaccgtgcagcagggggccaaatacacacagctag

SEQ ID NO: 120662 - DNA, 546 bp, synthetic construct
  misc_feature 1..546: note = Description of Artificial Sequence: Synthetic coding sequence
  source 1..546: mol_type = other DNA
gctgcggctcccggtacagccgtgcttctagtgactgctaacgttgggagccttttcgacgatcccgaaaacctccaaaagaactggcttagggaattttaccaagtggtacatactcataagccccattttatggctctgcactgtcaagagtttggggggaagaattacgaagcctccatgagtcacgtggataaattcgttaaagagctgctgtcatcagatgccatgaaggagtataaccgtgctcgcgtgtatctggatgagaactacaaaagtcaagaacacttcacggcactaggctctttctactttctccacgagagcttgaaaaacatctatcagttcgactttaaggcaaagaaatataggaaagtggcagggaaggagatctactccgatacactggaatcaacccccatgctcgagaaggaaaagtttcctcaggactatttccccgagagacatgtaccccataccagtttagaggccctgctgatccttcatgaggatccccagttgccagatcctcatctgcctttatag

SEQ ID NO: 120663 - DNA, 459 bp, synthetic construct
  misc_feature 1..459: note = Description of Artificial Sequence: Synthetic coding sequence
  source 1..459: mol_type = other DNA
atggcaggcaaggctgccgctccaggcaccgctgttttgctggtgaccgcaaatgttggatccctgtttgacgacccagagaacctgcagaagaactggctgagggaattctatcaggctttggggagcttttacttcttgcacgagtctctaaagaacatttatcaatttgactttaaggccaagaagtaccgcaaagtcgctgggaaggaaatctattccgacaccttggagagcaccccaatgctggagaaagaaaagttccctcaggactattttcccgagtgcaagtggtcacgaaaggggttcatcaggaccaggtggtgcatcgctgattgtgcattcgacctggtgaatattcatttgtttcatgacgcgagcaatttggttgcttgggaaacctccccctctgtctactccggcattcggcataaagcccttggctacgtgctagattag

SEQ ID NO: 120664 - DNA, 1935 bp, synthetic construct
  misc_feature 1..1935: note = Description of Artificial Sequence: Synthetic coding sequence
  source 1..1935: mol_type = other DNA
atgccttcaaaggcagagaacctcaggccatctgagcctgcaccacagcctcccgagggaagaacactgcagggacagttgccaggcgcccctcctgctcagcgcgccggatctcctccggatgcaccaggcagtgagtcccctgctctggcatgctccacacctgcaaccccgagcggcgaggatccccccgccagggcagcccccatcgccccaaggccccccgccagacctcgactggagcgagcgctctccctggatgataagggatggaggcgcagacgctttcgagggtcgcaggaagatttggaagctaggaatgggacctcaccttcacgaggcagtgtgcagagcgagggacccggggcccccgctcattcatgctctccgccctgtttatctaccagcctccaggagatacctaagagccgcggggtgttaagttccgagcgaggatcaccatcctctggcgggaatcctctgagtggtgtggcaagctcgtcacctaacctccctcaccgcgatgcagcagtggccggcagttcgcctagattaccatccctcctgccccccagaccaccacccgctctgagcctcgacattgcaagcgatagcctgcgcaccgctaataaggttgattccgatctggcagattataagttacgtgcgcagcctctgttggtgagggctcacagctctctgggccctggacgcccgagatccccactggcgtgtgacgattgctcactgcgaagcgccaagtccagctttagtctgctggcaccaatcaggagcaaagatgttcgatcgaggagttatcttgagggctccctgctcgcatcgggggccctcctgggcgctgatgagttggcaaggtacttccctgatcggaacgtggccctctttgtcgcgacctggaatatgcaagggcagaaagagcttccgccctcgttggatgagtttctactgcctgcagaggccgactacgcccaggacctctatgtgatcggagtccaggaagggtgctccgaccgacgggagtgggagacacgactccaggagaccctcggaccccactacgtgctgctgagctctgccgctcacggcgtgctatacatgagcctgttcataagaagggacctgatttggttttgtagtgaagtggaatgtagcactgtaactacaagaatcgtgagccagatcaagaccaagggagcactgggtatttcatttactttctttggcacttccttcttatttattacctcccatttcacgagtggagatggtaaggtggcagagcgactcttagattacaccagaactgtgcaggccctcgtactaccccggaatgtgcctgacacgaacccttacaggtcgtcagcggcggatgtcactacgaggttcgacgaggtcttctggtttggagattttaactttagattgtccggtgggcgcacagtggtcgacgccctcttgtgtcaagggttagttgtcgacgtgcccgcgctcctgcagcacgatcagcttattagagagatgagaaaaggctctattttcaaagggttccaggaacctgatattcacttcctgccttcttataagtttgacatagggaaggatacgtacgattccacatctaaacagaggaccccgtcatacacagatagagtcctgtatagatcaagacacaaaggcgatatttgtccagtaagttacagctcctgccccgggataaaaaccagtgatcatagacctgtgtacgggttgtttcgggtgaaagtgagacctggccgggataatattcctcttgcagctggaaaattcgatcgggaactgtatctgttaggaatcaaacgacgtatatcaaaagagatccagcggcagcaggccctccagtcccaaaacagctcgacgatctgttcagtgtcttag

SEQ ID NO: 120665 - DNA, 960 bp, synthetic construct
  misc_feature 1..960: note = Description of Artificial Sequence: Synthetic coding sequence
  source 1..960: mol_type = other DNA
atggaccagtcagtagctattcaagaaacactggccgaaggcgagtactgtgtaatcgctgtccagggtgtgctgtgcgagggagattcccggcaaagccgactcctggggctagttagatacaggcttgagcacggggggcaggaacacgccttattcctgtacacacatcggcggatggccatcaccggtgacgacgtgtcgttagaccaaatagttcccgtctctcgcgacttcacactcgaagaggtgtcgcctgacggcgagctgtatattctaggctcagatgtcacagtgcagctcgatactgctgaattgagcctggtctttcagcttccatttggatcccaaacgagaatgttcctgcacgaagtggcacgagcctgtccagggttcgatagcgctacacgtgacccggaattcctctggctatcgaggtatcgctgtgccgaacttgaactggagatgccaactcctagaggctgtaattctgccttggtgacatggcctggttacgccaccatcggtggcggtcggtacccgtctcggaaaaaaaggtggggccttgaagaagctcgaccacagggggctggtagtgtgctcttctgggggggcgccatggaaaaaactggattcagactcatggaacgtgcacacggcggcggctttgtttggggacgatccgccagagatggcaggagggatgaggagcttgaagaagcagggcgtgagatgtctgccgccgctgggtcaagagagcgaaataccgccggtagtgccggcggcggcaaattagggtggggggccgggccgggcgccgctgtgaggcccgctctcggctgggcaggatccgcagtttggcccgtggatgccagaggcgaggatcagtcccccggaggtcccctggaggctggcaccttgggacaaaagttctgtgatgtcctgttaaggagagcgtag

SEQ ID NO: 120666 - DNA, 2982 bp, synthetic construct
  misc_feature 1..2982: note = Description of Artificial Sequence: Synthetic coding sequence
  source 1..2982: mol_type = other DNA
atggatcagagcgtggcaattcaagaaaccctcgcagagggggagtactgcgtgatagctgttcagggcgtcctatgtgaaggcgattccaggcagagtcgtttactggggcttgtccgttacaggttagaacatggcggacaagagcatgcactgttcctgtacacgcacaggcgcatggccataacaggagacgatgtatccctggaccagatcgtgccagtatctcgcgactttactctggaagaggtgtcccccgacggcgagttatatatactgggatcggacgtgacggtgcagctggacaccgcggaactgtcacttgtattccaactgccgttcggcagtcaaactcggatgtttttacatgaagtcgctagagcctgtccaggctttgactcggctacccgtgacccagagtttctgtggctgtccaggtaccgatgcgctgaactggaactggagatgccgacccccagagggtgtaattccgccctggtgacatggcctggatacgctactatcggaggtggacggtacccatctcgtaaaaagcggtggggactggaggaagcaagacctcagggggccgggagcgtcttattttggggaggagcaatggagaagaccggttttaggctcatggaacgggcccatggcggcggctttgtctggggccggtcggcaagagacgggcgaagagatgaagaactcgaagaggcaggcagggaaatgtccgcagctgcaggttcgagggaacgcaacaccgccggtgggagcaattttgacgggctccgacccaatggcaaaggggtcccaatggaccagtctagccgcgggcaggataagcccgagtccctccagccgaggcaaaacaagagtaaatctgagatcacagatatggtgagaagctctaccattacagtcagtgataaagcgcacatattatccatgcagaagttcgggctgcgcgacacaatcgtgaaatcacacttattgcagaaggaggaagactacacctacatccagaatttccggttttttgccggaacatataacgtgaacgggcagtccccaaaagaatgtctacgcctgtggctttcaaatggaattcaggctcctgatgtgtattgcgtcgggtttcaagagctggatctgtccaaagaggccttctttttccacgatacccctaaggaagaagagtggttcaaggcggtatccgaaggacttcatccagatgctaaatatgcaaaggttaagctgattagacttgtgggcatcatgctgctactgtatgttaaacaggaacatgctgcctacatttcagaggtcgaggccgaaacagtgggcacgggaataatgggccgcatgggcaacaagggtggggtggcgatacggttccaatttcacaatacatcaatctgtgtggtcaactctcaccttgctgcccatatcgaagagtatgagcgcagaaatcaagattacaaagatatctgcagtcggatgcagttctgtcaacctgatccatctctacctcccctgacaatcagcaaccacgacgtgatcctgtggctgggagatcttaactaccgcattgaagaactcgacgtggaaaaggtgaaaaaactgatcgaagaaaaggattttcagatgctatatgcctatgaccagttgaagattcaggtcgcagcaaagactgtgttcgaaggttttacggaaggagagctcacttttcaacccacctataagtacgacacgggtagcgacgactgggacactagcgaaaaatgccgcgcgccagcatggtgtgaccgcatcctgtggaaaggaaagaacattacgcagttgagctaccaatctcacatggcccttaagaccagtgaccacaagcccgtcagtagtgtcttcgatatcggggtgagggtggtgaacgatgagctgtataggaaaacccttgaggaaattgttagatctctagacaaaatggaaaacgccaacattcccagcgtaagcctgagcaaacgggaattctgctttcaaaatgtcaagtacatgcagttgaaagtagaaagttttaccatccataacggccaggtgccttgtcattttgagttcattaataagcctgatgaggaatcatattgtaagcagtggctgaacgccaacccctctcgaggtttcctgctccccgactcagacgttgaaatcgatttggagctgttcgtgaacaagatgacggcaacgaaactgaacagtggcgaggacaaaatagaggacattctggtactgcacctcgaccgcggaaaggattactttctgagcgtgagcggaaactacctgccatcttgcttcggcagtcccattcataccctgtgctacatgcgggaacccattctcgatctcccactggagactatctctgagctaactctcatgcccgtatggaccggagacgacggcagccaactcgactccccaatggagatcccaaaagaactgtggatgatggttgactatttataccgtaacgccgttcagcaggaagatctttttcagcaacccggtcttaggtcagagtttgagcacatccgggactgcctggacaccggcatgatagacaacctctcagcctctaaccatagcgtcgctgaagcgttgctcctctttttagaaagcctccctgaaccagtgatctgctattcaacctatcacaactgcctggaatgtagcggcaattataccgcatcgaagcaagtgatctctaccctaccaatatttcataaaaacgttttccactatctgatggcatttcttagagaacttctcaaaaacagtgcaaagaaccacctggatgagaatattttggcatccatattcggcagtctgttgttacgcaacccagctgggcatcagaaactggacatgactgagaagaagaaggctcaggaattcatccaccagtttttatgtaacccactgtag

SEQ ID NO: 120667 - DNA, 2742 bp, synthetic construct
  misc_feature 1..2742: note = Description of Artificial Sequence: Synthetic coding sequence
  source 1..2742: mol_type = other DNA
atggatcagtcagtcgccattcaggaaactctagccgagggggagtactgtgtgattgcagtgcaaggagtactgtgtgagggagactcccggcagtctcgcctactgggcctagtgcggtatcgcctggagcatggcggccaggagcatgctttgttcttatatacccaccgtagaatggccataaccggagatgacgtgtccttggaccagatcgtgcctgtctctcgtgatttcacactagaagaagtgtctcccgacggcgagctgtatatattgggatccgacgttaccgtgcaattagacacagccgagctgtcactcgtgtttcaacttccgttcgggagccagacgagaatgttccttcacgaagtggcaagagcctgtcccggctttgactctgctacgcgggatcccgagttcctgtggctgtcgcgttatcggtgtgcagagctagagctggaaatgcctactcctcgaggatgcaacagtgcactggtcacatggccaggctacgctacaatcggtggcggtggttcaaactttgatggactgcgtcccaacggaaagggggtccccatggaccagtcatcacggggacaagacaagccggagagcctgcaaccacgacagaacaagtcaaagagcgagatcactgatatggtcaggtcatcgacaatcacagtctccgacaaagcccacatattgagcatgcagaaatttggactgcgggataccattgtaaaatctcacctcctccaaaaggaggaggactatacttatatccaaaacttcaggttctttgccggtacatacaatgtcaatggccagagtccaaaagagtgtctgcgcttgtggctgagcaacggaatccaagcccccgatgtttattgtgtcggatttcaagagctagatctcagcaaggaagcgttcttctttcatgatacacccaaagaggaagagtggtttaaggcagtgagtgaaggactgcaccccgacgccaagtatgctaaagtgaagctgatccgcttggtggggatcatgctactattgtacgtgaaacaagagcacgccgcctacatctcagaggtcgaagccgagactgtgggcacaggcatcatgggccggatgggcaataaaggaggagtggccatccgcttccaatttcacaacacttctatttgtgtggtgaattctcaccttgccgcgcatattgaagaatacgagcgacggaatcaggactacaaagacatctgctccagaatgcagttctgtcaaccagacccttccctgcccccgttaaccatctcaaatcacgatgtaattttgtggcttggagacttgaattatcggatcgaggagctggatgtggaaaaagtgaagaaactcatagaagagaaggatttccagatgctctatgcgtatgatcagctaaaaatccaagtcgcagctaaaacagtatttgaggggtttaccgagggggagctgaccttccagcccacttacaaatacgatactggaagcgacgactgggacacctctgagaagtgcagagccccagcctggtgtgaccgcattctgtggaaagggaagaatatcacacaactcagctaccagtctcacatggctctgaagacctctgaccacaaacctgtttcttctgtgtttgatattggcgtgcgggtggtgaatgacgaactctacagaaagacattggaggagatcgtgaggtctttggacaaaatggaaaacgctaatatcccctctgtttcactctcaaagcgtgaattctgtttccagaatgtgaaatatatgcagcttaaagtggagtctttcactattcataacgggcaagtgccctgtcactttgaattcatcaacaaacccgacgaggaaagctactgcaaacagtggctgaatgcgaaccctagccgcgggttcttactgcccgattccgatgtcgagatcgacctagaactcttcgtgaataagatgacagcaacaaagctcaattcaggcgaggataaaatcgaagacatactggtgctgcacttagatcgcggaaaggactatttcttgtctgtctccgggaactatcttccctcttgttttgggtcaccaatacataccctgtgttatatgcgcgagcctattctggatctgccgctggagactatcagcgaactcactttgatgccagtgtggaccggggatgacgggagccaattggactctccgatggaaattccaaaagaactttggatgatggtagattatttgtaccgtaatgcagtccagcaggaggacctcttccagcagcccggtctgcgcagtgagttcgaacacatccgggattgcctggacacaggcatgatagacaatctgagcgcttctaaccattctgttgccgaggccctgctcttgttcctggagagcctccccgaacctgtcatttgctactcaacctatcataattgtcttgagtgcagtgggaactacacagcatcaaagcaagtaatctccactctgcctatctttcacaaaaacgttttccactacctaatggcgtttctgagagagctcctgaagaactcggctaagaatcacctggacgaaaacattctggccagcatattcggcagcctcctgttaaggaaccctgctggacatcaaaaactggacatgaccgagaaaaagaaagcacaggaatttatccaccagtttctctgcaaccccctctag

SEQ ID NO: 120668 - DNA, 2982 bp, synthetic construct
  misc_feature 1..2982: note = Description of Artificial Sequence: Synthetic coding sequence
  source 1..2982: mol_type = other DNA
atggatcaaagcgtagcgatccaggagactttggcggagggtgaatattgcgtgatcgccgttcagggcgtgttatgtgaaggcgacagcagacagagccggttgctcggcctggtacgctatcggttggagcacggaggacaggagcatgctttatttctttacacacatagacgcatggctatcaccggcgatgacgtctctctggatcagatcgtacccgtgtcccgggattttactctggaagaagtgagccccgacggtgagctgtatattctgggcagcgatgttaccgttcaattagatacagccgagctgtccctggtgtttcaactgccttttggctcgcaaacgcggatgttcctccatgaagtggccagggcatgtccaggcttcgactctgctacgcgggacccggaattcttatggctgtccaggtatcggtgcgccgaactggagttagaaatgcctacccctcgcggctgcaactccgcgctcgtgacctggccaggttacgccaccataggtggcggacggtaccccagcagaaagaagagatggggcttggaagaggcacgaccccagggggctgggtcagtcctgttttgggggggggccatggaaaagacaggattccgcttaatggagagagcacacggcgggggtttcgtgtggggccgctccgcacgcgatggccgacgggatgaggagctggaggaagctggccgggagatgtcagctgcagccggtagcagagaacgcaatactgctgggggtagtaatttcgacggacttagaccgaacgggaagggagtacccatggaccaatcaagtcggggccaggataaacccgagtcccttcagccccggcagaacaaatcaaaaagcgaaatcactgacatggtgcggtcctccaccataacagtgtcagataaggctcacatactcagcatgcagaagttcggacttcgggacaccatcgtcaaatcacatctcttgcaaaaagaagaggattacacctatatacaaaacttccgcttttttgcaggtacatataatgtgaacggccagtctcctaaggaatgtcttagactttggttatcaaatgggatccaggccccagacgtgtactgtgtcggatttcaagagctggacctatcaaaagaggcttttttcttccacgacacccctaaagaggaggagtggtttaaagcagtttccgagggactgcaccccgacgcaaagtacgccaaggtgaaattgattagactcgtgggcattatgttgctgctgtacgtgaaacaggaacatgccgcctatattagtgaggtcgaggcagaaacggtggggaccggtatcatgggaaggatggggaacaaggggggagtggccatccggttccaatttcacaatacttccatatgcgtcgtaaactcccatctggccgcacatattgaggaatacgagcggcgaaatcaggactataaggatatatgttccagaatgcaattttgtcaacccgacccgtcccttccacctctcactatctcaaatcatgacgtcatcctatggctgggcgacttgaactacagaatcgaggaactcgatgtggaaaaagtgaagaaactgatcgaagagaaagactttcagatgctgtacgcctatgatcagttgaagatccaggtggctgccaagaccgtgtttgaggggtttactgagggcgagctgacgttccaacctacctataagtatgacactggaagcgatgattgggatactagcgaaaaatgccgcgcaccagcctggtgcgatcggattttgtggaagggtaagaacattacacagctttcttatcagtctcacatggctctgaagaccagcgatcataaaccagtgtctagcgtgttcgatatcggcgttagagtcgtgaacgatgaactgtataggaagaccctggaagagattgttcggagcctcgacaagatggagaacgctaatatccctagtgtatcactttctaagcgggagttttgttttcaaaatgttaaatatatgcagctcaaggttgagtcgttcaccatccacaacggccaggtgccgtgtcatttcgagttcatcaataaacccgacgaggagtcttattgtaaacaatggctgaacgccaatccgtctagaggtttcttgctgccagattcggacgttgagatcgatctggaactgttcgtgaacaagatgaccgctacaaagttgaattctggcgaagataagattgaggatattcttgtcctgcacctagaccgaggtaaagattactttctaagtgtttccggcaactacctgccgagctgctttggctcccctatacacactctatgttacatgcgtgaacctattctggacctgccgctcgaaactatctctgagttgaccctcatgcctgtctggaccggagatgacggaagccagctcgactccccaatggagatccccaaggagctgtggatgatggttgactacctgtacagaaacgctgtgcaacaagaagacctgtttcagcaaccggggctgcggagcgaattcgaacatattcgggattgtcttgatacaggaatgattgacaatctatcagcttctaaccactctgtggccgaagctctcctgctatttttagagtctctgccggagccggtgatatgctattcgacataccacaactgcctcgagtgttccggaaattacacagcatccaagcaggtgattagcactctgcccatctttcataaaaatgtgtttcattatctgatggcgtttttacgtgagctgctaaagaacagcgcaaagaaccacttggacgaaaacatcctggctagtatctttggaagtctgctgctccgaaacccagcaggccaccagaagcttgacatgaccgagaaaaagaaggcgcaggagtttattcatcaatttttatgcaacccactgtag

SEQ ID NO: 120669 - DNA, 2250 bp, synthetic construct
  misc_feature 1..2250: note = Description of Artificial Sequence: Synthetic coding sequence
  source 1..2250: mol_type = other DNA
atgtcagcggctgccggaagcagagagaggaacacagcgggcggttcaaatttcgatgggttgcggcccaatgggaagggtgtaccaatggaccaaagcagccgcggccaagataagcctgaaagcctgcagccacgccagaataagtctaaaagcgagatcacagatatggtgagatcaagcacaataacggtgtctgataaggcacatattctctccatgcagaagttcggccttagagatacaattgtcaagagccatctgttacaaaaggaggaggactatacatatatacaaaacttcaggttcttcgccgggacctacaacgtgaatgggcagtctccaaaggaatgtctcaggttgtggttatcaaacggaatacaagcccccgacgtctattgcgtgggcttccaggagcttgatctgtcaaaagaagcttttttcttccacgatacgcccaaagaggaagagtggttcaaggccgtgtccgaaggtctccaccctgacgcaaagtacgccaaagtcaagctgatacgcctggtgggcattatgcttttgctgtatgtcaaacaagagcacgcagcctatatcagcgaggtggaggccgagaccgtaggtacgggaatcatgggccggatggggaataaggggggagttgccatcaggttccagttccacaacacctctatctgcgtggtgaacagccatctggcagctcacatcgaagaatacgaacgacgcaaccaagactataaggatatctgtagccgtatgcagttctgtcagcctgaccctagtctccccccccttacaatttcaaatcacgacgtgatcctgtggttaggcgatctgaactacagaattgaggaactcgacgtggagaaagtcaaaaagctgatcgaggagaaagattttcagatgttgtatgcctacgatcaactgaaaatccaagtggcagcaaagacggttttcgagggattcactgagggcgagcttacattccagcctacatacaaatatgatacgggtagtgacgattgggatacgagcgaaaagtgccgcgcgcctgcatggtgtgatcgaatcttatggaagggtaagaatatcacacagttgtcgtatcagtctcacatggcactgaagacatcggatcacaagccagtctcgagtgttttcgacattggggtgcgggtagtgaacgacgagctttacaggaagactctggaagagatcgtgcggtctctggacaagatggagaatgctaacatcccttctgtgagccttagcaagcgggagttctgttttcagaatgtgaagtacatgcaactgaaagtggaatcttttacaatacacaacgggcaggtcccctgccacttcgaattcatcaacaaaccggacgaggaaagttactgcaaacagtggctgaacgcaaacccatctagaggcttcttgttgcccgattctgatgtcgagatagacttggaactgtttgtgaacaagatgacggcaactaaactgaacagcggagaagacaagatagaggacatcctggtcttacacctggacaggggcaaggactattttctgtccgttagcggcaactacctgccctcctgtttcgggtccccgattcatacactatgttacatgcgggagcccatactggacctgcctctcgaaaccatttctgagcttacattaatgccagtatggaccggcgatgacggatcccagctcgattcaccaatggagatccccaaagaactctggatgatggtggactacctttaccgcaacgctgttcagcaggaagacctatttcagcagccaggccttcggtctgaatttgagcacatccgagattgcctggacacgggcatgattgacaatctatctgcttccaaccattccgtcgctgaagccctgctgttatttcttgagtctctgcccgagccggtcatttgttacagcacctaccacaattgcctggagtgtagtggcaactataccgccagtaaacaggttatttccaccctgcccatcttccacaaaaatgtgttccattatctgatggcttttctgcgcgagctgcttaagaactctgctaagaaccatttggatgagaatatcttggcctctatatttgggagtcttctgcttaggaatcccgccgggcaccaaaaattggatatgactgagaagaagaaggcgcaagaatttatacaccagttcctatgtaaccccctctag

SEQ ID NO: 120670 - DNA, 2487 bp, synthetic construct
  misc_feature 1..2487: note = Description of Artificial Sequence: Synthetic coding sequence
  source 1..2487: mol_type = other DNA
atggatcagagcgtggctattcaggagacactggccgagggcgagtattgtgtgatcgccgtccagggcgtcttgtgcgaaggcgattcccgacaaagtaggcttctggggctggtgcggtatagacttgagcacggaggacaggagcacgccctgttcctatatacccatcgacgcatggcgattacaggagatgatgtgagtcttgatcagatcgtgccagtgagtcgggatttcactctagaggaggtgtcccccgatggcgagctgtacattctaggttctgacgtgaccgtgcaactggatactgctgagcttagcctagtctttcagctacctttcggttcccaaactcgaatgtttctccatgaggtggcaagggcctgtcccggattcgattccgcgactcgggatcctgagtttctctggttgtccaggtatcgctgtgcagagctcgaactggaaatgcctacccccagagggtgtaactcggccctggtgacatggcctggatatgcgactattggcggagggcggtatccatctaggaagaagcgttggggtctagaggaagcccgcccccagggagccgggagtgtactcttctggggcggcgccatggagaagacagggttcagacttatggagcgtgcccacggaggggggtttgtgtggggtagatccgctcgggacggccggagagatgaagagctggaagaagccggcagggaaatgagtgctgcggctgggtccagagagcgaaatacagcgggcgggtccaacttcgatggactgagacctaacggtaaaggcgtgcccatggaccagagtagtcgtgggcaggataaacctgaaagtttgcagccccgacagaacaagtcaaagtctgagatcaccgatatggtccgcagctccacaatcactgtatcggataaggcacacattctttccatgcaaaagtttggattgcgcgatactattgtaaaaagccacctgctgcaaaaggaggaagattacacttacatccagaattttcgtttcttcgccggcacatacaacgttaacggccagtctcccaaggagtgtttaaggctctggttatccaacggaatacaggcacccgatgtgtactgcgtgggcttccaagagctcgacctatccaaagaggcattttttttccatgacacgcctaaggaagaggaatggttcaaggccgtgagcgaagggctgcatccggacgcaaagtatgccaaggtgaagttgatccggttagtcggaattatgctgctgttatacgtgaagcaggaacacgccgcatatattagcgaggtagaagctgagaccgtgggcacagggatcatgggaagaatgggtaataagggtggcgtagccattaggtttcagtttcacaacaccagcatctgcgtggtgaattctcacctcgccgctcatatcgaagagtatgagcggaggaatcaggactataaggatatatgttcaagaatgcagttctgccaacctgatccatcactccctccactgacaatctctaaccacgacgtcatactgtggctgggtgaccttaactacagaattgaagagctcgatgttgaaaaggtgaaaaaactaatcgaagaaaaggatttccagatgttgtacgcttacgatcagctgaagatccaagtggccgcaaagactgtcttcgaagggttcactgagggcgagctcacttttcaacccacatataagtatgacactgggtctgacgactgggatacctcagagaaatgtagggctccggcctggtgcgacaggatcctgtggaaggggaaaaacatcacacaattgtcataccagagtcatatggctctgaagaccagcgatcataagccagtgtcttcggtcttcgatatcggggttagagtggtcaatgacgaactgtatcgtaaaacgttggaagagatcgtgaggtccttggacaagatggagaacgcgaatattccatcagtatcactgagtaagcgggagttttgcttccagaacgtgaagtatatgcagctcaaggtcgaatcctttactattcataacgggcaggtgccatgccattttgagttcattaacaaacctgacgaagagagctattgcaagcagtggctgaacgcaaacccgagccgcggcttcttgttacccgattcagacgtggaaatcgacttagaactgtttgtcaataagatgacagccactaaattgaactcgggcgaagataagatagaagacatcctggtgcttcatttagataggggcaaagattactttttgagtgtaagcgggaactatctaccatcgtgcttcgggagcccgatccatacactctgctacatgcgggagcccatcttagacttacccctggagaccatttccgaattactggcgtacttggcagcctactgctttgagactcagctggtgacaaagtccctgatttag

SEQ ID NO: 120671 - DNA, 528 bp, synthetic construct
  misc_feature 1..528: note = Description of Artificial Sequence: Synthetic coding sequence
  source 1..528: mol_type = other DNA
atgcagaaatttggactgcgcgacactatcgtgaaatcccatctactgcagaaggaagaggactacacttacatacagaacttcaggttctttgccggcacttataatgtgaatggccaatcccctaaggagtgtctgcggctgtggctgagtaacggcattcaggctccagatgtatactgcgtgggtttccaggagctggacctctccaaagaagctttttttttccatgacacaccaaaggaagaggagtggtttaaagctgtatctgaagggctgcatcctgacgccaagtatgccaaggttaagcttatcaggcttgtgggcataatgttactgctgtacgtgaagcaggagcatgcagcatatatcagcgaggtggaggctgaaaccgttggcaccgggatcatgggtcgcatgtgtgatcttgtcgccggtgggccacagctgcaggatcgacgagcaggttgcggcaagtcagaaaaagcacatcgtagggagggactgagcaatgcagtttgtatctag

SEQ ID NO: 120672 - DNA, 834 bp, synthetic construct
  misc_feature 1..834: note = Description of Artificial Sequence: Synthetic coding sequence
  source 1..834: mol_type = other DNA
atggcagatccatggcaggaatgtatggactacgctgtcactctggcacggcaggcaggagaggttgtgtgcgaggctatcaaaaacgaaatgaatgtgatgctgaaatcctctccagtggatctggtaaccgcaaccgaccagaaagtggagaaaatgttaatctcttccatcaaagagaagtatcctagtcatagttttataggggaggagtccgtggctgcaggtgagaaaagcatcttaaccgacaatcctacctggataatcgacccgatagatggaaccactaatttcgtacaccggtttcccttcgtagccgtgagtattggatttgccgtaaataagaaaatcgagttcggggtggtctattcttgtgtggagggcaaaatgtacaccgctaggaagggcaagggagccttctgtaacgggcagaagctccaggtgagtcagcaggaagacatcaccaaaagcttactggttacagagctgggaagttccaggacacctgagaccgtgagaatggtgctgagcaacatggagaagctgttctgcatccccgtgcatggaatccgatccgttggcacagccgctgttaacatgtgcttagtggccacaggcggagcggatgcgtattacgagatgggaatacactgttgggatgtggctggagccggaatcattgtaacagaagccgggggggtgctcatggacgtaacgggcggtcctttcgatctcatgtcgcgcagagttattgccgctaacaataggatcctggcggagcgcattgccaaggagatccaggtcattcctttacagagggacgacgaggattag

SEQ ID NO: 120673 - DNA, 597 bp, synthetic construct
  misc_feature 1..597: note = Description of Artificial Sequence: Synthetic coding sequence
  source 1..597: mol_type = other DNA
atggccgatccttggcaggaatgcatggattatgcagtgacactggcccgacaggctggcgaggtggtctgtgaagccataaaaaatgagatgaatgtgatgctcaagtcttcaccagtagatttggtgactgctactgatcagaaggtagagaagatgctgatctccagcatcaaggaaaagtatcctagccactcttttattggtgaggagagcgtcgcagccggcgagaaatctattctgacagacaatcctacctggattatcgaccctatagacggcacgactaactttgtgcataggttccctttcgtcgcagtgtccatcgggttcgccgttaacaagaaaattgaattcggcgtggtctactcctgtgtagaagggaagatgtacaccgcacgtaagggcaagggtgcattctgcaacgggcagaagctgcaggtctctcaacaagaagggtctggcgtactagagcagcaactgctcatctgcgcgttgtggcagttggcagagcagatgcacatcatgaagtgggagttcacagcagggatgttgcaggaactcgccctgcttctcctcaagttggtggcttgctag

SEQ ID NO: 120674 - DNA, 1011 bp, synthetic construct
  misc_feature 1..1011: note = Description of Artificial Sequence: Synthetic coding sequence
  source 1..1011: mol_type = other DNA
atgggccagcggcccggacccgtgcttccagccgtggccgttctgggacaggtggcaaaacgtaaggtcgcatggttgctgcggtggaaggcggtaaccagaactgagactgccgggaactcctcaggtgtgtatggtttcgggaaaatgaagatttttgttaagtatttccagaagatggcggacccctggcaggaatgtatggactatgcggtaacactcgctaggcaagccggcgaggtcgtttgtgaggccattaagaacgaaatgaacgtcatgctgaaatcctcaccagtcgatttggtaaccgccactgaccagaaggtcgaaaaaatgcttatttcctccattaaagagaagtacccaagccattcattcatcggcgaggagagcgtcgccgccggagagaaatcaattctgacagacaaccctacctggatcatagatccaattgacggcaccacaaactttgtgcaccgcttcccattcgtggcagtttccatcggctttgccgtcaataagaagatcgagttcggagtcgtgtactcgtgcgtcgagggaaaaatgtacacagccaggaaaggaaaaggggccttttgcaacggacagaagctgcaggtgtctcagcaggaagacataacaaagagtctactggtgacggagctgggtagctccaggaccccggagaccgtgcgcatggtgctgtctaacatggaaaaacttttctgcatccccgtccacgggattcgctctgtaggaacagctgcagtgaacatgtgtctggtggccactggaggcgccgatgcctactatgagatgggaattcattgttgggacgtggcaggcgccgggatcatagtcactgaggctggaggagttctcatggacgtaaccggtggaccatttgatctgatgtcacggcgagttatcgcagccaacaaccgtatccttgccgagcgcatcgccaaagagatacaggtgatccctttgcaacgagatgatgaggactag

SEQ ID NO: 120675 - DNA, 462 bp, synthetic construct
  misc_feature 1..462: note = Description of Artificial Sequence: Synthetic coding sequence
  source 1..462: mol_type = other DNA
atggctgacccctggcaggaatgcatggactacgccgtgacactagctagacaggccggagaagtcgtgtgtgaagcaatcaagaatgagatgaacgtgatgttgaaatcttcccccgtggacctggtgacagctacagatcaaaaggttgaaaagatgttaatcagctccataaaggagaaatacccctcgcacagattcccctttgttgcggtgtcgattgggttcgccgtaaataagaagatagagttcggagttgtgtatagttgcgttgagggcaagatgtacactgccaggaaagggaagggggccttctgcaacggccagaagttacaggtgtcacaacaagaggacataacaaaatcgctcttggtgacagagctgggaagttccagaacccctgaaactgtgcgcatggtgctgtccaacatggagaagctcttctgtattccggtgcattag

SEQ ID NO: 120676 - DNA, 636 bp, synthetic construct
  misc_feature 1..636: note = Description of Artificial Sequence: Synthetic coding sequence
  source 1..636: mol_type = other DNA
atggggcagagacctggccccgttctgcctgccgtggccgtccttggacaggtggccaagcgcaaagtcgcctggttgctgcggtggaaggccgtgacaaggaccgagacagcaggtaacagctcgggcgtgtacggctttggaaaaatgaaaatcttcgtgaagtattttcagaagatggccgacccatggcaagaatgtatggattacgctgtgacgcttgctaggcaggctggcgaagtcgtctgtgaagcgatcaagaatgagatgaacgtaatgttgaagtcaagccccgtggaccttgtgactgccacagaccagaaagtggagaaaatgctgatttctagtattaaagaaaagtacccttctcacagtttcatcggggaggagagtgtagctgccggagaaaagtccatcttgaccgacaatccgacttggattattgatcccatcgacggcaccaccaacttcgttcatcgatttcccttcgtagccgtctctataggatttgcagtaaataaaaagatagaattcggagtggtctacagctgtgtggagggaaagatgtacacagcccgcaagggcaaaggtgccttctgcaacgggcagaagttgcaagtcagccagcaggaatag

SEQ ID NO: 120677 - DNA, 867 bp, synthetic construct
  misc_feature 1..867: note = Description of Artificial Sequence: Synthetic coding sequence
  source 1..867: mol_type = other DNA
atgaaaccctccggcgaggatcaagctgcactggccgccggcccctgggaagaatgtttccaggccgcagttcaactggctctgcgggcagggcagatcattagaaaagcattaaccgaggaaaaacgcgtttctactaagacatcggcggctgatctcgtcacagaaacggaccacctggtagaagacctgataatttcagagctgcgcgaacggtttccaagccatcggtttatcgctgaagaggccgccgcttctggtgctaagtgcgtgttaacacacagtccaacatggattatcgaccctatagacggcacttgcaatttcgtccaccgatttcctactgttgctgtaagtatcggtttcgcggtgaggcaggaactcgagtttggagtgatctaccactgcacagaagaaagactttacacgggcagaagaggacgtggagctttctgtaacggtcaacgattacgggtgtccggagaaacagatttgtccaaagcgttggtactgacagagatcggtcctaagagggatccagccactttgaagttgtttctgagcaacatggaaagactattacacgcaaaggcccacggagttcgggtgataggatcatcaaccctggcgttgtgtcacttagcttcaggcgccgccgacgcatactatcagttcggcctacattgctgggaccttgcggcagctacggtgattattcgcgaagctggaggaatcgtaatcgatacatctggaggcccactggacttgatggcttgccgcgtagtggcagcttctacccgcgagatggccatgttgatagcccaggcattacagaccattaattacggtagggatgatgaaaaatag

SEQ ID NO: 120678 - DNA, 258 bp, synthetic construct
  misc_feature 1..258: note = Description of Artificial Sequence: Synthetic coding sequence
  source 1..258: mol_type = other DNA
atgaaaccatctggggaagaccaggccgcgctggctgcaggaccatgggaggagtgctttcaggctgccgtgcaactggctttacgagccgggcagatcatacggaaggctctgaccgaagaaaaacgggtgagcacgaaaacaagcgcagccgacctagtcacggagacagatcatctggtggaagacctcatcatcagcgagctgagggagaggtttccttcccaccggtcaccgtttagcctggtccatatgtag

SEQ ID NO: 120679 - DNA, 1071 bp, synthetic construct
  misc_feature 1..1071: note = Description of Artificial Sequence: Synthetic coding sequence
  source 1..1071: mol_type = other DNA
atgctggagcaaatcagacgcgatataagggattttcgttccagtgcgggtctggacaaggtcatcgttctttggacagcaaatactgagcgcttttgcgaagtcattccaggcttgaacgacaccgctgagaatctccttcgaacaatagaactcggccttgaggtgagcccaagtacattgtttgctgtggcctccatcctggagggttgcgccttcctgaatggctcacctcaaaatactcttgtaccaggcgctctggaattggcctggcagcacagggtgtttgtgggcggggacgactttaagtctggacagaccaaggtcaaatccgtactcgtggactttttaattggctcggggctgaagaccatgagtatcgtgtcctataaccaccttgggaacaacgacggggagaacctttctgccccattacagtttcgtagtaaagaggtgtccaagtcaaacgtggtcgacgacatggtgcagagcaaccccgtgctgtatacaccaggggaggagcccgaccactgcgttgtgataaagtatgtgccctacgtcggcgatagcaagagggccttagacgaatatacctccgaactgatgctgggaggaactaacacactggttctccacaatacctgcgaggacagtttactcgctgcacccatcatgttggacctggccctcctgacggagctttgtcagcgtgtcagtttttgcacagatatggacccagagccccagacctttcaccctgttctgagtctcctttcttttctgttcaaggcccctttagtgccacctggcagccccgtagtaaacgctctgttccggcagagatcctgcatagaaaatattcttcgcgcgtgtgtggggttgccaccccagaatcacatgcttttagagcataagatggaaaggccaggacctagtctgaagagagtcggacccgtcgcagctacatatcctatgctgaataaaaagggcccagtgcccgccgccaccaacggctgtacaggggatgctaatggccatctgcaggaggaaccacccatgccaactacttag

SEQ ID NO: 120680 - DNA, 1677 bp, synthetic construct
  misc_feature 1..1677: note = Description of Artificial Sequence: Synthetic coding sequence
  source 1..1677: mol_type = other DNA
atggaggctgccgcccagttttttgttgagagccccgacgtggtgtatggcccagaggcaattgaggcccagtacgagtaccgcaccacacgagtctcccgggagggaggagtactaaaagtgcatcctacatccaccagattcactttcaggaccgcccgacaggtccccaggctcggcgtgatgctcgtcggctggggcgggaacaatggctccacactcacagctgccgttctagcgaaccggctgcggctaagctggcccacccgaagcgggaggaaggaggccaactactatggctcacttactcaagccggtacggtctctttaggtttagacgcggagggacaggaagtgtttgtaccattcagtgccgtcctcccaatggtggcgcccaatgacttggtgtttgatggatgggatatctctagtcttaacctagccgaggcgatgaggagggcaaaagtgctcgattgggggctacaagagcagctgtggcctcacatggaggcgttgcgccctcgaccatccgtatacatccctgagtttatcgccgccaaccagagcgccagagccgataatttaattcccgggtctagggcccagcagctggaacaaattaggcgggatatcagagattttaggtccagtgctggcctagacaaggtcatcgtcttatggacagcaaacactgagaggttctgtgaagttattcctgggctaaatgacactgcagagaacctgctgcgaacgatagagctcggcctggaagtttctccctctaccctatttgccgtggccagtatattggaaggatgtgcttttctaaacgggtcccctcagaacaccctggtacccggggcactggagctcgcctggcagcacagagttttcgtaggcggagatgactttaaaagtggccagaccaaagtaaagtctgttctcgtggactttctcattggctccggccttaaaacaatgagcatcgttagctacaatcaccttggaaacaatgacggagaaaacctcagcgctcctttacagtttcgttctaaagaggtatccaaatcaaacgtggttgatgacatggtccaatcaaaccccgtactctatacaccaggtgaggagcctgatcattgtgtggtcatcaagtatgtgccatacgtaggggattcaaaaagggctttagatgagtatacctcagaactgatgttaggcggcacaaacacgctggtcctacataatacttgcgaggacagtctgttagctgcacctatcatgcttgatctggccttgttaacggagctgtgccagcgggtcagcttctgcaccgatatggacccggaaccgcagacattccaccctgtgctgtcactcctgtcgttcctgtttaaagcccccctggtcccacccgggagtcccgttgttaacgccttgtttcgtcagaggtcatgcatcgagaatatcctgcgcgcgtgtgtagggttgccacctcagaaccacatgctgttagaacacaagatggagcgccccgggccctcccttaagagagttggccccgttgccgcaacatatcctatgctgaacaagaagggtcccgtgccagcagcaacaaatggctgtaccggagacgcgaacggtcatctgcaggaggaacctcctatgcctaccacttag

SEQ ID NO: 120681 - DNA, 1515 bp, synthetic construct
  misc_feature 1..1515: note = Description of Artificial Sequence: Synthetic coding sequence
  source 1..1515: mol_type = other DNA
atggaggcagccgcccagtttttcgtggagtctcccgatgttgtgtatgggccggaggcaatcgaagcccaatatgaataccgaaccactagggtgtctagggaaggtggcgtgctgaaggaagctaattactacggttccctgactcaggcgggcaccgtctctctcggcctggacgccgagggacaagaggtcttcgttcctttctccgccgtgctacccatggttgcccccaatgacctggtattcgacgggtgggacatcagctctctgaatttggccgaggccatgcgccgcgcaaaagtactcgattgggggctgcaggaacagctctggccccatatggaggcactgaggccgagaccttccgtatacatccccgaattcattgctgccaatcagtctgcccgggcagacaatctaatacccgggtctagagctcaacaactggaacagatccgccgagacattagagacttccgtagttccgcaggactagacaaagtaattgtgctctggaccgcaaacacagagagattttgcgaggtcattccgggtctgaacgataccgcggagaacttgcttagaaccatagaacttggcctggaggtgtctccgtctaccttgtttgccgttgccagtattctggagggctgtgcatttctcaacgggagtccacagaacaccctggtgcccggggccttagagctggcttggcaacatcgggtattcgtggggggcgatgactttaaatccggtcagaccaaggtgaaaagcgtcctcgtggattttctcatcgggtctggtctgaagacaatgagtattgtgtcgtataatcaccttggtaacaatgatggcgaaaatttgtccgcccccctccagtttagaagcaaggaagtctcaaagtcaaacgtagtcgacgacatggtgcagtcaaatcctgtgctctatacgccaggtgaggaaccagaccactgtgttgtcatcaaatacgtcccctatgtcggggactctaagagagcattggatgagtatacatctgagcttatgcttggagggacaaacaccttggtgctgcataatacctgcgaagacagcctgctggccgctcctatcatgttggacctcgctttgctcactgagctgtgtcaacgagtctcattctgtaccgacatggacccagagcctcagacctttcatcccgtactcagtcttctgtcttttctattcaaggcacctttagttccccccgggtcaccggtggtcaacgcactttttcgacagaggagctgcatagagaacatcttgcgggcctgtgtaggactgccacctcaaaatcacatgctgctcgaacacaagatggaaagacctggcccctctctgaaacgggttggtcccgttgctgcaacctatcccatgctcaataagaaaggccccgtgcctgcagcaacaaacggatgcacaggtgatgctaacggccaccttcaagaggagccacccatgcccaccacttag

SEQ ID NO: 120682 - DNA, 1227 bp, synthetic construct
  misc_feature 1..1227: note = Description of Artificial Sequence: Synthetic coding sequence
  source 1..1227: mol_type = other DNA
atgaggagggccaaggtactggactggggccttcaggagcagctctggcctcatatggaggccctgcgcccaaggccaagcgtgtacatacccgaatttatcgccgccaaccagtccgcacgcgcagataatcttatcccaggatcacgggcccagcagctcgaacagattcgccgggacatacgcgactttaggagcagcgctggcctggacaaagtgatcgtgttatggactgcgaacacggagcgattctgcgaggtaatcccaggactgaatgatactgctgaaaacctgctacgtaccattgagctcggacttgaggtgtctccgagcacattatttgctgtggcctcaatcttagagggctgcgcgtttctgaatggcagtccccagaatacactcgtccccggggccctcgaactggcgtggcaacaccgagtcttcgtggggggtgacgattttaagtctggccagaccaaggtgaaatcggttctggttgattttttaatagggagcgggctcaaaactatgagcatcgttagctacaaccaccttggaaataacgatggggagaatctgagcgccccattgcaattcaggtctaaggaggtgagtaagtccaacgtggttgacgacatggtgcagagtaatcctgttctgtacactcctggagaggagcccgaccactgtgtggtcatcaaatatgttccatatgtgggcgacagtaagcgggctctcgatgagtataccagcgaactaatgttagggggcactaatacactcgttttgcacaatacttgcgaagactccctgctggccgcacccatcatgctcgatctcgcccttctcaccgagctgtgtcagcgagttagcttctgtaccgacatggaccctgagccacagacgttccatccagttctgagtctgcttagctttttgtttaaagctcccctggtgccacccggatcccccgtggtgaatgcactgtttcgccagagatcctgtatcgagaacatattgagagcctgcgtgggattgccaccccaaaaccacatgctgctagaacacaaaatggaacgccccgggcccagcctgaagcgggtggggcctgtggccgctacctatcccatgcttaacaaaaagggcccggtgcccgctgccacaaatggttgtactggcgatgcaaatgggcacctgcaggaggaaccccctatgcctaccacatag

SEQ ID NO: 120683 - DNA, 1386 bp, synthetic construct
  misc_feature 1..1386: note = Description of Artificial Sequence: Synthetic coding sequence
  source 1..1386: mol_type = other DNA
atgacattacccggaggccccacaggaatggctcgtcccgggggagctaggccttgttcacccggcctggagagggccccccggcgctcagtcggcgagctacgtctgctgttcgaagctagatgtgcagctgtggctgccgctgcggcagccggggaaccccgggccagaggcgccaaaagaaggggaggacaggttcctaatggcctgcctcgggcccctcctgccccagtaatcccacaactcacagttaccgcagaggagcccgatgtgccccctacaagcccaggcccacctgaacgagaaagagactgcttaccagccgcgggttcctcacacctgcagcagcctcggaggttgagcacctcctctgtgtcaagcacaggttcgtcctccttattggaggattcagaggacgacctgctgagcgactctgaatcccgctctcggggcaacgtccaattggaggcgggcgaagatgtcggccaaaagaatcattggcaaaagatcaggaccatggtgaacctgccggtcatttcaccttttaagaagagatacgcttgggtccaactggccggtcatacagggagctttaaagctgctggaacttcaggactgatcctaaagagatgttcagagcccgagcgatactgtctcgcaaggctgatggccgatgccctgagggggtgcgtgcctgcttttcatggggtcgtggaaagggatggcgagtcctacctccaacttcaggacctgcttgatgggtttgatgggccttgcgtcctggattgtaagatgggggttcggacgtaccttgaagaggaacttaccaaagctcgcgaaagacctaagttgaggaaggatatgtacaagaaaatgctggccgtggatccagaagccccaacagaagaggaacatgctcagagagccgtgacaaaaccacggtacatgcaatggagagagggaatctcctcttcaaccacactggggttcagaatcgaaggaattaagaaggctgatggatcatgcagcactgacttcaaaacaacaagaagcagggagcaagtactgagggtctttgaggagttcgtccagggagatgaagaagtacttcggcgttatttgaaccgcctgcaacagattcgcgataccttggaagtttctgagttctttcgaaggcacgaggtgatcggaagttctttactgtttgtgcacgaccattgccatagagcgggagtctggctgatcgatttcggaaagacgacacctctgcccgatggccagattctcgaccatcggagaccctgggaggagggcaatagggaagatggatatctgctgggcctggacaacctgatcggcattctggcgagcctcgcggagcggtag

SEQ ID NO: 120684 - DNA, 2841 bp, synthetic construct
  misc_feature 1..2841: note = Description of Artificial Sequence: Synthetic coding sequence
  source 1..2841: mol_type = other DNA
atggccgtttactgctatgccctgaacagtctcgtcattatgaattcggcaaatgaaatgaaaagcggtggaggccccggcccctctgggtccgagactccaccgccgccccgccgggctgtgctgagtccggggtctgtgttcagccccgggcgtggagccagctttctgtttccacccgctgagagcctttcccccgaggagcctagatcaccagggggatggaggagtgggcgccgccgccttaactcctcctctggctccggctcaggctcgagcggctcgagcgtttcatcacctagctgggctggccgtctgcggggtgaccgccagcaggtcgtggcagctggcactctgagccccccaggacctgaagaagcaaaacgaaaactgcgaattctccaaagagaactccagaacgtccaggtgaaccaaaaggtcggaatgttcgaagcccatatccaggcgcagtcgagcgccatccaggcccctcgctccccacggcttggacgagcccgcagtccttcaccatgtcccttcaggtccagtagtcagcccccaggacgcgtgctggtgcaaggcgctcgatccgaagaacgtcgaacgaagtcatggggggagcagtgtcccgagacttccggcacagactcagggagaaaaggtggccctagcctttgctcctctcaagtgaaaaaaggtatgcctccactgcctggacgggcggctccaaccgggtctgaagcacagggtccgtccgctttcgtgcgcatggaaaagggaattccggcctctccaagatgcggaagtcccaccgccatggagatcgacaagagaggtagccccaccccgggtacccgctcatgcctggcaccttcactaggacttttcggcgcttcgctcactatggcaactgaagtggctgcacgggtgacatcaacgggaccccataggccgcaggacttggcactgaccgagcctagcggaagagctcgcgagctcgaggaccttcagccacccgaagccctcgtcgagcgacagggtcagttcttggggtcggaaacctctccagccccagagaggggcggtccacgcgacggtgagcctccgggaaagatgggaaaagggtatctgccatgtgggatgcctggaagcggggaacccgaagtggggaagagaccagaagaaacgactgtatccgtgcagagtgcagagtccagcgacagcttatcctggagtcgactgccacgggctttagcatcggtgggcccagaagaagcccgatcgggcgcacctgtgggcggcggccgatggcagttgtcagacagggttgaagggggctctcctacgctgggcctgctgggagggtccccatcagcccagccaggaaccggcaacgtggaagccggcatcccatcagggaggatgctggagcctctgccttgctgggatgcggccaaggatttgaaagaaccgcagtgtccgcctggagaccgggtaggagtgcaacctggtaacagtagggtctggcagggcacaatggagaaggcaggcctagcatggactaggggcactggggtgcagtcagaggggacatgggagagccaaaggcaagactcagatgccctgccgtccccagaattgttacctcaggatcccgacaagcctttcctgagaaaggcctgcagcccgtctaatatacctgctgtcattatcacggacatggggacgcaagaggacggggcactggaggaaactcagggttctcccaggggcaatctgccactcagaaaattatccagctcatcggcatccagtacaggattttcttcatcgtacgaggactcagaagaggatatctctagtgatccggagagaacgttggatccaaattccgcctttctccacaccctggaccaacagaagcctagagtaagcaagagttggcggaagattaaaaacatggttcactggtctcctttcgtgatgagctttaagaaaaagtacccttggatacagctggccggccatgctggcagcttcaaggctgcggccaatggaagaatcttgaagaaacactgtgagagcgagcagaggtgcctggatagattaatggtcgatgttctgcggcccttcgttcctgcttatcacggtgatgtggtgaaagatggggaaagatataatcaaatggacgatttactggccgatttcgacagcccctgtgtcatggattgtaagatggggatcaggacatacctggaggaggagctgactaaggctcggaagaaaccttctttgaggaaggacatgtatcagaaaatgattgaagtggaccccgaagctcccacggaggaagagaaggcccagcgagctgtgacgaagcctcgatacatgcagtggagagaaactattagcagcaccgcgacattgggcttccgaatcgaaggcattaaaaaggaagacggcaccgtcaaccgcgattttaagaagaccaagacccgggagcaggtgacagaagcgttccgggaatttaccaagggcaaccataacattctgatagcctaccgggacagactcaaagccataagaacaacactggaggttagcccatttttcaaatgtcacgaggtcattgggtcttcattactctttatccacgacaagaaggagcaagccaaagtgtggatgatcgactttggcaaaacaacaccactcccagaagggcagacgctccaacacgatgtcccatggcaggaaggcaatagagaggacggatatttgtctggactgaacaatctggtcgacatcctaaccgagatgagccaagacgctcctctggcatag

SEQ ID NO: 120685 - DNA, 1935 bp, synthetic construct
  misc_feature 1..1935: note = Description of Artificial Sequence: Synthetic coding sequence
  source 1..1935: mol_type = other DNA
atggcagtgtattgttacgctcttaatagtcttgttatcatgaattccgccaacgaaatgaaatctgggggaggcccaggcccgagcggctctgagactcccccaccccctcgcagggcggtcctgagccccggcagcgtgttttcccctggccgaggcgccagtttcctctttcctcctgccgaatctctgtcgcctgaggaaccgaggtcccctggaggatggcgttcaggccgacgacgcttgaactcctcgtccggcagcggcagtggcagttccgggtccagtgtgtcatctccatcttgggcgggccgactgcggggtgatcgccagcaggtggtggccgcaggaaccctgtccccccctggacccgaggaggccaagcgcaaacttcggatcctgcagcgcgagctacagaacgtgcaggttaatcaaaaggtaggcatgttcgaggctcacatccaggcacagtccagcgctattcaggcgccacgctcaccaagattagggcgcgcccgctctccatcgccctgtcctttccgttcttcgtctcagccccccgggagggtgctcgtccagggtgcaaggtctgaggagcggagaacaaaatcgtggggtgagcagtgtcctgagacatctggcaccgattccggtcggaagggagggccttctctgtgttcttcccaagtcaagaaggggatgccaccactccccggccgcgccgctccaacaggctccgaagcccagggcccttcggcctttgtgcggatggaaaaaggaatcccagcctcaccccggtgtggttcacctaccgccatggagattgacaagcgcggaagtcccactcctgggacccggagctgcctggctccgtctctgggtctcttcggcgcctcattgaccatggccaccgaggtggccgctagggtgacgtccaccggccctcatcgccctcaggaccttgctctaacagagccctcaggccgcgctcgagagttagaggacttgcaaccaccagaggctctggtcgagaggcagggtcagttcttgggctccgaaacgtcaccggcccctgagcgaggaggtccccgtgatggcgagccacctggcaagatgggtaaggggtatctcccatgcggcatgccaggatctggagaaccagaagtcgggaaaaggcctgaggaaaccacagtcagcgtgcaaagcgctgagagcagcgacagtttaagttggtcacgcctcccccgtgccttggccagtgttggcccagaggaagctcgcagcggcgctccagtcgggggtggaaggtggcaattatccgatcgagttgaaggggggtctccgaccctcggcttgctaggagggtccccttcagcccagcccgggactggtaacgtggaagcaggcattccatccgggcgcatgctggagccacttccatgctgggacgcggcaaaagatctgaaggaaccacaatgtccgcctggggatcgtgtcggcgtgcagccaggcaactctcgcgtgtggcaaggcacaatggagaaagccggcctggcatggacaagaggcactggtgtgcagagcgaagggacatgggagtcccagagacaggacagtgacgctctgccatcccccgagctcttgccccaagaccctgataagcccttcttaaggaaggcatgcagcccctcgaacatccctgccgtgattattaccgatatgggcacacaagaggatggcgccctggaggaaacacagggctctccaagaggcaatctccccctgcgaaagttgagttcttctagtgcctcatcgacaggttttagtagcagttacgaagactctgaggaagatatcagtagtgacccggagagaaccctcgatccaaattcagcctttctgcacaccctagatcagcagaagcctcgggtttag

SEQ ID NO: 120686 - DNA, 2841 bp, synthetic construct
  misc_feature 1..2841: note = Description of Artificial Sequence: Synthetic coding sequence
  source 1..2841: mol_type = other DNA
atggccgtctactgctacgcactcaatagcctcgtaatcatgaatagtgcaaacgaaatgaaaagtgggggggggcccggtccctcaggttccgagactccacccccccctcggagagccgttttatcaccaggtagcgtatttagtcccggacgaggggcgtcattcctattcccccccgcagagagtctgtcccccgaagagccacgcagtcccggaggttggaggtccggccgaaggcgactaaattcctcatccggctcaggatctggcagcagcggctctagcgtttcttctcccagttgggctggcaggctgagaggggaccgacagcaggttgtagctgccggaaccctaagtccccctgggccagaagaggcgaaaaggaaacttcggattttgcagcgggagctgcagaatgtgcaggtgaatcagaaagtagggatgttcgaggcgcacatccaggctcaatcttccgccatacaagcacctcgatccccccgtctggggcgtgcccgctcaccatcaccttgcccattccgatcttcgtctcagccccccggcagggtattagtacagggcgccagatcagaagagaggaggaccaagagctggggggagcagtgccccgagacctcagggaccgactccggcaggaaaggtggcccatcattatgctcctcccaggtcaagaagggcatgccccccttacccggacgggccgcccccaccggcagtgaggcccaaggcccttcagcatttgtaaggatggagaaaggtattcccgcttccccaaggtgcgggagcccgaccgccatggagattgataagcgagggagtccaacacccggaacgcggagttgtctggcaccatccctgggactgttcggcgccagcctgactatggcgactgaagtagctgccagggttacatccaccggtcctcatcggccacaggacctggcattgaccgaaccttcgggacgagctagggaattagaggatctccagcctccggaggctctcgttgagaggcagggccaattcttgggctcggaaacctcccccgcccctgagcgagggggtccccgtgacggcgagccgcctggcaaaatgggcaagggttacctgccctgcgggatgccaggcagcggtgaaccggaagtgggaaaacgccctgaggagacaacagtgtcagtgcagtcagcagagtcaagcgactcccttagctggagcaggctgcctagagctctggccagtgtggggcccgaagaagctcggtccggtgcccctgtgggtgggggaagatggcaactgtctgaccgcgtggagggcggaagccctactctgggcctgctgggaggatcacctagtgcccagcccggcaccggaaatgtggaggcaggcattcccagcggcaggatgctcgagcccctgccttgttgggatgcggctaaggatctgaaggagccccagtgccccccaggcgatcgggtgggtgtccagccgggcaattctcgagtctggcaaggaaccatggagaaagccggactggcttggacccggggcaccggagtacagagcgaggggacctgggagagccagcgacaggactcagatgcattgccgtcccctgaactcctaccccaagacccagataagccatttctgagaaaggcttgttctccttccaatataccggcggtgattatcacagacatgggaacacaggaggatggggcactcgaggagacccagggcagccccagagggaatctccctttgcgtaagctgtcctcttcttccgcttcatccactggtttcagcagtagctacgaagacagtgaagaggacatttcaagtgacccagagaggacgctggatcccaactccgcttttctgcacacactcgatcagcaaaaacccagggtttcgaagtcttggcgcaaaatcaaaaacatggtgcactggagtcctttcgtgatgtcttttaaaaaaaagtacccctggatccaactggccgggcatgctggatcttttaaggctgctgctaatggaagaatattaaaaaagcactgtgaaagtgagcaaaggtgcctggatcgtctaatggtggacgtcctcagaccattcgtgccagcctaccacggcgatgtggtgaaagatggtgaacgttataaccagatggacgatctgctggctgactttgatagcccctgtgtgatggactgcaaaatgggtatccgcacgtacctggaggaagagctgactaaggctcgcaaaaaaccaagcctgaggaaagacatgtatcagaaaatgatcgaggtcgacccagaagctcctacggaggaggagaaagctcagcgggctgtgacaaaacctagatatatgcagtggcgagagaccatttcctcaactgctaccctgggattccgcatcgagggtattaagaaggaagatggaactgttaacagggattttaagaaaaccaaaacccgggaacaagtcacagaggccttccgggagtttaccaaaggcaaccacaatatactgatcgcgtaccgcgatagactcaaggctattagaaccaccctggaggtctcacctttctttaagtgtcacgaagtcattggcagttctctcttgtttattcacgacaaaaaggagcaggcgaaagtgtggatgattgacttcgggaaaaccacaccactccctgaaggtcaaacccttcagcacgacgtgccctggcaagaaggtaatcgcgaggatggctacctctcaggattaaataatctggtggatatccttaccgaaatgagccaggatgctcccctggcctag

SEQ ID NO: 120687 - DNA, 2052 bp, synthetic construct
  misc_feature 1..2052: note = Description of Artificial Sequence: Synthetic coding sequence
  source 1..2052: mol_type = other DNA
atgcggcggtgcccatgtaggggatcattgaatgaggctgaggctggagcgttgcccgcagccgctaggatgggactggaagcccctcggggcgggcggcgtagacaacctggccagcaacggcctgggccaggagccggcgctcccgccggaagacccgagggcggcgggccatgggccaggactgaaggcagctctctacattcggaacccgaacgagccggactgggccccgctcccggaactgagtccccgcaagcggagttctggactgacggccagacagaacccgcagccgctggactgggagtcgagaccgagcgaccaaagcagaagacagaaccagatcggagcagcttgaggacgcacctcgaatggtcttggagtgagctggaaactacctgtttatggaccgagaccggaacagacgggctttggactgaccctcacagaagcgatctccagtttcagccagaggaggccagtccttggacccagcctggcgttcatggaccctggaccgagcttgagactcacggcagccagacacagcctgaaagagttaaatcttgggctgacaatctctggacacatcagaatagctcctcactacagacccaccccgagggggcctgcccctctaaggaaccttctgccgatgggagctggaaagaactttatactgacggcagccgaacacagcaagacatcgagggcccatggacagagccatacacagatggctcccagaagaaacaggatacagaagctgccagaaaacagcctgggaccggcggttttcagattcagcaggacaccgacggcagctggacccaacccagtaccgatggtagtcaaactgcgcccgggactgattgcttgctgggagaacccgaggacggcccgcttgaagagccagagcctggcgaactgcttacccacttatatagtcatctgaagtgcagtcccctgtgccccgtgcctagacttattatcacccctgagaccccagagccggaagcccagcctgttggtccccctagccgggtggagggtggatcgggcgggttctccagtgcaagcagctttgacgagtctgaggatgacgtggtggctggcggcgggggcgcctcagatccagaggataggagtgggtccaagccttggaaaaaactgaagacagttctcaaatactctccctttgtcgtctcgttcaggaaacactatccttgggtacaactcagcggccacgctgggaattttcaggctggtgaggatggcagaatcttgaagagattctgccaatgcgagcagaggagtcttgaacagttaatgaaggaccccctgcgcccctttgttcctgcatattatggcatggtgttgcaggatggtcaaacattcaaccagatggaggatctcctggctgatttcgaaggcccctctattatggattgcaagatgggctcccgtacatatctggaggaagaactcgtgaaagccagagaaaggcccagacccaggaaggatatgtacgagaaaatggtggcagtggaccccggcgctccgacgcctgaggagcacgcacaaggagccgtgacaaagcccagatacatgcaatggcgggagacgatgtcctcaaccagtacactcgggttccggatcgagggcataaagaaagctgatggcacgtgtaatactaacttcaagaagacccaagctctggaacaagtaactaaggtcctggaagatttcgtggacggggatcacgtcatcctccaaaaatacgtcgcgtgcctcgaggagctgcgggaggccctggaaatttcgccattcttcaagacacatgaggtggtagggtcctctctgttatttgtccatgatcacacaggactcgcaaaggtctggatgatcgactttgggaaaaccgttgccctgcccgaccaccaaactctttctcacagattaccatgggcggagggtaatagggaagatggctacctctggggcctcgacaatatgatatgccttttacagggcctggctcagagttag

SEQ ID NO: 120688 - DNA, 1740 bp, synthetic construct
  misc_feature 1..1740: note = Description of Artificial Sequence: Synthetic coding sequence
  source 1..1740: mol_type = other DNA
atgcgacgacctcccggcaacggggaagctgcgtcggaaggaccgggcggatgggggctgtggggcgtacaggaaagtcgacgactgtgttgtgccggccacgatcgctgtaagcaggcattgctgcagatcggaattaacatgatggcgctgccaggtggcagacaccttgatagcgtaactctcccaggacagcgactgcaccttatgcaggtcgattcagtccagaggtggatggaggacctgaagctgatgaccgaatgcgagtgtatgtgcgttcttcaagccaagcctataagcttggaagaggacgctcagggtgacctgatactagccggaggcccagggccgggtgacccactccagttgttactgaagagggggtgggtaatatctactgaactgcgtcgaattggacaaaagttagcccaagacaggtgggctagggtgcacagcatgagcgtcaggttgacatgccacgctcgctcaatggtgtctgaatatagcgctgtgtcaaggaatagccttaaagaaatgggagagatcgaaaagttgctgatggagaaatgctctgaattgtctgcggtgaccgaaagatgtctgcaagtggaaaatgaacacgtgcttaaatcgatgaaggcttgcgtaagtgaaactctgtctatgctgggacaacacttcgggcagcttctcgaattggcactaacgcgagaggttcaggccttggtgagaaagatagacgcatcagataatatctacactacagaaagtaccactggcaatctgttctctctgactcaggagggcgctcctctatgtcgtataatcgctaaagaggggggggtggtcgccctcttcaaagtgtgccgccaggactcttttaggtgtctctatccccaagctctgagaacactggcctctatttgctgcgtggaggagggcgtgcatcagctggaaaaagtcgacggggtgttgtgccttgctgatatcctcaccgacaacagccatagtgaagccactcgagctgaagcagccgcagtagtggcgcaggtcacgagcccccaccttccagtcactcagcatctgtctagcttcctggagagtatggaggaaatcgttacagctctggtgaaattatgtcaggaggcctcatccggtgaagtgttccttctcgcatctgcagctcttgctaacattacgtttttcgacacaatggcctgtgagatgctattgcagttgaatgctattcgcgtcctgttggaagcttgctccgacaaacaacgggtagatacaccatacacacgcgatcaaattgtcacgatcctcgccaacatgtcagtgttagaacagtgcgcctccgatataatccaagaaaacggcgtgcaattgatcatggggatgcttagtgaaaagccccgcagtggcacgcccgcagaggtggcggcttgtgagagggtccagcagaaggcagccgtcaccctcgcccggctgagccgcgatcccgacgtcgctcgagaagccgttcgtcttagttgcatgtctcgtttgatcgaactctgtagatccccctccgaacgcaactcaagcgacgcagtgctcgtggcttgcttggctgcgctcagacggctcgcaggcgtgtgcccagagggccttcaggattctgacttccagcagctggtgcagcctaggctggtggactcctttttgctctgcagtaatatggaggaatcttttgtatag

SEQ ID NO: 120689 - DNA, 1599 bp, synthetic construct
  misc_feature 1..1599: note = Description of Artificial Sequence: Synthetic coding sequence
  source 1..1599: mol_type = other DNA
atgatggctctccccggcgggcgacacctggatagtgtcacactcccagggcagcgactgcacctgatgcaggtcgacagtgtgcaaagatggatggaggatcttaaacttatgacagagtgcgaatgtatgtgcgtgctgcaggctaagccgatctcactagaggaggacgcccagggagatctgattctggccgggggccctgggcctggcgaccctttacagctcctgctgaagcgcggctgggtgataagtactgaattgagacggattggccagaaattagcccaggataggtgggcgcgggtccactcaatgagcgtacgcctcacttgtcacgctcgtagtatggtgtccgaatattcagccgtctctcgaaactctctgaaagagatgggagagatagaaaaactgttgatggaaaagtgcagcgagctatccgccgttacagagaggtgtctgcaggtggaaaacgaacatgtgctcaaaagtatgaaggcgtgcgttagtgaaacactatctatgctggggcaacactttgggcagctgttggagctcgctctgacgcgtgaagtgcaagccctagtgaggaagatcgacgctagtgacaatatttataccactgagagtacgaccggtaatcttttcagtctgacgcaggagggggccccattatgcaggatcatcgccaaggaaggcggagtagtcgcacttttcaaggtttgccgtcaggacagcttccgctgcctgtacccacaggccctacggacccttgctagtatctgctgtgttgaggagggagtgcaccagctcgagaaggtcgatggggtcctctgccttgccgatattctgactgacaatagtcacagcgaggcaacccgagcagaggcggctgctgtcgtggctcaggttacctcaccacatctgcccgtgacacaacacctgtcttccttcctcgagtctatggaggagattgtaactgcgttggtaaaactatgtcaggaggcatcctcaggcgaagtgtttttactagcttccgccgccttggctaacatcacattttttgacaccatggcatgtgagatgctgcttcagctgaatgctatacgcgtgctactggaggcgtgttccgacaagcaacgcgtggatacaccttacactagggaccagatcgtcaccatactggcaaatatgtctgttctcgagcagtgcgcttctgacattatccaggagaatggtgtccagctcataatgggtatgctatctgaaaaacctcggtccggaactcctgccgaagtagcagcttgcgagcgagtgcagcagaaggccgcagtcacattggcgcgtctaagtagggacccggacgtggccagagaagctgttcggctatcatgcatgtcgcgcctcatcgagctttgcagatctccctctgaacgtaactcaagtgacgctgtgttagttgcttgcctggccgctctcaggcgtctcgccggagtgtgccctgaggggctgcaggattccgacttccagcaattagtgcaaccgcggctagtggattccttcttgctgtgtagcaacatggaagagagctttgtctag

SEQ ID NO: 120690 - DNA, 927 bp, synthetic construct
  misc_feature 1..927: note = Description of Artificial Sequence: Synthetic coding sequence
  source 1..927: mol_type = other DNA
atgatggccctgcctggtggtcggcatctggactccgtgactcttccgggccagcggctccacctgatgcaggtggattctgtgcagaggtggatggaggatttaaagctgatgacagagtgtgaatgtatgtgtgtgctgcaggccaaacccattagtctggaagaggatgcacagggcgacctgatacttgctggagggcctggcccaggagatcctttgcagttactgctgaaaaggggctgggtcatctcgaccgagctgcggaggatcggtcagaaactggctcaggaccggtgggcgcgcgtgcactctatgtctgtgaggttaacctgtcacgcgcgttccatggtatccgagtatagtgcagtgtcccgcaactctctcaaagagatgggagaaatcgaaaagctgcttatggaaaaatgctctgagctgtctgctgtcacagagcgctgtctacaggtcgaaaatgagcacgttctcaagagtatgaaggcgtgcgtgagcgagacgttgtcaatgcttggccagcactttggacagctcctggagctcgccctaacccgtgaggtccaggtcgaatcacattctgtgacccgtctggaatgcagcggcgcgatcagtgcccagtgcaatcttcgcttactggggagcagcgacagccccgcaagtgctagccaagctctcgtgagaaagatcgacgctagtgacaatatttatactacagagtcgactacgggcaacctgtttagcctcacacaagaaggggcgccgctgtgcaggataattgcaaaggaggggggagttgtggcactgtttaaagtgtgccggcaggacagcttcagatgcctatacccccaggcgctaaggactctcgcttccatatgttgcgtggaagagggagtgcaccagttggaaaagtag

SEQ ID NO: 120691 - DNA, 1473 bp, synthetic construct
  misc_feature 1..1473: note = Description of Artificial Sequence: Synthetic coding sequence
  source 1..1473: mol_type = other DNA
atgatggcgttgccaggcggaaggcatctggactcagtaacgctgccaggacagagactgcacctcatgcaggtcgattcagtgcagcgctggatggaggaccttaagttaatgacggagtgtgaatgcatgtgtgtgctgcaggctaagcccattagcttggaggaggatgcccagggggacctgatcctggctggcggccccgggcccggcgacccactacagctgcttcttaaaagaggatgggtcatttccacagaacttagacgaattgggcagaagctggctcaggataggtgggctcgagtccactctatgtctgtcaggttaacatgccacgcacgctctatggtatccgagtactcggcagtgtctcgaaactctctgaaggagatgggagagatcgagaagctgcttatggagaagtgctcagaacttagtgccgtcaccgaaagatgtctgcaagtggagaacgagcatgtcctgaaatcgatgaaggcctgtgtgtcggaaactctgtctatgcttggacagcattttgggcagctcctggagttggccctgacccgggaggtgcaggccctggtaaggaaaattgatgcatcggacaacatctacacaacagagtcaactaccggcaaccttttctctttgacccaggaaggcgctcccctctgtcgcattatcgctaaggtggatggcgtgctgtgcctggccgacattctcacagataacagccattccgaagccacgagagccgaggccgccgctgttgtggctcaggtcacaagtccacacctgcccgtcacacagcacctgtcatctttcctagagtcaatggaggaaattgtgacggctcttgtgaaattgtgtcaggaggcctcctccggcgaagtgtttctcttggcatccgccgcgttggccaacattacattctttgatactatggcttgcgagatgctgctgcaacttaatgctattagagtgctgctggaggcttgtagcgataaacagcgggtagataccccttatacccgcgatcagattgtaactatattagcaaacatgagcgttttggaacagtgcgcatcagacataatacaggaaaacggtgtgcaactcatcatgggcatgctgtcggaaaagccacgcagtggcactcccgccgaagttgcagcttgtgagagagtgcagcagaaggccgccgtgacactggcaagactatcgagagaccccgacgtcgcacgcgaggccgtacgactgtcttgtatgtcacggcttattgagctatgccgctcccctagcgaaagaaacagctctgacgccgtcctggtcgcctgtcttgcagccctccgtagattagctggcgtgtgtcccgaaggactgcaggacagtgatttccagcagctggttcaacctcggttagtggactccttcctcctgtgcagcaatatggaagagagttttgtgtag

SEQ ID NO: 120692 - DNA, 1473 bp, synthetic construct
  misc_feature 1..1473: note = Description of Artificial Sequence: Synthetic coding sequence
  source 1..1473: mol_type = other DNA
atgatggctctaccagggggtcgtcatctcgatagcgtgacactgccggggcagcgtctgcacctgatgcaagtcgactcagtgcagagatggatggaagatctcaagcttatgacagagtgcgagtgtatgtgcgtgctccaggctaagcctatttcactcgaggaggacgctcagggagacctcatactggctggtggacccgggccaggcgatcccctgcagctgctacttaagcgcggttgggtcatttcaacagaacttcggcgcattggacagaaacttgcacaagatcgttgggctagggtacactctatgtccgtccgcctgacatgtcatgccaggagcatggtgtcggaatattccgcggtgtcacggaacagcctgaaggaaatgggagagatcgagaagttgctaatggaaaaatgctccgagctgtccgccgtgacggagcgctgcctccaggtggaaaacgagcatgttctcaagagtatgaaggcgtgcgtgtccgagaccctttctatgctcgggcagcatttcggccaacttctggagctcgctctgacacgggaggtccaggcgctggtgcggaaaatcgatgcctcagacaatatctatactacagagtcaacgacgggcaatcttttctcgctgacccaggagggagctcctctgtgcagaatcatcgctaaagtggacggcgttctttgtctcgccgatatcttgaccgacaattctcactccgaagcgactcgggctgaggctgcggcagtcgtggctcaggtcacgagtccacatcttcctgttactcagcacctgtcgagtttcctcgaatcaatggaagaaatcgtgaccgcccttgtcaaactttgccaggaagcctcgtctggcgaggtgttcctgctagcaagcgccgccctcgccaatatcacttttttcgataccatggcatgtgaaatgctgcttcaactgaacgccatacgcgtgttactggaggcctgttctgataaacagcgcgtggataccccttatacacgtgatcaaatcgtgacaattctggcaaacatgtctgttctcgaacagtgtgcctcagatattatccaggagaatggagtacagctgatcatgggaatgttgtcagaaaaaccccgttccggtactccagccgaggttgccgcctgcgaacgggtacaacagaaggcggctgtgaccctcgcccgcctctctcgggaccccgatgtggcccgggaggccgttagattgagttgtatgtcacggctgatcgagttatgcagatctccatccgaacgcaacagctctgacgccgttttagtggcctgccttgcggcgctacggaggcttgcaggagtgtgtcccgaaggtctgcaggattcagatttccagcagttggtgcagcctcggttagtggacagttttctcctatgctcaaacatggaggagtcctttgtatag

SEQ ID NO: 120693 - DNA, 1599 bp, synthetic construct
  misc_feature 1..1599: note = Description of Artificial Sequence: Synthetic coding sequence
  source 1..1599: mol_type = other DNA
atgatggcactgccggggggcagacacctcgatagcgtcaccctgccgggtcaaaggctgcacctgatgcaggtggatagcgtgcagagatggatggaggacttgaagcttatgacagaatgcgaatgcatgtgcgttcttcaggctaaaccaatctccctggaagaggatgcccagggtgatctgatcctagccggaggccccggtccaggcgatccactgcagctcctgctgaaaaggggctgggtgatatctaccgagctccgacggatcggacagaaactggctcaggacaggtgggcccgggtccatagcatgagtgtgaggctgacatgtcacgcgaggagcatggtgagcgaatattcggcggtgagccgtaatagtctcaaggaaatgggggaaatcgaaaaattgctcatggaaaaatgctctgagctgagcgccgtgacagaaaggtgcctgcaggttgagaatgagcatgttttaaagtccatgaaagcctgcgttagcgagaccttatcaatgctgggacagcacttcggtcagctgctagaattagccctcacccgggaggtgcaggctctcgtacgcaaaatcgacgcttctgacaacatctatacgaccgagtcgactactggcaatctattctccctaacccaggaaggagcccccctctgtaggattatcgctaaggaggggggggtggttgctctatttaaggtctgtcgccaagactcattcaggtgcctgtatccccaggccctgagaacgctggcatcaatctgttgcgtggaagagggcgtgcatcagcttgaaaaggtggacggagtgctttgcctggctgatatactcactgacaattcccatagcgaagctacacgtgccgaggctgccgctgtggtcgcccaggtaacttcgccccatctgccagttactcagcacttgagttctttcctggagtctatggaggagattgtcacagcattagtcaagctttgccaggaggccagcagcggtgaggtgtttttgctggcatccgccgccctcgctaacatcactttttttgacactatggcttgcgaaatgctcctccagctgaatgccatcagggtcctgctcgaagcatgttctgataagcagagggtcgacacaccatacacgcgcgaccaaattgtgacaatcttagcaaatatgagcgtgctggaacagtgcgcatctgatattatacaggagaacggcgtgcagttaataatggggatgttaagcgagaaacctcgaagcggcacccctgcagaggtcgccgcgtgcgagcgggtccaacagaaagctgcggtaacactggctcggctgagtagagaccctgacgtcgcccgagaagccgttcggctgtcatgtatgagcaggctcatcgagttgtgtagatccccatcggaacggaactcatcagatgcggttctggtggcttgcctcgccgccctgcggaggctcgctggcgtttgcccagaggggctccaggatagcgatttccagcagctggttcagccaaggctggtcgacagcttcctgctctgtagcaatatggaagaatctttcgtttag

SEQ ID NO: 120694 - DNA, 834 bp, synthetic construct
  misc_feature 1..834: note = Description of Artificial Sequence: Synthetic coding sequence
  source 1..834: mol_type = other DNA
atgccacgtcttcacgaccatttttggagctgcagctgcgctcatagtgctcgtcgtaggggacccccgcgtgcgtcggctgctggactggctgccaaggtgggcgaaatgatcaatgtctctgtcagcggcccatcactcctggcagctcacggggcaccagatgcagatccagctccaagggggcggtctgccgccatgagtgggcccgaacccggatctccttatccaaacacttggcaccaccgattactccagagatccctagtgttattcagcgttggcgtggtcttagccctcgtgctgaatctccttcaaatacagagaaacgtaaccctgttccctgaggaagtgattgctactatcttcagcagcgcttggtgggtgccaccatgttgcggcaccgctgccgctgtggtggggctgctgtacccatgcattgattctcacctgggcgagccacacaaatttaagagggagtgggccagcgtcatgcgctgtattgcagttttcgtgggcatcaaccatgcatccgccaagttagacttcgcaaacaatgttcagctctccctcaccttggccgcccttagcctcgggttatggtggacttttgatcgttcaaggtccggcctgggtctgggcattaccattgcattcctcgccactctgattacacagttcttagtgtataatggcgtgtatcaatacacctcgcccgactttctctacatcagatcatggctcccctgtattttcttcagcggcggcgtgacagtgggcaatatcggacggcagctggcaatgggcgtgccagaaaagccccactctgactag

SEQ ID NO: 120695 - DNA, 537 bp, synthetic construct
  misc_feature 1..537: note = Description of Artificial Sequence: Synthetic coding sequence
  source 1..537: mol_type = other DNA
atgccgcgcctgcatgatcacttttggtcatgcagctgtgcacacagcgctagacgtcggggaccccctagagcatcagccaaactggatttcgccaacaacgtgcaactgtccctgaccctggcagccttgtcattgggactctggtggaccttcgacaggagtagatcaggcttaggcctcggaattacgatcgccttcttggccactttgattacacagttcctggtatataatggcgtgtatcagtatacctcccctgatttcctttatataagatcatggctgccttgcattttttttagcggaggtgtgacagttggaaacattggcaggcagctggcaatgttgattcctttctgtgaagagttgaacctgaagaccacctggctgtttcacaaaaccagatcaaactatcgcgtgttcttgaaatccccaatagtcatcgagtcttcgaagccgcctattctacgcgctcgcaaaattcttgaggagaacttgaccgttgattatgacaaagactacctgtttagctag

SEQ ID NO: 120696 - DNA, 372 bp, synthetic construct
  misc_feature 1..372: note = Description of Artificial Sequence: Synthetic coding sequence
  source 1..372: mol_type = other DNA
atgcctcgcctgcacgatcatttctggtcttgctcatgtgctcattccgccaggagacgaggaccgcctagggcaagcgcagctggcttagcagctaaggtcggcgagatgatcaacgtctcagtgagcggaccatcgctcttggctgcccatggggcaccagatgcggatccagccccacgcgggcggagtgccgctatgtcgggaccggagcccggaagcccctatcccaatacatggcatcacaggctcctgcagcgctccttggtgttatttagtgttggggtggtcctggctctggtgctgaacctgctgcaaatccagaggaatgtaacactcttccctgaggaagtaatagcgaccatcttctag

SEQ ID NO: 120697 - DNA, 495 bp, synthetic construct
  misc_feature 1..495: note = Description of Artificial Sequence: Synthetic coding sequence
  source 1..495: mol_type = other DNA
atgccaaggcttcatgatcacttttggtcgtgcagctgtgctcacagcgctcgacgcagaggacccccccgggcgagcgcagcgggcctcgctgcgaaggttggcgagatgatcaatgtttctgttagtggcccttccctcctcgcagctcacggagctcctgatgcagaccccgcaccaaggggccggtcagccgcaatgtcagggcctgagccaggatctccctatcccaacacttggcaccacaggctcttacagcgcagcctggttctcttctctgtgggagtggtgttagcactggtactgaacctccttcagattcagagaaatgtgacgctgtttcctgaggaggtgattgccactattttttccagcgcctggtgggtaccaccttgctgcggcacagccgccggcattcatccacagatatcttccatattcgtattaggcagtctggtgtacttctcccaggaggcatctaggtgggggacatag

SEQ ID NO: 120698 - DNA, 678 bp, synthetic construct
  misc_feature 1..678: note = Description of Artificial Sequence: Synthetic coding sequence
  source 1..678: mol_type = other DNA
atggcggaaggtgagaccgagtcccccggcccaaagaagtgtgggccctatataagcagtgtcaccagccagagcgttaacttgatgattagaggtgttgtccttttttttataggagtattcttggccctggtgcttaatctactgcaaattcaaaggaatgtgacccttttcccacctgatgttattgcctcaatattttcgtcagcatggtgggttcccccttgttgcggcactgcgtccgccgtgattgggctgctttacccttgtattgatcgtcacctgggggaaccccacaaatttaagcgggagtggagtagtgtgatgcggtgcgtcgcagtattcgttggcattaaccatgctagcgcaaaagtggacttcgataacaacatacagctgtcgctgactttagctgctcttagcattggcctctggtggactttcgatcggtcaagatccgggtttggcctgggagtgggtattgctttcttggctaccgtggtaacacaactcctcgtgtacaacggggtgtatcagtatacatcacctgattttttgtacgtgcgttcatggctcccttgtatatttttcgcaggtgggatcactatgggtaacatcggccggcaacttgccatgtatgagtgtaaagtaatcgcagaaaagagtcaccaagagtag

SEQ ID NO: 120699 - DNA, 4149 bp, synthetic construct
  misc_feature 1..4149: note = Description of Artificial Sequence: Synthetic coding sequence
  source 1..4149: mol_type = other DNA
atggccactgggggaaggcggggggcagctgcggctcctttgctcgttgccgtggctgccctgctgctgggcgccgccggacatctatatcccggcgaggtctgccctggaatggatattcgaaacaacctgaccaggctgcatgagctggagaattgttctgtgatcgagggacatctgcagattctgctgatgtttaagacacgcccagaggacttcagggatctgtctttcccaaaactcatcatgatcacggattacttgcttctgttcagagtgtacgggctggagtccctgaaagacctctttcctaatttgacagtcattcggggttcacggctgtttttcaactacgcgctcgttatatttgagatggttcatctgaaggaactgggactctataatctgatgaacattacaaggggatccgtccgaattgaaaaaaataatgagctctgctatctggcgacaattgactggtccaggatcctcgattccgtagaagataattatattgtgcttaacaaagatgataacgaggaatgtggcgatatttgccctggaaccgccaaagggaaaacgaactgccccgcaacagtcatcaatgggcagttcgtggaacgctgctggacacacagtcactgccagaaggtttgtcctacaatctgtaagagtcacggctgcaccgcagagggcttatgttgtcattccgaatgccttggcaactgtagtcaacccgacgaccccactaaatgtgtggcctgccgaaacttctatctggatggtcggtgcgtggaaacatgcccccccccgtactatcactttcaggattggcggtgcgtgaacttttccttttgtcaggatctccaccacaagtgcaagaattctaggcggcagggctgtcatcagtacgtcatccacaacaataagtgtattccagaatgccctagcggttatactatgaacagttccaatctcctttgcacaccttgtttgggaccctgtccaaaggtgtgccacctgctggagggcgagaagacgattgatagtgtcacatctgcccaagagctgcgaggctgcacagtcatcaacgggagtctgattataaacataagaggaggaaataatctggccgcggagctggaagcaaaccttggtcttatcgaggaaataagtggatatctgaagatccgccgcagctacgctctcgtgtcattgtccttttttcgtaagcttcggctcattaggggcgaaacactcgaaatcggtaattatagtttctatgccctggacaaccagaacctgcgccagctgtgggactggagcaaacataaccttactatcacccaaggcaaattgtttttccactataatccaaaactttgtctcagtgaaattcataaaatggaggaagtaagcgggacaaagggccggcaggagcgcaacgacattgccctcaaaacaaatggagatcaggcttcttgcgagaatgaattgttaaaattctcatatatacgaacctcttttgacaagattctgctcagatgggaaccctattggccgccagattttagggatctgcttggcttcatgcttttctataaggaggccccctatcagaatgtcacggagttcgacgggcaggatgcgtgcggctcaaatagctggactgtggtggacatcgatcctcctctgcgatctaatgacccaaagtctcagaaccacccggggtggctcatgcgaggcctgaagccatggacacagtacgccatttttgtgaaaactttggtaactttcagcgacgagcggcggacctacggcgctaagtctgacataatctacgtccagacagatgctaccaatccgagtgtccccctggaccccatcagtgtaagcaattcttccagccagatcatactgaaatggaaacctccatcagaccccaacggtaacatcacccactatctggtgttctgggaacggcaagccgaagattctgagctctttgagctggactactgccttaaaggactgaagttgcccagcagaacttggagtcctccttttgaatcagaggactcacaaaagcacaatcagtccgaatatgaggacagcgctggggagtgttgcagttgtcccaagacagatagccagattcttaaggagttagaagaaagctcctttaggaaaacttttgaagactaccttcataatgtcgtcttcgtaccacgtaagacctcttctgggacgggcgcggaagatccaaggccctccagaaaaaggcgaagcctgggtgacgtgggcaacgttaccgtcgctgtgccgacagttgccgccttccccaacacaagttccacctccgtcccaactagtcccgaagagcaccgcccctttgagaaggtggtgaataaggagtctttggttatttccggattgaggcattttactggatatcggatagaattgcaagcttgtaaccaggacacgcctgaggaacgctgctccgtggcggcatacgtgtctgctcggactatgcccgaggctaaagctgacgatatagtggggcctgttacccacgaaatcttcgaaaacaacgtggtgcatctgatgtggcaggagccaaaggaacccaacggccttatagtgttgtacgaggtttcatatagacgctatggagacgaggagctccatttatgcgtgtcaagaaagcactttgccctggagcggggctgtaggctgagagggctcagccccggcaattactccgtccggatcagagccacctcccttgctggtaacggaagctggactgagccaacgtatttttacgtgactgattatcttgacgttccctcaaacatagcgaaaatcattatcggccctctgattttcgtctttctgttctccgtggtcattgggagcatctacctcttcttacgaaaaaggcagcccgatggcccattaggacctttgtatgcctcgagtaaccctgagtacctgtcagctagcgacgtcttcccatgttccgtgtacgtgcccgacgagtgggaggttagtcgggagaaaataaccctccttcgggagctcgggcagggttcatttgggatggtctatgagggcaatgcgcgggacataattaagggcgaggctgaaaccagagtcgctgtgaaaacagtcaacgagagcgcatcacttagggagcgaatcgagttcctgaacgaggcctccgtaatgaaaggttttacgtgccatcacgttgtgagactgctgggcgtagtctccaagggccagcccactcttgtcgtcatggagctgatggcccatggagaccttaaaagctacctgcggagcctgcgtcccgaggcggagaacaaccctggaaggcccccaccgaccctccaggaaatgatacagatggccgcggagatcgccgacggcatggcctacctgaatgctaaaaaattcgtgcaccgagatctggctgccagaaattgcatggtggcccacgatttcacggtcaaaatcggggatttcggcatgaccagagatatctacgaaaccgactattaccgcaaaggaggtaaaggactgctgccggtgagatggatggcccccgagagcctgaaggatggggtatttactaccagctccgacatgtggtccttcggagtcgtgctttgggagattacttccctcgccgagcagccctatcagggcctgtctaacgagcaggtgctgaaatttgttatggatggcggttacctcgaccagccagacaattgccccgaacgagtaaccgatctgatgaggatgtgctggcagttcaatcctaaaatgcggcctactttccttgaaatcgtgaatctgctgaaggacgatctccacccttctttcccagaagtgagtttctttcatagcgaggaaaacaaggccccggagtcagaggagttagaaatggaatttgaggacatggaaaacgtacctctagaccgcagcagccattgtcaaagagaagaggctgggggcagagacgggggttccagcctcggtttcaaacgatcatatgaagaacatataccttatacacacatgaatggcggtaaaaaaaacggccgaatcctgaccctcccgcggagcaacccctcatag

SEQ ID NO: 120700 - DNA, 4113 bp, synthetic construct
  misc_feature 1..4113: note = Description of Artificial Sequence: Synthetic coding sequence
  source 1..4113: mol_type = other DNA
atggccaccggagggcgtcggggcgcggctgcagctcccctcctggtggcagtcgccgccttgctgctgggagctgccggtcatctgtaccctggcgaggtctgccccggtatggacatccgcaacaacctgacacggttgcacgagctcgagaattgttccgtgattgaaggccaccttcaaattctgctgatgtttaagaccaggccagaagacttccgtgacctgtctttccctaagctgattatgatcactgactacctgctcctgtttcgggtgtacggactggagtccctcaaagacctgttcccaaatctgaccgtgatacgaggctctcggctcttctttaattatgcacttgttatatttgaaatggttcatctcaaggaattaggactgtacaacctgatgaacattacacgcggctcggtgaggatcgaaaaaaataacgagctctgttacctagccacgatcgattggagccggattctagactcggtcgaggataactacatcgttcttaacaaagatgataacgaagagtgcggggacatctgcccagggaccgccaaaggcaagacgaattgtcctgcaacggtcatcaacgggcaattcgtggagagatgctggacacatagccactgccagaaggtgtgtcctactatttgcaaaagtcatggctgtacagctgaaggcctttgttgtcattccgaatgcctgggtaactgttctcaacccgacgatcctacaaagtgcgtggcttgtaggaatttctatctggatggccgctgtgtggaaacctgcccccctccttactaccattttcaagattggaggtgtgtgaacttttccttctgccaggacctccatcacaagtgcaagaacagtcgcaggcaaggctgtcatcagtatgtcattcacaacaataagtgcatccctgaatgtccctctgggtacacaatgaacagctctaatttgttgtgcactccctgcttgggcccatgccctaaggtgtgccatctgttagagggagagaagacaatagactcagtgacgtccgcccaggaactgcgggggtgcaccgtaatcaatgggagcctgatcattaacatccgcgggggtaacaacctggcagccgagctcgaggccaaccttggactcattgaggaaatttctggctatctgaagataagaagatcatacgccttggtgtccctttccttttttcgcaaactgagactcatacggggcgaaaccctggagattgggaactattcattttacgccttggataaccaaaatcttcggcagctgtgggactggagtaagcacaacctgacaattacccaggggaaattattcttccactataatcccaaactctgtcttagcgaaatccataaaatggaggaagtcagcggaacaaagggccgtcaggaaaggaatgatattgcactaaaaacaaacggcgaccaggcatcctgtgagaacgaactgttaaagttctcgtacattcgcacaagctttgacaaaatactgctccggtgggagccctactggcctccagactttcgcgaccttttgggctttatgttattttataaagaagcaccctatcagaacgttaccgagtttgatggacaggacgcgtgcggctctaactcctggactgtggtggatattgatccccctcttcggtccaatgaccccaagagtcagaaccatcctgggtggctaatgagaggattgaagccatggactcagtatgccatattcgtaaagacgctagtgacatttagcgacgaacggagaacctacggtgccaagtccgacattatttacgtgcaaacggacgcaacaaatccctctgttccccttgaccctatctctgtgtcaaatagctccagtcaaatcatattgaagtggaagccacccagcgacccgaacggcaatattacacactacctggtgttctgggagaggcaagcagaagactccgagctattcgagttggactactgtttgaaaggattaaagctgccatcacggacctggtcgccgcccttcgagtccgaggattctcagaaacataatcagagcgaatatgaggactccgccggcgaatgctgttcttgtccaaaaactgacagccaaattttaaaagaattggaagaatcgagcttccgaaagaccttcgaggactacctacataacgtggtgttcgtgcctcggccgagccggaaaaggcgctcgctcggggatgttggaaacgtcaccgtggccgtccccacagtggccgctttccccaacacaagcagtacttctgtgcccaccagccctgaagagcaccgaccctttgaaaaagttgttaataaagaaagcctggtaatctctggcctgagacatttcaccggctaccggatcgagctacaggcctgtaaccaagatactccagaggaacgctgcagcgtggccgcatacgtgagcgctaggactatgccggaagcaaaggctgatgatatagtagggcctgtcacgcatgagatttttgagaataatgtggtgcatctgatgtggcaagagcctaaagagccaaacggcctgatagtgctctatgaagtctcatatcgtcgatacggagatgaggagctgcatctctgtgtctcaaggaagcatttcgcactggaaaggggatgccgtctgcgtggactgtctccagggaattacagcgttcgcattcgagccactagcctggccggaaatggttcttggacagagcccacatacttctatgtcactgattacctggatgtcccgtccaacatcgccaagattatcattgggcccctgatctttgtttttctttttagcgtggtgatcggatctatatatctgtttctgagaaagcgtcagcctgatggacccttggggccgttgtatgcgtcctcgaatcccgagtatctgtccgcaagcgacgttttcccctgcagtgtttacgttccggacgaatgggaggtctcacgggaaaagattactttgcttcgtgagctgggacagggaagtttcggcatggtgtacgaagggaacgcgcgtgatataattaagggtgaagccgagactcgggtggctgtgaagaccgtgaatgagtcagctagcctgcgggaaaggatcgagtttcttaatgaggctagtgttatgaagggcttcacatgccatcacgtcgtgcgtctgcttggagtggtgagtaagggccaacctacattagtggtgatggaattgatggcccacggtgatttgaagtcctatttacgcagcttacgccctgaggcggagaacaaccccggaaggcctccccctaccctccaggagatgattcagatggcagctgagatcgctgacgggatggcttacctcaatgctaagaagtttgtgcatagagatctcgccgcccgcaactgcatggtagcacatgattttaccgtcaaaatcggcgattttggaatgacgcgtgatatctacgagacagattattataggaaggggggcaagggcctgctgcctgtccgctggatggcccccgagtctcttaaggatggagtatttacaacgtcatccgatatgtggagtttcggagtagtgctttgggagatcacaagtttagcagaacaaccttatcaaggcctgtccaacgagcaggtgctgaaatttgtgatggatgggggctacctagatcagccagacaactgcccagaacgggttacagacctaatgcgtatgtgctggcagttcaacccaaaaatgaggccgaccttcctcgaaatagtaaacttactgaaggacgatctccatccaagttttcccgaggtctctttctttcattcagaggaaaataaagcccctgagtccgaggagctggagatggagttcgaggatatggaaaatgtgcccttagaccgcagttcgcactgccagcgcgaagaggcaggcggccgagacggcggtagcagcctggggtttaaacgctcctacgaagagcacattccttacacccacatgaacggtggcaagaagaatggacgaattctgacactccctaggtccaatccatcctag

SEQ ID NO: 120701 - DNA, 252 bp, synthetic construct
  misc_feature 1..252: note = Description of Artificial Sequence: Synthetic coding sequence
  source 1..252: mol_type = other DNA
ccataccaaaacgttaccgaattcgacgggcaagacgcctgcgggagcaactcttggactgtcgtcgacatcgatcccccgctgcgctcgaacgaccccaagtcccaaaatcaccctggctggttgatgaggggtttgaagccttggacacagtacgccatatttgtcaagacgctcgttactttctcagatgagcgcagaacatatggtgctaagtcagacatcatctacgtacaaaccgatgccacttag

SEQ ID NO: 120702 - DNA, 4017 bp, synthetic construct
  misc_feature 1..4017: note = Description of Artificial Sequence: Synthetic coding sequence
  source 1..4017: mol_type = other DNA
atggcctctccgccgaggcacggcccccccggccccgcctccggggacggcccaaacctgaacaataataataataacaataaccatagtgtcaggaaatgtggatacctgcgaaagcagaaacacgggcacaagcgattttttgtcctgaggggccctggcgcaggcggcgacgaagctaccgctggaggtggttctgctccacaaccaccaagactcgaatattacgagagcgagaaaaagtggcgcagcaaggcgggtgcacccaagcgcgtcatcgcccttgattgctgcttgaatataaacaagagggcagacgctaaacacaaatatctcatagccctgtacacgaaagacgagtattttgctgtcgcggcagaaaacgagcaggagcaggaggggtggtaccgggccttgacggatctagtctctgaaggccgggcggcggctggggatgcgcccccggctgctgcaccggcagcgagttgttcagccagtctgccaggcgcccttggtgggtcagccggtgctgctggggcagaagacagttatggtctcgtggctccagcaacagccgcttaccgcgaggtgtggcaagtgaacctcaagcccaagggcctgggacaatccaaaaacctcaccggagtgtatagactgtgtctttcagcccgcactattgggtttgtaaagttgaattgtgagcagccctccgtgactttgcagcttatgaatatccggagatgcggacactcagacagtttttttttcattgaggtgggacgaagcgcggtgacaggtccaggcgaactttggatgcaggctgatgacagcgttgtggcccagaatatccatgaaactattctggaggcaatgaaagctcttaaagaattattcgaatttcggccccgcagcaaatcccagagtagcggatcaagcgctactcacccgattagtgtcccaggcgcccgcaggcaccaccatctggtgaacctgcccccaagtcaaaccggtctagtgagaaggtctcgaaccgatagcctggccgctacgccccctgccgccaagtgctcctcctgtcgcgtgcgaactgccagtgaaggggatggcggggccgctgcaggcgcagcagccgcgggggccaggcctgtgtcagtggctggcagtcccctgtccccagggcccgtacgcgctccccttagccgcagtcacactttatcaggagggtgtggaggccgaggttctaaggtagctctgttgcctgcaggcggagcactccagcactcccggagcatgtctatgcccgtcgctcacagccctcccgccgccacctccccagggtcactgtctagttcctcaggacatgggagcgggagttaccccccccctcctggccctcaccctccattgccccatcctctgcaccacgggccagggcagcgccctagttctggttccgcgtcagcttcgggatcaccctccgaccctgggttcatgtctttggatgagtatggctcctctcccggagatttgcgtgcgttttgttcacatcgttcaaacacgccagaatcaatcgctgagacccctcccgctcgcgatggagggggagggggcgagttttatggttatatgacaatggataggccactttcccactgtggtagaagctacaggcgcgtgagcggagatgccgcacaggacctggatcgagggctgcgaaagaggacatattctctcacaactcccgccaggcaaagaccagtccctcagccatcgtccgcaagccttgacgagtacactctcatgcgagctacatttagcggctctgcaggtaggctctgccctagttgccctgcgtcatcccccaaggtggcttaccacccctatcccgaagactacggtgatatcgagataggaagccacagaagctcgtcttcaaatcttggagctgatgatggttacatgcccatgacacccggcgctgcgttggccgggagtggctccggaagttgcagatctgacgactacatgccaatgtctcctgcgtcagtgtcagctcccaaacaaatcctgcaacctcgagcagccgctgccgccgcagccgccgtcccgtctgccgggcccgcaggccctgctccaaccagtgcagccggcagaacattccccgcgagcggtggcgggtataaggcatcttcccctgcggaatcaagtcctgaggatagtgggtatatgagaatgtggtgtggctctaagctgtccatggagcacgccgacgggaaattgctgcccaacggtgattatctcaacgtctccccttcagacgccgtgactaccggcactcctcctgacttcttcagcgcagctctgcacccaggcggtgagccgctgcgaggtgtccctggttgctgttacagcagcctgccacgctcgtacaaagctccttacacctgtggaggtgactccgaccagtatgtgctgatgtcctcccccgtgggtcgcatcttggaggaagaacgcctcgaaccacaagccacccccggtccatctcaggccgcctctgcctttggggccgggcccacacagcccccacacccagtggtcccaagtcctgtacggccatccggggggaggcccgagggttttcttggccaaagggggagggcagtgaggcccactagactaagtctggaaggacttccctccctgcccagcatgcatgagtatccccttccacccgaacctaaaagcccaggcgagtacatcaatatagacttcggagaaccgggcgcccggctcagccccccagcccctcctctgctggcttctgctgcctctagttccagcctgttgtctgcttcttctccagccagtagcttgggttcgggtacgccaggaacgtctagcgattctcgccaaaggagtcctctctcagactacatgaatcttgattttagttcaccaaaaagtcctaagccgggagcaccctctggccatcccgtaggtagccttgatgggctgctttctcctgaggcctcctcaccctatcctcccttgccccctagacccagtgccagcccctccagcagtctgcagcctcctccaccacccccagcgcccggggaactgtaccgcctccctcccgcgtctgctgttgccacagcacagggtccgggggccgcttcctctttgtcaagcgatacgggcgacaacggagactacacagagatggcgtttggggtggccgccacacccccacagcccattgccgcccctccgaagcccgaggctgctcgtgttgcatctcccacttccggtgtgaagagactaagcttaatggagcaggtcagtggagttgaggcgtttctgcaggccagtcagccacccgatcctcaccgaggggccaaagtgattagagctgacccgcagggagggcgccggcggcactcctctgagacattctcatccacaactacggtgaccccggtcagtccgagtttcgcccacaacccaaagagacataactctgcctctgtggaaaatgtttctttgcggaagtcatctgaaggaggcgtgggtgtcggcccaggcggaggtgacgagcctccaacgtcaccacgccagctgcagccagcccctcctcttgccccacagggcaggccttggaccccgggtcaaccaggagggttggtgggctgtcctggctccgggggcagccccatgagacgcgagacatccgctggattccaaaatggcctcaactacattgctatagacgtccgcgaggagccgggcctccccccccagccccagccgccacctccaccgctgccccagcccggcgataagagctcctggggacgaacacggtctctgggaggattgatcagcgctgttggcgtgggatcgactggagggggatgtggcgggcccggcccaggagccttaccaccggctaacacctatgcgtctattgacttcctctcacatcatctaaaagaagctaccatcgtcaaggaatag

SEQ ID NO: 120703 - DNA, 3894 bp, synthetic construct
  misc_feature 1..3894: note = Description of Artificial Sequence: Synthetic coding sequence
  source 1..3894: mol_type = other DNA
atggctgtcccttccctgtggccttggggcgcttgtctgcctgtgatctttttgtcccttggcttcggactcgatacggttgaggtatgtccctccttggacatccggtctgaggtcgccgagctgaggcagctcgaaaactgctcagtcgtcgagggccacttgcaaatcttgctcatgttcaccgctactggagaggactttaggggattgtcatttcccagattaactcaagttactgattacctgctcttattccgggtgtacgggctggagtcattacgggacctgtttcctaatctggcagtaatccgcggtacacgtttgttccttgggtatgcccttgtgatattcgagatgccacatctgcgggacgtcgccctcccagccttaggagctgttttacgtggagccgtgcgagtagaaaagaatcaggaactgtgccacctgtctacgatcgattggggactgttgcagccagctcccggggcaaatcatatcgtgggcaataagctgggtgaggaatgcgcggacgtctgccccggggtgctgggagccgccggggagccctgcgcgaagaccactttcagcgggcatactgattacaggtgctggacaagcagccactgtcagcgggtttgcccatgccctcatggaatggcctgcaccgctaggggagaatgctgccatacggagtgccttggcggctgtagtcaacccgaggacccaagagcctgcgttgcctgtcgccatctttattttcagggcgcctgcctgtgggcatgtccacccggcacatatcagtatgagtcgtggcgctgtgtgaccgctgaacgctgtgcgtccctccacagtgtgccagggcgggcgagcaccttcggcattcaccagggctcgtgtcttgcacaatgtccgtccgggtttacacgaaactcgagctccatcttttgccacaaatgtgaagggttgtgccctaaagagtgcaaggttggaaccaagacaatcgattcaatccaggccgctcaggacttagtgggttgcactcacgtggaagggagcttgatcctgaatcttcgccaaggctataacctcgagccacagttgcagcacagcctgggcctggtcgagacgatcacaggattcctcaaaatcaaacattctttcgccctggtgtccctgggctttttcaagaacttgaaactgatcaggggagacgctatggttgatggcaactatactctctatgtgctggacaaccagaacttacaacaactgggatcctgggtggcagccggcctaacaatcccggtgggtaagatttattttgcattcaatccacgcttgtgcctagaacacatatacaggctggaggaggttactggaacacgcggcaggcagaataaggccgaaatcaatcccaggaccaacggagatcgcgctgcttgccagacccgcaccttgaggttcgtaagcaacgtgactgaggccgatcgaatccttctcaggtgggagaggtacgagccgcttgaagcgcgggatctcctatcttttattgtctactataaggaaagccccttccagaatgctaccgaacacgtgggacctgacgcttgcggaacgcagagttggaacttgctcgatgtggaactgcctctgagccggacacaagaaccaggcgtcacacttgcatccctaaaaccttggacccagtacgctgtgttcgtgcgggccattactctgactaccgaagaggacagccctcaccagggcgctcagtccccgatcgtgtacttgagaacgcttccagctgcaccaacagtaccccaggacgtgatcagtactagcaattcgagcagtcatctgttggtgcggtggaagccccctacgcaaaggaacgggaacctcacatattacctggtgttgtggcagagactcgcagaggacggggacttatacttgaacgattactgtcacagaggcctgcgactgcctacttccaataacgaccctaggtttgatggagaggacggtgacccggaggcagagatggagtccgactgctgtccgtgtcaacatccccctcctggccaggttctgcccccgctggaagcacaggaagcttcattccagaagaaatttgagaacttcctgcataacgctattactatccccataagcccttggaaggtcacaagtattaacaaaagcccacagcgggactctggcaggcatagacgtgctgcgggacctttacgcctaggtggaaatagctccgatttcgagatccaggaggacaaagtgcctagagagagagcagtactctcgggtctccgccactttacggaataccggattgacatacacgcttgcaatcatgccgcccacaccgtcggatgtagcgcagcaactttcgtgtttgccagaacaatgcctcatcgggaggccgatggaattcccggtaaagtggcctgggaggcatcctctaaaaattccgtactgcttcggtggctcgaaccacccgatcccaatggcctgatcctaaaatacgagattaaatatcgaaggctgggagaagaggccactgtgttgtgtgtgtcacgcctgaggtacgctaagttcggcggggttcacctggcccttctccctcccggcaattactccgcccgagtgcgggctacgagtttggccggcaatgggagctggacggatagcgtcgccttctacatactcggcccggaagaggaagacgccggaggcctccatgtcctgcttactgctacccctgtgggtctgactctactgattgtactggccgcactggggttcttctacggaaaaaaaaggaacagaaccctatacgcaagcgtaaacccggaatattttagtgcttcggatatgtacgttcctgatgagtgggaagtgccacgagagcagatcagtattatccgtgaacttggtcagggtagcttcggaatggtctacgagggcctggcaaggggtctggaggccggggaggaatccactcccgtagcacttaaaacagtcaacgagctggccagccccagggagtgtatcgaatttcttaaagaagcgtctgtgatgaaggccttcaagtgccatcacgttgtgcgcctgctcggcgtggtcagccaaggccaaccaaccctggtcattatggaacttatgactagaggggacctgaaatcacacctgagatctctgcgacccgaggccgagaataaccctggactgcctcagcctgccctgggcgagatgattcaaatggctggtgagattgctgacgggatggcatatctggctgccaacaagttcgttcacagggacctggccgctcgcaattgcatggtgtcacaggacttcacagtgaagataggtgatttcgggatgactcgcgatgtctacgagactgattattatcggaaaggcgggaagggcttgctgcctgtacggtggatggcccccgagagcctgaaagatgggatttttactacccattcagatgtctggtcattcggagttgtgctttgggagattgtcactctggccgaacaaccttaccagggacttagcaacgagcaagttctgaagttcgtgatggacgggggggtcttggaggagctggaggggtgccccctacagttgcaagagctgatgagcagatgctggcaacccaaccctcggctcagaccctctttcactcacatactggacagcatccaggaagagcttcgtcctagctttcgcctgttgtctttctattattcccccgagtgtaggggcgctcggggcagtttacccacaaccgatgctgaacctgattccagcccgacgcctagggattgttcgcctcagaatggtggccctgggcactag

SEQ ID NO: 120704 - DNA, 3060 bp, synthetic construct
  misc_feature 1..3060: note = Description of Artificial Sequence: Synthetic coding sequence
  source 1..3060: mol_type = other DNA
atgcgttataggcttgcctggctgctacatcctgcgcttccaagcaccttccgtagcgtgctgggcgcccgactgcctccccctgaacgactgtgtggattccagaaaaagacctatagcaagatgaataaccccgctataaagcgaattgggaatcacatcaccaagtctccagaagacaaacgcgaataccgagggctcgagctggctaacggcatcaaagtgctccttatttcagaccccacaaccgataaaagctccgctgctctggatgtgcacataggttcattgtctgatccgcctaatatcgctggcctctcacatttttgtgaacacatgctctttctgggaacaaaaaagtaccccaaggaaaatgaatattcgcagtttctaagtgagcacgctggctcatcaaacgcgttcacctccggtgagcacacgaactactacttcgatgtcagccatgagcacctggaaggtgccctcgacaggtttgctcagttttttctgtgccccctgttcgatgaaagctgcaaagatagggaagtgaatgcagttgatagcgagcatgaaaaaaacgtgatgaacgatgcgtggcggctgttccaactggagaaggctactggaaatccgaagcatccgttttcaaagttcgggactggcaacaaatataccctggagacaaggcctaaccaagaaggcattgacgtgcgccaggaacttttgaaattccactcagcctattattctagcaacctgatggcagtatgtgtcttggggcgcgagtctctcgatgacctgactaatttggtggttaagttgttcagtgaagtggaaaacaaaaacgtgcccttaccagaattcccagagcaccccttccaagaagagcatctgaagcagctgtataagattgtccccattaaagacattagaaatctgtatgtgaccttccctatccctgatttgcagaagtattataagagcaatcctgggcattaccttggtcatctcattggccacgagggaccaggatcgctgttgagtgaactgaagtccaagggatgggtcaatacactggtgggagggcagaaggagggggcgcgtggcttcatgttcttcataatcaatgtcgacctcactgaggaaggcctgctgcatgtagaggacattattctgcatatgttccagtatattcagaagttacgggcagaaggtcctcaagagtgggtgttccaggaatgcaaggatctgaacgctgtcgcattccgatttaaggataaagagaggccccgggggtataccagtaagatcgccggcattctgcattactatcctttggaagaagtcctcacagctgaatacctcctcgaagagttcaggcccgatttaatcgagatggtgctcgacaaattgcgtccagaaaatgtgcgcgtcgctatcgtgtcaaagagcttcgaaggaaagaccgaccgtaccgaggaatggtacgggacacaatacaaacaggaagcaatccctgatgaagtcataaaaaagtggcagaacgccgacttaaacggtaagtttaagctccctacaaaaaatgaattcattccgacgaacttcgagattctccctctcgaaaaagaggccaccccctatcctgcactcataaaggatactgcgatgtcaaagttatggtttaaacaggatgacaagttcttcttgccaaaggcgtgccttaactttgagttttttagcccctttgcttacgtggaccctctacactgtaacatggcatacctttacctggagctcctgaaggatagcctcaacgaatatgcttacgccgccgagctggccggcttgtcttacgacctgcagaatacaatctacggaatgtatctgtcagtcaaaggatataacgataagcaacccatactgctcaagaagatcattgagaaaatggctacatttgagatcgacgaaaagcggtttgaaataatcaaggaggcttatatgcggagcctgaacaacttcagggctgagcagccccaccaacacgctatgtattatttaagactgctcatgacagaggtggcttggaccaaagacgaacttaaggaagcccttgatgatgtgactctaccacggcttaaggcattcatccctcagctgttgtcccggcttcacattgaggctctcctgcacggcaatattacaaagcaggccgctctgggcattatgcagatggttgaggacacactcatagaacatgcgcacaccaagccacttcttcccagtcaactggtgcgatatcgtgaggttcagctgcccgaccggggctggttcgtataccagcagaggaacgaagtccacaataattgcggcattgagatctactaccagacggatatgcagtcaacatctgaaaacatgttcttggaattattttgtcaaatcatctcagagccgtgtttcaacacgctgcggaccaaagaacaactcgggtacatagtattctctggacctcggagagcaaacggaatacaggggctccgctttattattcagagtgagaagcctcctcactatctggagtctcgagtggaagcctttctgattaccatggagaagtctattgaagacatgactgaagaagcttttcagaagcacatccaggcactggctatcagacgccttgacaagcccaaaaagctctctgcagaatgtgccaagtactggggagagatcatttcgcaacaatacaattttgatcgcgataataccgaggtagcctatctcaagaccttgacgaaggaggatattattaaattttataaggagatgctggcagtcgacgcccctcgccgccataaggtttctgtgcacgtgctggctagggagatggacagctgccccgttgttggagagttcccgtgccagaacgatattaacctgagccaagctcctgcgctgccgcagccagaagttattcaaaatatgaccgagtttaagagggggcttccactgtttccattagttaagccacacatcaattttatggcagctaagctctag

SEQ ID NO: 120705 - DNA, 1395 bp, synthetic construct
  misc_feature 1..1395: note = Description of Artificial Sequence: Synthetic coding sequence
  source 1..1395: mol_type = other DNA
atgtccaagctgtggtttaagcaggatgacaagttttttcttcccaaggcttgtctcaatttcgaattcttttcacctttcgcatatgtcgatccgctgcattgcaatatggcctatctgtatctcgaactccttaaggacagccttaacgaatacgcatacgctgctgagttggcggggttgagttatgacctgcaaaacacaatttacgggatgtatctttcagttaaaggctacaatgataagcagccaatactactgaagaaaatcatcgagaagatggccactttcgaaatcgatgaaaaacgctttgagattattaaagaagcatatatgcgaagtcttaacaatttcagggctgagcagccacatcaacatgctatgtattatctccggctcctgatgactgaggtggcctggacgaaagacgagctgaaggaggcccttgatgacgttaccctgcccagactcaaggcatttattccacagttgctgagcaggctccacattgaggccctgctccatggtaatatcaccaaacaggccgctctcggcatcatgcagatggtggaggatacgctgatcgagcacgcccacacgaagcccttgctgccctctcaacttgttagataccgagaagtgcaattacctgaccggggatggtttgtctaccagcagcgtaatgaggtccataacaattgcggaattgaaatctattatcagaccgacatgcaatccacttccgagaacatgttcttggagctattttgccagatcatctctgaaccctgttttaacaccctgaggacaaaggagcagctggggtacattgttttttctggccctaggcgcgccaacggaatacagggccttagatttattatccagagtgaaaagccaccccattaccttgagagccgggtcgaggcatttttaattacgatggagaagtcgatcgaggatatgaccgaggaggcctttcaaaagcacattcaggcattggcgattcgacgtctggacaagcccaagaagctgtccgccgagtgcgccaagtactggggcgaaatcatttcgcaacaatacaacttcgacagggacaataccgaggtggcatatttgaagacccttacgaaagaggacataatcaagttttacaaagagatgttggcagtggatgcacccaggcgacacaaagttagcgtgcacgtgctagctagggaaatggattcatgccccgtagtgggagaatttccatgccagaatgatataaacctgtctcaagctccagccttgccacagcctgaagtgattcaaaatatgactgaatttaaacgtggcttgcctcttttcccgctggtcaaaccccacattaattttatggccgccaaactctag

SEQ ID NO: 120706 - DNA, 774 bp, synthetic construct
  misc_feature 1..774: note = Description of Artificial Sequence: Synthetic coding sequence
  source 1..774: mol_type = other DNA
gagtttattatccggggaggcagggtgccgtcgcattgcctacacttttctcgctcatttcagaagaagacctactccaagatgaataatccagctataaagcggataggcaaccacatcactaagagtcccgaggacaaaagggagtataggggactagaattggccaacggcattaaagtgcttttgatcagtgatcctacaacagacaaatcctctgctgcacttgacgtgcacatcgggtccctgagtgacccacccaatatcgccggcttgagccacttctgtgagcacatgctgttcctaggtaccaaaaagtacccaaaagaaaacgaatacagccagttcctttcagagcatgccggatcctcaaacgcttttacttctggagagcacaccaactattactttgacgtgagtcacgaacacctcgaaggcgccttggatcggtttgcccagttttttctatgccctttgtttgatgagtcctgtaaggacagagaggtgaatgccgtggactcagagcatgagaaaaatgtgatgaatgatgcttggcgcctctttcagctcgaaaaagccaccggcaaccccaagcaccccttttccaaattcggcacaggtaataagtacaccctagaaacaagacccaatcaagaaggcatcgacgtgagacaagagttgctgaaattccattctgcgtactatagtagtaacttaatggctgtttgtgtgttaggccgggaatccctggacgacctgaccaaccttgtgtag

SEQ ID NO: 120707 - DNA, 396 bp, synthetic construct
  misc_feature 1..396: note = Description of Artificial Sequence: Synthetic coding sequence
  source 1..396: mol_type = other DNA
atggatcctcgcctgcctgcctgggctctggttctactcgggcctgccctggtcttcgcattgggacctgctcctacccctgaaatgcgcgagaaattatgcggtcaccactttgtgcgagctctggttagggtatgcggaggccctagatggtccactgaggcccggcgcccagctacggggggcgatcgggaactacttcagtggctggagagaagacacttgttacatggtctggtggctgactctaacctcactctcgggcccggcctgcagccactcccccaaacgagccaccatcacagacatcaccgagcggcagctaccaaccctgctcggtactgctgcctgtccgggtgcacacaacaggacctcctgactctctgcccgtactag

SEQ ID NO: 120708 - DNA, 474 bp, synthetic construct
  misc_feature 1..474: note = Description of Artificial Sequence: Synthetic coding sequence
  source 1..474: mol_type = other DNA
atggatcctcgactccctgcctgggccctggtccttctgggacctgctcttgtttttgccttgggacctgccccaaccccagagatgagggagaagctgtgcgggcaccacttcgttcgagctctggtcagggtctgcggcgggcctcggtggtctactgaagccagacggcctgccaccggcggagatcagcgcgagagccactctgtcagtcaggcagggctgaagctgctgagttcatctaatcctcctacgcttacctttcaatccgtcgggatatccgacgtgagttgctacagcggctggcgagacgatatatgttcaatgggctggtggcctacagtaatttcacgctgggaccttgcatgcagcccatgccctcgccccttaaccatcacagccaccaccgttcagctaccccctaccctgcacgccactgctgcatctgtggccgttcctaataagacatgctag

SEQ ID NO: 120709 - DNA, 420 bp, synthetic construct
  misc_feature 1..420: note = Description of Artificial Sequence: Synthetic coding sequence
  source 1..420: mol_type = other DNA
atggcgtcgctgttcaggtcctatctccccgccatctggcttctcctgtcccaactgttacgagagagtctggcagctgagctcagagggtgcggccctcgttttgggaaacatcttctgtcatactgtcctatgccagagaaaactttcacgaccaccccaggtggatggctcctggagtccgggcgccctaaggaaatggtgtctacgtccaataacaaggacggccaggccctaggtacgacatccgaatttatccctaatcttagtccagagctgaagaagcccctgagtgaaggccagccatctttaaaaaagattatcctttctaggaagaaacgttccgggagacaccgcttcgaccccttttgctgcgaggtgatctgtgacgacggtactagcgtgaagctctgcacttag

SEQ ID NO: 120710 - DNA, 408 bp, synthetic construct
  misc_feature 1..408: note = Description of Artificial Sequence: Synthetic coding sequence
  source 1..408: mol_type = other DNA
atgaaaggcagcatcttcacgctcttccttttctccgttctgtttgcaatcagtgaggtgcgttccaaagagtcagtgagattgtgcggcctagagtacatcagaactgtgatatacatttgcgctagttcccgctggcgtcgccatcaggaaggtattccccaagcacagcaagcagaaacaggaaacagctttcagctcccacacaagcgagaattttccgaggagaatcctgctcagaatttaccaaaggtggatgcctcgggggaagaccggctgtggggtgggcaaatgcctaccgaggagctttggaaatcaaagaagcattccgtaatgagccgtcaggatttacagacactctgctgtacagatggctgcagcatgacagacctgtccgctctctgctag

SEQ ID NO: 120711 - DNA, 642 bp, synthetic construct
  misc_feature 1..642: note = Description of Artificial Sequence: Synthetic coding sequence
  source 1..642: mol_type = other DNA
atgccaaggctgctccgcctctccctattgtggctggggttactgctggtgcgcttttcacgcgaactgtcagacatctcttccgcgcgcaagctctgtggtcgttatttggttaaagaaattgagaaactatgtggtcacgccaactggtcccagtttcgcttcgaagaggagactccattttcccgactgatcgcccaggcctcagagaaggtcgaggcttattccccctaccagttcgaatcgcctcaaaccgcgtccccagcaagaggcaggggaacaaaccctgtctctaccagctgggaggaggccgtgaattcctgggaaatgcaaagcctgcccgaatacaaggataagaaaggttacagtccccttggcaagacacgggaattcagctctagtcacaacattaatgtatacattcatgaaaacgcaaaattccagaagaaaaggcgtaacaagataaaaaccctcagcaatctgttttggggccaccacccacaacggaaaagacggggttacagcgaaaagtgttgtctcacgggatgcacaaaggaggaattaagcatcgcctgtctaccctatatcgacttcaaacggctgaaggagaaaaggagtagcctcgtgactaaaatctactag

SEQ ID NO: 120712 - DNA, 1734 bp, synthetic construct
  misc_feature 1..1734: note = Description of Artificial Sequence: Synthetic coding sequence
  source 1..1734: mol_type = other DNA
atgaacaagctgtacattggcaatcttaacgagagcgttactccagctgatctagagaaagtgttcgccgaacacaagatttcatacagtggacaatttctggtgaagagcgggtacgccttcgtagactgcccagatgagcactgggccatgaaggctatcgagacattcagtggcaaggtcgagctgcagggtaaacgactcgaaattgagcactccgtccccaagaaacagaggtcgaggaagatccagatccggaacatcccaccccagctcagatgggaggtgctagattcccttctggcgcagtatggaactgtggaaaattgtgagcaggttaacaccgagagcgaaaccgctgtggtgaacgtaacttactcaaatcgcgagcaaacccgccaagccattatgaaactgaacggacaccagctggagaaccacgctctcaaggtgagctatatcccggacgagcagatcgcccaaggtccagagaacggtcgccgagggggtttcgggtctagaggtcagcccagacaggggtccccagtggccgctggtgctccagccaagcagcaacaggtcgacattcccctgcgtctattagtccccactcaatatgttggcgccataattggaaaagagggggcaacgataaggaatattacgaaacagactcagagtaaaatcgatgtgcaccggaaagagaacgcaggggctgccgagaaggcaatttctgtgcattctaccccagagggctgctccagcgcctgcaaaatgatcctcgaaatcatgcataaagaggctaaagatactaagaccgctgatgaggttccactgaaaatcctggcccacaataatttcgtgggaaggctgatcggtaaggaaggacggaacctcaagaaagtggagcaggacaccgagaccaagatcaccatttcaagcctgcaagaccttacgctatacaatcctgagcggacgattaccgtcaagggcgctattgagaactgttgtcgggcagaacaggagataatgaaaaaagtgagggaagcgtacgagaatgatgtggctgcaatgtctctgcaaagccacttaattcctggcctcaatctcgctgccgttggcctcttccccgctagttccagcgccgtgcccccacctcctagcagcgtcacaggagctgcaccgtacagctcatttatgcaggctccagaacaggagatggtgcaggtgtttattcctgcccaggcggttggcgctattatcgggaaaaaggggcagcatataaagcagctgtctagatttgcaagcgcttccattaagatcgcgcccccagagacaccagactctaaagtcagaatggttatcatcacgggaccgcctgaagcccagttcaaagcccaggggcggatctacggaaagttgaaggaggagaatttcttcggccctaaggaagaagtgaagctggagacccatattagagttcctgcatcagccgcaggcagagtaatagggaagggcggcaagactgtaaacgaattacagaacctgactgcggctgaggtcgtcgtcccacgagaccagacacctgacgagaacgaccaggtgattgtgaagatcatcgggcatttctatgcatcacagatggctcagcgtaagatccgagacatactcgcacaagtcaagcaacaacaccagaaggggcagtcaaaccaggctcaggcccgccggaagtag

SEQ ID NO: 120713 - DNA, 1317 bp, synthetic construct
  misc_feature 1..1317: note = Description of Artificial Sequence: Synthetic coding sequence
  source 1..1317: mol_type = other DNA
atgaacaaactatacattggaaaccttaatgagtcagtcacacctgccgacctggaaaaggtctttgccgaacataaaatttcctattctggacagttcttagtcaagagtggctatgctttcgttgactgtccagatgagcactgggccatgaaggctatcgagacattcagcgggaaggtggaacttcagggcaagcggttggaaatagagcacagcgtgcccaaaaagcagcgatcgagaaagatccaaatcaggaacattccaccccaactccggtgggaggtcctagactctttgctggcgcagtacgggacggtagagaactgcgagcaggtgaataccgaatccgagaccgcagtggtgaatgtgacctactcgaatcgcgaacagacacgccaggccgatgaggtgccactgaaaatcctcgctcacaataactttgtgggacgtttgatcggaaaagaggggcgcaatctcaaaaaggtggagcaggataccgagaccaagataaccatttcatctctacaggacttgacactttataacccagaacgcacgatcactgtgaagggcgccattgaaaactgctgtcgagccgagcaggagattatgaaaaaagttagggaggcctacgagaacgacgttgcggccatgagcctgcaatcccacctaattccaggattaaacctcgctgcggtggggttgttcccagcctcatctagcgcagtgccacctccacccagtagtgtcaccggggcagccccttattcgagttttatgcaagctcccgaacaggagatggttcaggtgtttattcccgcccaggccgttggcgctatcatcggcaagaaagggcagcatatcaagcagctttccagattcgcgagcgccagtattaagatcgccccacccgagacgcccgattcaaaggtgaggatggtgatcattaccggccctcccgaggctcaattcaaagcgcagggccggatttatggaaagctgaaagaggagaatttttttggtcccaaggaggaagtcaagctagagacccatattcgagtgcccgcttccgctgcgggtcgtgtcatcgggaagggcggcaaaaccgtgaacgagctgcagaacctgacagctgccgaggtagtggtgcctcgagatcagactcctgatgagaacgatcaagtcattgtgaaaattattgggcacttctatgccagccagatggcccaaagaaagattcgggacattttggcccaagtgaagcagcagcatcaaaaagggcagtccaaccaggcacaggcgcgtcgtaagtag

SEQ ID NO: 120714 - DNA, 1671 bp, synthetic construct
  misc_feature 1..1671: note = Description of Artificial Sequence: Synthetic coding sequence
  source 1..1671: mol_type = other DNA
atgatgaataagctgtacattggaaatctctcccctgcagttactgcggatgatcttcggcagctctttggcgaccggaagctccccctggccggccaggtgctgctgaaatccggatacgcattcgttgactaccctgatcagaactgggccattcgcgccatcgaaactctaagcgggaaagtggagctgcacggaaaaattatggaggtggactatagtgtgtccaaaaagctgcggtctaggaagatacagattaggaacatccccccccatttgcaatgggaggtcttggatggcttgctggctcagtacggtaccgtggaaaacgtggaacaggtaaataccgacacggaaaccgctgtggtcaacgttacttacgcgacgagagaggaagcaaagattgcaatggagaagctgtccggtcatcaattcgagaactacagttttaagatttcttacattcctgatgaagaagtgtcatctccgtctcctcctcagcgggcccaaaggggagaccacagcagcagggagcaaggtcacgcccccgggggaaccagccaggctaggcagatcgacttcccgctccggatcctggttcccactcaattcgtcggcgctattatcggcaaggaggggctgaccataaaaaacatcacaaagcagacccagagtcgggttgacattcatcggaaggaaaactcaggcgccgccgagaaaccagtgaccattcacgccacacccgaggggacctctgaggcctgtaggatgattctcgagattatgcagaaagaggccgacgaaactaaattggccgaggagatacctttaaaaattcttgcccacaatggtctggtcgggcggctgatcggtaaggagggtcggaatttgaagaagatcgaacatgagactggaacaaagataaccatctcctcgctgcaagatctctcaatctataatcccgagcgaacaattacagtcaaaggtacagtggaggcctgcgcatccgctgagatcgagattatgaaaaaacttcgggaggcctttgagaacgatatgctcgccgtgaacacccattcaggctatttctcaagcctgtatccccaccaccagtttggcccgttcccccaccatcatagttatcctgagcaggaaatagtgaatctgttcatcccaactcaggcagtcggtgccattattggtaaaaaaggtgcccacatcaaacagcttgcgaggttcgccggcgccagtatcaaaatcgcccctgctgaggggcccgacgtgagcgagagaatggttatcattaccggaccaccggaggcccagttcaaggcccaggggcgcatcttcggaaagctgaaagaggaaaacttctttaacccaaaggaggaggttaagctggaagctcatatcagagtaccctcaagtactgccgggcgtgtcatcggtaagggcgggaagactgtgaacgagctccagaacctgacatccgctgaagttattgtgccgagagatcagactccggacgaaaacgaagaggtgatcgtgcggataatagggcactttttcgcatcccagacagctcaacgaaagatccgggagatcgtgcagcaggtgaaacagcaagagcaaaagtacccccagggcgtggcatcccagaggagtaaatag

SEQ ID NO: 120715 - DNA, 1800 bp, synthetic construct
  misc_feature 1..1800: note = Description of Artificial Sequence: Synthetic coding sequence
  source 1..1800: mol_type = other DNA
atgatgaacaagttatacatcggcaatctcagtccagctgtcacagctgatgacttacgacagctgtttggagatcgcaagttgccgcttgccgggcaggtcttgttgaagtccggctacgcattcgtcgattaccctgatcagaattgggctatcagggcaattgaaacactgagtgggaaggttgaactgcacggaaagattatggaggtggactactcagtgagcaaaaaactacgttcacggaaaatccagattcgcaacatacctccacatttgcagtgggaagttcttgatggcctgttggctcagtacggaaccgtcgagaacgtcgaacaggtgaacaccgataccgaaaccgccgtggtgaatgttacttatgcaacccgcgaagaggctaagatagccatggagaagctttctggtcaccagttcgagaattattctttcaaaatctcatacatccctgacgaagaagtgagcagtccctcaccacctcaaagagctcaacggggggatcatagcagccgcgagcaggggcacgctccaggcgggacttcacaagccaggcagatcgactttccacttaggattctggtcccgactcagttcgttggcgcaatcattggtaaagaagggctgactataaagaacatcacaaaacagactcagtctagagtggacattcacaggaaggaaaatagcggagccgcagaaaaacccgttaccattcacgcaacacccgagggaacctctgaagcctgcagaatgatcttagagataatgcaaaaggaggcagacgaaactaagttagccgaagaaattcctctaaagatactcgcccacaatggtctcgttggtagacttatcgggaaagaaggcagaaatcttaagaaaatcgagcacgagaccggcactaaaatcaccatatcatcattacaggacctatccatatacaatcccgagcggactattacggtgaagggtactgtggaggcgtgcgcatcagccgaaatcgaaataatgaaaaagctccgggaagcattcgagaatgatatgctggctgtgaaccagcaggcgaatttgatccctggcttgaaccttagtgcactgggcattttttccactgggttgagtgtcctatcccctcctgctggacccagaggagcccccccagccgctccgtatcatccatttaccacacattccggatacttcagtagcctgtacccgcaccaccagtttgggcccttcccacaccaccattcgtacccagagcaagagatagtgaacctgtttatccctacacaggccgttggggccattataggcaagaagggtgcacacatcaagcagctcgcccgtttcgccggtgcatctataaaaatcgcccctgctgagggtccagatgtttcagaacggatggtaatcataaccggaccgcctgaagcacagttcaaagcccagggaaggatcttcggaaaattgaaagaggagaatttcttcaacccaaaggaggaggtaaagctcgaagcccacatcagggtacccagctctacagccggtcgggtgatcggtaagggcggaaagactgttaatgaactgcaaaacctgacctctgctgaggtgatcgtgccgcgagatcaaacccctgatgagaatgaagaggttatcgtgcggataatcgggcatttctttgcatctcaaacagctcaaaggaagattcgggagatcgtacagcaagtcaaacaacaggagcagaagtacccacagggcgttgcttcccagcggtcgaaatag

SEQ ID NO: 120716 - DNA, 1629 bp, synthetic construct
  misc_feature 1..1629: note = Description of Artificial Sequence: Synthetic coding sequence
  source 1..1629: mol_type = other DNA
atgtttagttgccccggacactaccacgtggacggcttcctcaacccaggctcacgcaagatccagattcgaaatatccctccacaccttcagtgggaagtgctggatggtctattggcccagtatggtaccgtcgaaaatgttgaacaggtgtttgccttcagtctggtgaacaccgacacagaaactgcggttgtgaatgtgacctacgccacacgcgaagaagcgaagatcgcgatggagaagcttagtgggcatcagtttgaaaattacagttttaagattagctacattccagatgaggaagtgtccagcccctcccccccgcagcgcgcccagagaggagaccactccagcagggagcagggacatgctcctggagggacgtcccaggcccgccagatcgactttccgctgcgaatattggttccaactcagtttgtcggtgctattatcggcaaagaagggctgactattaagaacattacaaagcagacccagtcacgcgtcgatatccaccgtaaagagaatagcggcgctgccgagaagcctgtcacaatccatgctacaccagaaggcacaagtgaggcatgcagaatgatactcgagatcatgcagaaagaagccgacgagacaaagctcgccgaggaaattcccctcaagattctggctcacaacggactcgtgggaaggctgatcggtaaggagggtcggaacctgaaaaagatcgaacacgagacaggcaccaagattacaatcagttccctccaggacttgtcaatctataatcctgagcgaacgatcacagttaagggcactgtggaagcttgtgcctccgccgaaattgagattatgaagaaacttagggaagcatttgaaaacgacatgcttgccgtgaatcagcaggctaacctcatcccgggccttaatcttagtgcgctgggaatcttctcaactggcctgtcagtcttatctcctcctgctggcccgcgcggagctccccccgcggctccctatcatcccttcactacacattccggctacttcagtagcctgtacccccaccaccagttcggccctttccctcatcaccattcataccctgaacaagagattgttaacctgtttataccaacccaggccgtgggggccatcatcggcaaaaaaggagcacacattaagcaattagcaagatttgccggcgcaagtattaagatcgctccagccgaaggtcctgatgtctcagaacgcatggtgataatcactgggccacctgaagcccagttcaaagcacaggggaggattttcgggaaacttaaagaggaaaacttcttcaaccccaaagaggaagtcaaacttgaggcccatattagggtacccagttctactgccgggagggttatagggaaaggcggcaagaccgttaacgagcttcagaacctgacttctgctgaggtgattgtgccccgtgaccagacacctgacgagaatgaggaggttatcgtccggattatcggacattttttcgcgtcccaaaccgctcagcgtaagattagggagattgttcagcaggtgaagcagcaggaacagaagtatccacagggcgtggcgtcacagcggagcaagtag

SEQ ID NO: 120717 - DNA, 1740 bp, synthetic construct
  misc_feature 1..1740: note = Description of Artificial Sequence: Synthetic coding sequence
  source 1..1740: mol_type = other DNA
atgaataaactctacatcgggaacctgtccgagaatgccgcccctagtgaccttgagagcatctttaaagatgcaaagattccggtgagcggtccattcctcgttaaaactggctacgcgtttgtcgactgtccagatgaatcgtgggcgctaaaggccatagaagctctgtcaggaaaaatcgagctgcacggcaaaccaattgaggtggaacactccgttccgaagcgccagaggatccgcaaactccagattcggaatatccccccccatctccagtgggaggtacttgatagcctgctggtgcagtacggcgtcgtcgaaagctgcgaacaggtgaatactgacagcgaaaccgcagtggtgaatgtgacatatagctctaaggatcaggcccggcaggcactcgacaaactcaacggcttccagctcgagaacttcaccttgaaggtggcgtatattcctgatgagatggcagcacagcaaaacccactgcagcaaccaagggggcggagaggcctaggacaacgcggttcctcacgtcaaggatctcccggctctgtttcaaagcagaagccatgcgacctgcccctccgactactcgtccctacacaatttgtgggggcaataatagggaaggaaggggcgaccattcggaacattaccaagcaaacccaaagtaaaattgatgtgcatcgtaaggaaaacgccggagccgccgagaagagcataaccattctgtctacccccgaggggacgtcagccgcatgcaaatccattctcgagattatgcataaggaggcacaggatatcaaattcacggaggagatcccccttaagatcctagcccacaacaacttcgtgggtcgtctcattgggaaagaagggcgcaacctgaagaaaatcgagcaggacactgatacaaaaatcactatctctcctctccaggagctaacactgtataatccagaaaggaccatcaccgtgaaaggaaatgttgaaacttgcgcaaaagccgaggaggagataatgaaaaagatacgagagtcttacgaaaatgatattgcttctatgaatctgcaggctcatctcatccctggactcaatctaaacgccctcggcctatttcctccgacctctgggatgccccccccaacctctggtcccccatccgcaatgactcctccgtatccccaattcgaacaatccgagaccgaaaccgtgcatctgtttattcctgccctttcagtcggtgcgatcattggtaaacaggggcagcacattaagcagctgtcccgctttgccggcgccagtattaagattgcacccgctgaagcgcctgatgctaaagtccgcatggtcataatcacaggccccccagaggcccagttcaaagctcaaggacgcatttacggcaagatcaaggaagaaaacttcgtaagcccaaaagaagaggtcaagctagaggcccacatccgggtgcccagcttcgctgccggaagagtcatcggcaaaggcggcaagactgtgaacgaactgcagaatttgtcctcggccgaggtggttgtcccaagagaccagacccctgacgaaaacgaccaggtagtggtcaaaattactggacacttttatgcatgccaggtggcccagcggaaaatccaggagatcctaacacaggttaagcaacaccagcaacagaaggctctgcagtcgggccccccccaaagccggcgcaaatag

SEQ ID NO: 120718 - DNA, 7476 bp, synthetic construct
  misc_feature 1..7476: note = Description of Artificial Sequence: Synthetic coding sequence
  source 1..7476: mol_type = other DNA
atgggggcagccgctggcaggtctcctcacctgggaccagcaccagctcggcgaccacagaggagcctgctcctgcttcagttgcttctgcttgtcgccgcacccggatctactcaggctcaggcagccccatttccggaactgtgctcctatacgtgggaagcagtggacacgaagaataatgtgctttacaaaattaatatctgcggatcagtggacatcgtacagtgcgggccctcctctgcagtctgtatgcacgacttaaagacgaggacgtaccactccgtcggcgactccgtattaaggagcgctacccgaagtcttctcgaattcaatactaccgtgagctgcgatcaacagggcacaaatcaccgcgtgcagagctccattgccttcctgtgcggcaaaacgctgggcacccctgaattcgtcacagccaccgagtgtgtgcactatttcgagtggaggaccaccgcagcatgcaaaaaagatatttttaaagccaacaaggaggtgccctgctacgtgtttgatgaagagctgagaaagcatgacctgaacccactgattaaactgtcgggagcatatctcgttgatgacagtgacccagacacgagcctcttcattaacgtttgtagggacatcgatacgctgcgggatccaggcagccagctgcgcgcttgcccccccgggactgcggcgtgcctggtaagaggccaccaggcatttgatgtcggtcagccaagggacgggttgaaacttgtgagaaaggatagacttgtgctcagctacgtacgcgaggaagctgggaagcttgacttctgcgatggccattcgcccgccgtcacaattaccttcgtgtgtccttctgaacgaagggaaggaaccatccctaagttaaccgccaagtccaactgtcgttacgagatcgagtggattactgaatatgcttgccatagagattacctagaatcaaagacatgtagtctgagcggagaacagcaggacgtctctatcgacttgaccccattggcccagtccggaggctcaagctatataagcgatggcaaagaatacctgttttaccttaacgtttgcggtgagaccgaaatacagttttgtaacaagaagcaggctgccgtgtgtcaagtaaagaagagcgacactagtcaagtgaaagcagcgggccgttatcataatcagacgctgcggtactctgacggtgatctgaccctcatctatttcggaggtgatgaatgttcttcagggttccagcggatgtcagtgattaacttcgagtgcaacaaaaccgccgggaatgacggtaaggggaccccggttttcactggggaggttgactgtacctactttttcacatgggacactgagtatgcctgtgtgaaggagaaggaagaccttctgtgtggcgctacagatggcaagaagcgctatgacctgtccgcccttgtacgccacgctgaaccagagcagaactgggaggctgtggatggaagtcagaccgaaactgagaagaagcacttctttatcaatatatgccaccgggtcctgcaagaggggaaagctaggggctgccctgaggatgccgcagtgtgcgcggtagataagaacggctctaagaatctggggaagttcataagcagtcccatgaaagaaaaggggaacatccagctgtcatactcagatggcgacgactgtgggcatggcaagaagatcaagactaacattacactcgtctgcaagcccggggatctggaatcagccccagtcctacgaacttcaggggagggaggatgtttctacgagttcgagtggcatacagctgccgcttgtgttttgtcaaaaacggaaggagagaattgcactgtctttgactctcaggcagggttctcattcgacctttctccactgactaaaaaaaatggagcttacaaggtcgagacaaaaaagtacgacttctatatcaatgtatgtggtcctgtgtctgtgtctccttgccagcccgactccggtgcttgtcaagtcgccaaatcagacgaaaagacatggaatttgggactgtctaatgccaaactctcttactatgatggcatgattcagcttaactatcgcgggggcacgccttacaacaatgagcggcacacacctcgggccactctcatcacatttctttgcgaccgggacgctggggtgggatttcccgaataccaggaggaggacaactctacctataacttcaggtggtacacatcctatgcgtgtcctgaggagccactcgaatgtgtcgtcacagatccgtcaacactcgagcagtatgatttatcttctctcgccaagagtgagggagggctgggaggcaactggtacgcaatggataattccggagagcatgtgacttggcggaaatattatattaatgtgtgccggccgcttaatcccgtgcccggatgcaatcgttatgcatcagcatgtcagatgaaatacgagaaggaccagggctcctttacagaagttgtgagcattagtaacttagggatggccaagactggccccgtggtggaggacagcgggtcgctgctgttagaatacgtcaacggtagtgcctgcacgacaagcgatggcaggcagaccacatataccacgcgaatccacctggtttgctccagaggaaggctcaattcccatccgatcttctcgctaaactgggagtgcgtcgttagcttcctgtggaataccgaggcagcatgtccaatacaaaccactacagacactgatcaagcctgttcaatccgggacccaaactcgggattcgtctttaacctgaaccccctcaatagctcgcaggggtacaacgtgtccggcatcggcaagatattcatgttcaacgtgtgcggtacaatgcctgtttgtgggacaattcttggaaagccagcctctggttgcgaagctgaaacgcagaccgaggaattaaagaactggaagcccgccagacctgtagggatagagaagtccttgcagctaagcaccgaaggctttattaccctgacctacaaaggccccctctctgctaaagggacagctgatgctttcatcgtccggttcgtgtgcaacgacgacgtatactccgggcctcttaagttccttcaccaggatatagactccggtcaggggattagaaacacttattttgagttcgaaacagcactggcatgcgtccccagcccagtagattgtcaggtgactgatcttgctgggaatgaatatgatctgacaggattgagcaccgtccggaagccttggactgctgtcgacacatcagtcgatggaagaaaaagaaccttttacctctcagtatgcaacccgctgccatatatccccgggtgccaaggaagcgccgtgggctcatgtctggtgtctgaaggaaatagttggaacttaggggttgtgcagatgtcaccacaggctgctgccaacggatcgctaagtataatgtacgtgaatggggacaagtgtggtaaccaacgttttagcaccaggataacgttcgaatgtgcccagatctcaggctctcccgctttccaacttcaggacggttgcgaatatgtctttatttggcggactgttgaggcttgtccggtggtgagagtggaaggtgacaattgtgaagttaaggacccgaggcacggcaacctctacgatctgaaacccctgggcttaaacgatacaatcgtgtcggctggcgaatatacatactatttccgggtttgcggaaagctaagtagcgacgtgtgtccaaccagcgacaagtccaaggtggtaagcagctgtcaggagaaacgcgagccgcaaggcttccataaagtggctgggctactgacacagaaattgacctatgagaacgggctgctgaaaatgaacttcacaggcggggatacctgccacaaagtttaccagcgaagcactgcaatcttcttttattgtgaccgtgggactcagcgtcccgtgtttcttaaggaaacctctgattgttcttacttgttcgagtggagaactcagtacgcttgcccaccattcgatctgacagaatgctcgtttaaggacggcgcgggcaactcctttgacctctcttctctgtcaaggtactctgacaattgggaagcaattaccggcacaggggaccctgagcattatttgattaatgtgtgtaagtccctggccccacaggcaggcaccgaaccgtgtcctccagaggcagcagcttgcctgctaggtggaagcaagccggtcaatctgggacgtgtgcgagacgggccccagtggcgggacggtattattgtcctgaaatatgttgacggcgacctatgcccggacgggatcaggaagaaaagcaccacgatcaggttcacatgctccgaatcccaggttaatagtaggccaatgttcattagcgcagtggaggactgcgaatatacttttgcctggcctacagctactgcctgcccaatgaaatccaacgaacatgacgattgccaagtcacaaatccctcaactggtcatctctttgatctgagctccctgagtggaagggcgggcttcacggccgcgtactccgaaaaaggcctagtatacatgtcgatatgcggtgagaacgagaactgccctcctggtgttggcgcatgcttcggtcaaactcggatttctgtggggaaagcgaataagcggctgagatatgtggatcaagtgttgcagctggtctacaaggacggttccccgtgcccttccaaaagtggactttcctacaaaagtgtgatttctttcgtgtgtcgacccgaagcaagaccaactaataggcccatgctaatctcgcttgacaaacaaacatgcaccctgtttttctcatggcacacccccctggcgtgcgagcaagcgacagagtgttcagtgcgaaatgggtcttcaattgtcgacctgagcccattgattcatcgaactgggggctacgaagcatatgatgaaagcgaagatgacgcctcggatacaaacccagacttctatataaacatctgccaacctttaaaccctatgcatggagtgccctgccccgctggcgccgccgtatgcaaagttcccatcgatggtccgccgattgacatagggagggtggcaggaccaccgatactcaacccgatcgccaacgagatttacctgaactttgagtcaagcaccccctgcttggctgacaagcacttcaactatacatccttaatcgcctttcactgcaagcggggcgtgtcaatgggcacgcccaagctcttgcggacgagcgagtgtgatttcgtcttcgaatgggaaacccccgtggtctgccccgacgaagtacggatggatggatgtacccttacggacgaacagcttctttactccttcaatttaagcagcttgtcaacgagtacctttaaggttactcgggattctcgaacatactccgtcggcgtctgtacattcgctgtgggccccgagcagggggggtgcaaagatggcggcgtatgcctactaagtgggaccaaaggcgcatcatttggcaggctgcagagcatgaagcttgattatcggcatcaggatgaggcggtggtgctgagttatgtgaatggcgaccgatgtcccccggaaacagatgacggtgtgccctgcgtctttccgttcatctttaacggaaaatcatacgaggaatgcatcatcgagtccagggcaaagctgtggtgtagcaccacagcggattacgatcgcgatcatgagtgggggttttgtaggcactccaactcctacagaacaagctccattatttttaaatgtgacgaggatgaggatataggtcgcccccaggtcttctccgaagtcagggggtgtgatgtgacttttgagtggaaaaccaaggtggtgtgtccacctaaaaagctggagtgtaagtttgtccaaaaacataagacatacgacctgaggctcctgtcaagcctgaccggctcctggagtttagttcataacggtgtgtcttactacatcaatctgtgtcagaagatttataaaggacccctagggtgcagcgagcgggcatctatctgtagaaggaccactacaggagacgtgcaggtactcggactcgtgcatactcagaagctgggggtgatcggcgacaaggttgtggtgacctattcaaagggatacccctgtggtggtaataaaaccgctagctctgttattgaactcacctgtaccaaaaccgtgggaaggcctgccttcaaaaggtttgacatcgactcctgcacatattacttctcctgggacagtagggccgcctgcgccgtgaaaccacaggaggtccaaatggtgaatgggactatcacaaaccccatcaacgggaagagctttagcctcggcgacatctatttcaagctgtttcgagcgagtggtgatatgagaactaacggcgataactacctgtatgagattcagttatcaagtatcacctcttccagaaaccctgcatgtagcggtgcaaatatttgccaagtgaagcccaatgaccagcacttcagccgcaaggtaggtacatctgacaaaaccaaatactatctgcaggatggagacctggatgtagttttcgcctcctccagtaagtgtggcaaggacaagacaaagtctgtatcctcaacaatcttcttccactgtgacccattggtcgaagacggtatcccagagtttagtcatgagaccgcagactgtcaatatctgttctcttggtataccagcgccgtatgcccccttggggtgggtttcgactcagagaacccaggagatgacggccagatgcataaggggctcagcgagcggtcacaggcagtgggcgccgtcctgtctttgctcttggtcgctctcacctgctgtctgctggctctgctgttgtacaagaaagagcgacgcgagacagttatctccaagttaactacctgctgtaggcgttctagtaacgtctcttataagtattctaaggttaacaaagaagaggagacagacgaaaacgaaacagagtggctaatggaggagatccagctgccgcccccacgtcagggaaaggaggggcaagagaatggacatataaccaccaaaagtgtgaaggccttaagttccttgcatggagacgatcaggatagtgaagatgaggtgttgacgatcccagaggttaaggtgcactccgggagaggagctggcgcagagtcttcacatcccgttcggaacgcccagtccaacgccctgcaggaaagggaagacgaccgggtgggcctagtccgcggcgaaaaggcaaggaagggcaaatcaagtagcgcccagcagaagacagtgagctcaacaaagttggtctctttccacgacgattccgacgaggatctcttacatatatag

SEQ ID NO: 120719 - DNA, 780 bp, synthetic construct
  misc_feature 1..780: note = Description of Artificial Sequence: Synthetic coding sequence
  source 1..780: mol_type = other DNA
atgagcgaggtgccggtggcccgcgtgtggcttgtactccttctgctcactgttcaagtgggggttactgccggggctccctggcagtgtgccccatgttcagccgagaaactcgccctatgtccaccggtgtccgcaagttgctcggaggtgacaagaagcgcggggtgcggatgctgtcctatgtgcgcccttcctcttggcgccgcctgcggggtggccactgctagatgcgctcgggggctctcatgccgggctctgccaggtgaacagcagccactgcacgccctgactcggggacaaggcgcctgtgtccaggagtccgacgcaagcgccccccacgccgccgaagccggatcgcccgagagtcccgaaagcacggagattaccgaggaagagttattggacaatttccacttgatggccccctcagaggaggatcacagtatcctgtgggatgccatcagcacttacgatggctccaaggccctccatgtcaccaatattaaaaagtggaaagagccatgtagaatcgagttgtacagggtcgtagaaagtctggccaaagcgcaggaaacgtcaggagaggagattagtaaattctatctaccaaattgtaacaagaacggattctatcactctcgccagtgtgagacatccatggatggcgaggccggtctgtgttggtgcgtgtacccctggaatggcaagcgaattcccggaagcccagaaatccgaggcgaccctaattgtcagatttatttcaacgtccagaactag

SEQ ID NO: 120720 - DNA, 777 bp, synthetic construct
  misc_feature 1..777: note = Description of Artificial Sequence: Synthetic coding sequence
  source 1..777: mol_type = other DNA
atgctacccctctgtctggtcgcggcattgctcctggccgctggcccgggcccgagtctgggcgacgaagcaatccattgcccaccgtgctccgaggagaagcttgctcgctgtagaccaccagtaggctgtgaggagctcgtaagggagcccggctgcgggtgctgcgccacctgtgctctgggattaggcatgccatgtggggtgtatacaccacggtgtggatcaggactcaggtgttacccaccgcgcggtgtggaaaaaccgctacacacgttgatgcatggacagggcgtctgcatggaactggcggagattgaagcgattcaggaaagcttgcagcctagcgataaagatgagggcgatcatccaaataatagcttcagtccatgttcagcacatgaccgccggtgcttacagaaacatttcgccaagatcagagatcggtcaacctccggggggaaaatgaaagtgaatggggcacctcgagaggatgctcggcctgtgccacaggggtcgtgtcaaagtgagcttcaccgcgccttggagcgtttggcggcttcccagtctcgcacccacgaagacctgtacataatccccataccaaattgcgacagaaacggcaacttccaccccaagcagtgccaccccgcactcgacggccagcggggaaagtgttggtgcgtcgaccgcaaaactggcgtgaaactgcctggcggcttggagccgaagggggagctcgattgccaccagctcgctgactcttttcgggagtag

SEQ ID NO: 120721 - DNA, 477 bp, synthetic construct
  misc_feature 1..477: note = Description of Artificial Sequence: Synthetic coding sequence
  source 1..477: mol_type = other DNA
atggagctcgccgaaatcgaggcaatccaggagtctctccagccatccgataaggacgagggggaccaccctaataattcatttagtccatgcagcgcacacgacagaagatgcctgcagaagcatttcgcaaaaattcgtgatcgcagcacgagtggtggaaagatgaaggttaatggggccccccgagaggacgctcgtccagtcccacaggggagttgtcagtccgagcttcaccgtgctctggagcggctggccgcctcacagtcccgcacccacgaggatctttacatcatccccatcccaaattgcgacaggaacggaaactttcatcccaaacagtgccatccagccctagacggccagagaggtaagtgctggtgtgtggatcgtaaaacaggcgtgaagctgccaggtggactcgagccaaagggagaactcgactgccatcaacttgcggatagcttccgggagtag

SEQ ID NO: 120722 - DNA, 849 bp, synthetic construct
  misc_feature 1..849: note = Description of Artificial Sequence: Synthetic coding sequence
  source 1..849: mol_type = other DNA
atggagaggccttcactacgcgctttacttttgggggcagccggattgttgctccttctgctgcccctttcttcctctagtagcagcgacacgtgtgggccgtgcgagcctgcctcctgtcctcctctaccccccctgggatgtttgctaggcgagaccagggacgcctgtggctgctgtcccatgtgcgcacggggcgagggcgaaccctgcggcggaggaggcgctggaaggggttactgtgcccctgggatggagtgcgtcaagagcaggaagcggcgaaaaggtaaggcaggagccgctgcgggcggcccaggggtttctggcgtgtgtgtttgcaaaagcaggtacccagtctgcggctccgatggaaccacctacccatccgggtgtcagctcagagctgcatctcaacgtgccgagtcccgaggcgagaaggctatcacacaggtgtctaagggtacatgcgaacaaggaccgtcaatcgtgaccccacccaaggacatctggaacgttacaggagctcaagtgtatctgtcctgcgaagtgatcggcatcccaactcctgtgctaatatggaataaagttaaaagaggacattatggcgttcaacgaactgaattgctgcccggtgacagagataacttagcaattcagacccgcggcggccccgagaaacatgaggttacaggctgggttctggttagtcccctatctaaggaagacgctggggaatatgaatgtcatgcctcaaactcacagggccaggcttcagcttcggctaaaataaccgtggtggacgccctgcatgaaattcccgtgaaaaaaggcgagggagccgagctctag

SEQ ID NO: 120723 - DNA, 840 bp, synthetic construct
  misc_feature 1..840: note = Description of Artificial Sequence: Synthetic coding sequence
  source 1..840: mol_type = other DNA
atggaacgaccatctctgagagccttgctgctgggcgccgcaggacttctgctgctcctgctccctctgtcctccagcagtagttctgatacatgtgggccttgcgagcccgcatcctgccctccgctccccccgctgggctgcttgctgggggagaccagggacgcatgcggctgttgccccatgtgcgccaggggcgaaggcgagccatgcggcggtgggggggcaggcagggggtactgtgctcctgggatggagtgtgtcaaatctaggaaaagacgaaagggcaaagccggcgcagctgctggaggccccggtgtttctggagtttgtgtttgcaaatcccgatatcccgtgtgcggatcagacggaaccacttacccttccgggtgtcagctgcgggctgctagccagcgggccgaatctcgaggagagaaagctataactcaggtgagcaaaggcacatgtgaacaagggcccagcatagtgacgcccccaaaggatatttggaacgtgactggcgcccaggtatacctgagctgcgaggtaataggcattcctacacccgttctaatttggaacaaggtgaagcgggggcactatggcgtgcagcgcaccgagttactgccaggagacagagacaatctcgctatacagaccaggggtggcccagagaagcatgaggtgacggggtgggtgctggtgagccccctgagcaaagaagatgctggagaatatgagtgccacgcttcaaacagccagggtcaggcgtcagcaagcgccaaaattacagtggtggacgcgcttcatgagatccccgtgaaaaaagggacccagtag

SEQ ID NO: 120724 - DNA, 393 bp, synthetic construct
  misc_feature 1..393: note = Description of Artificial Sequence: Synthetic coding sequence
  source 1..393: mol_type = other DNA
atggagactctcggcgcgcttttagtgctggagtttctgctgctgtctcctgttgaggcgcagcaggccactgagcaccgactaaagccttggctcgtaggtctggccgcagtagtcgggttcttgttcatcgtttatctcgtgctcctggccaacaggctgtggtgctccaaagcgcgggctgaggacgaggaagaaacaacttttagaatggaatccaacttgtaccaagaccaatctgaggataagcgcgaaaagaaagaagccaaagagaaggaggagaagcgcaagaaggagaaaaagaccgccaaagaaggtgaatcgaacctaggcctggacctggaggagaaagaacctggtgaccacgagcgcgcaaagtcaaccgttatgtag

SEQ ID NO: 120725 - DNA, 1932 bp, synthetic construct
  misc_feature 1..1932: note = Description of Artificial Sequence: Synthetic coding sequence
  source 1..1932: mol_type = other DNA
atggcactccgaaaagctggcgacctggaaccccagttcaccccagagaggaggttccgcctttgttggtatcaggcacacagcggaagggccctgctgggccccccgcctcaggcctcacctcctgccggaggattggcccttgccctgttgctactatcctgggttgctctaggacctagatctctagaaggagccgatccaggtactcctggagaagccgaagggcctgcatgccccgcagcctgtgtctgctcctacgatgacgacgctgatgagctgtcggttttctgtagtagccggaatctgacaaggttaccggacggcgtgcctggcggaactcaggctctgtggctcgacggaaacaacctgagcagcgtgccacccgcggctttccagaacctgagcagcctgggcttccttaacctgcagggtggtcagctcggtagtctggagccccaggcattattgggactcgaaaatctgtgtcacttacatttagaacggaatcagctgcgatcactcgctctgggaacgttcgcccacaccccggcactggcctccctcgggctgtcaaacaacaggctctctcggttggaagacgggctgttcgaaggattaggtagcctctgggatctcaatctgggctggaactcgctggcagttctacctgacgccgcgtttaggggtctgggatctctacgggaacttgtgctggcagggaacagactcgcctatctccagcctgccctcttcagtggactggctgagttaagagaattagacctgtccagaaatgccctccgcgcaattaaggccaacgtgtttgtgcagttgccccggctccagaaactctatctcgataggaacttgattgccgcagtcgcccccggtgcttttctcggcctgaaggccctgcggtggctcgacctgtcccataatcgcgtggctggtctgttggaagatacctttcctgggttgctcggcttacgcgtcctgcggctgtcccacaatgccattgctagtctaagaccgaggacgttcaaggacctgcacttcctggaggagctccagttaggtcacaatcgaatccgacagttagctgaaagatccttcgaggggttgggtcagctggaggtgctgactctagaccacaaccagctgcaggaagttaaggcaggggcctttctcggacttactaatgtggccgtcatgaatttaagcgggaattgcctgaggaatctgcccgaacaagtttttagaggacttggaaagttgcactcacttcaccttgaaggatcttgcctaggccggatccggccccacacgttcacggggctgtcaggattgcggcgcctcttcctgaaagacaatggcctcgtggggatcgaggaacaatctctctggggcttagcagaactgttggagcttgacttgacctctaaccaattgacacatttgccgcacaggctgtttcaaggcctgggtaagctcgaatacctgctccttagcaggaatagactggctgagcttcccgctgacgccctggggcctttgcaaagggctttctggctcgatgtgagtcacaaccggctggaagccctgccaaatagcctactggcacctctgggcaggctgcgctacttgagcctgcggaataattccctgcgaacgtttaccccccagccccctggactggagaggctgtggctggaaggcaacccgtgggactgcggatgcccgctaaaggccctgagagattttgccctgcagaacccatctgcggtcccccggttcgtgcaagctatctgtgagggcgacgattgccaacctcccgcctacacatacaataacatcacatgtgccagtccgccagaggtggtcgggctggacttgcgagacctgtcagaagcccactttgctccctgttag

SEQ ID NO: 120726 - DNA, 1533 bp, synthetic construct
  misc_feature 1..1533: note = Description of Artificial Sequence: Synthetic coding sequence
  source 1..1533: mol_type = other DNA
atgcctcgaggtttcctggtgaagcgaagcaaaaaatcaacacccgttagctaccgggtccgaggcggcgaggatggagaccgagcactgttattgagcccttcctgcggcggagccagggcagaaccgcctgctccctcccctgtcccaggaccacttcctcctcctccccccgctgaaagggcccatgccgcgctggcagccgccctcgcctgtgccccaggacctcagccacctccacagggcccgcgggctgctcacttcggcaaccctgaagccgcccatcccgccccactgtattctcctactcggcctgtgagcagagaacacgagaagcacaaatacttcgagaggtcctttaacttaggatctcctgtcagtgcggagagcttccctactccagccgctctgctggggggaggagggggggggggcgctagcggggcgggtggcgggggtacatgcggaggggatcccttgcttttcgcccccgcagagcttaagatgggaactgcttttagtgccggggccgaagctgccagagggcccggaccaggccctcccctgccacccgccgccgctcttaggcctccaggaaagaggccaccaccccccactgccgccgaaccccctgctaaagccgtgaaagccccaggcgcaaaaaagcccaaagccataagaaaactgcattttgaagatgaggtgactacttccccagtgctggggctgaagataaaagaaggccctgttgaagctcctaggggccgggccgggggagctgctaggcccctgggcgagtttatctgccagctctgcaaagaagaatacgctgaccctttcgccttggcccaacacaagtgcagtcggatcgtgagggtagaatacagatgccctgaatgcgccaaggttttctcttgtcctgccaaccttgcctctcacaggcggtggcacaagccaaggcccgcccccgcagccgcgagggccccagagcccgaagctgcagccagagcagaggcgcgggaagcaccaggcggcggatctgatcgggacaccccctcccccgggggcgtgtctgaatccgggtctgaagacggcctctacgagtgccaccactgtgccaaaaaattccgccgccaggcctacctgcggaaacacctgctggcccaccatcaggccttacaggccaaaggtgcccccctggctccaccagcggaggatctgctggccctttaccctggtcctgacgagaaggccccccaggaggcagccggtgacggcgaaggggcgggggtgctgggcctgtccgcgagcgctgagtgtcatctctgtccagtgtgcggggaaagtttcgccagcaagggcgcccaggaaaggcatctgaggctgctgcacgctgctcaggtgtttccttgcaagtattgtccagccacgttctatagtagtccggggttgacacgacacataaacaagtgccatccatccgagaaccgacaagtaatactactgcaggtccctgttaggccagcttgttag

SEQ ID NO: 120727 - DNA, 1701 bp, synthetic construct
  misc_feature 1..1701: note = Description of Artificial Sequence: Synthetic coding sequence
  source 1..1701: mol_type = other DNA
atgcctcgtggctttttagttaagagaaccaagcgtaccggggggctatatagagtccgattggctgaacgagtgttcccacttcttggcccccagggagccccacccttcctagaggaagcaccctctgcttcacttcctggagctgaaagagctacccccccaaccagggaggagccagggaaaggtcttacagcagaggccgcacgggagcaatccggttctccctgtagagcagctggggtgagtccaggcacgggtgggcgggaaggtgcagagtggagagccggcggaagggaaggaccagggccatctcctagcccttcccctagcccggcgaaacctgcaggcgcggaactgcgaagggcattcctcgaaaggtgcctgtcaagtccggtgtctgcggagtcattccctgggggggcggcggctgtggctgccttcagctgcagtgttgctcccgcagctgccccaacaccaggcgagcagtttctactcccgctcagagccccatttcctgagcctgctcttcagcccgatccagcccctctgagtgccgcgctccagtcactgaagcgtgccgctggtggggagcggagaggaaaagcccccacagactgcgcttcagggccggccgcggcggggatcaaaaagcctaaagccatgcgaaagctgagctttgcagacgaagtgactaccagtcccgtgctaggtcttaaaatcaaggaagaagagccaggcgccccttctagagggctgggaggctccagaacacctttgggggaattcatctgtcagctgtgcaaggagcagtacgcagacccctttgcgctcgcccagcaccgctgctccaggatcgtgagggtggagtacagatgtcccgagtgtgataaggttttcagctgtccagccaacctagccagtcaccgcaggtggcataagccaaggccagctgccgccaatgcagcaacagtgagctctgcagacggaaaaccaccatcttcctccagcagctcctcccgcgactccggcgccatcgcgtcatttttggcagagggcaaggaaaatagcagaatcgaacggacagcggaccaacatccccaggcccgcgattcgtccggcgccgaccagcatccggatagcgctcccagacagggcctgcaggtactgacccacccagaacctcctttgcctcaggggccgtacacagagggggtgcttggcaggcgggtgcctgtgccgggcagcacaagcggaggaagaggttcggagatctttgtttgcccatactgccacaagaaattcaggcgacaggcttacctcagaaagcatctgagtacccatgaggcgggatcagcccgggccctggctccaggctttggatcagaaagaggagcccccctcgcctttgcttgtcccctttgcggcgcacactttcccactgctgatatccgagaaaaacaccgtctttggcatgccgtgcgggaagaattgttgctgccagccttggctggcgcccctcctgagacttcagggccgtcgggcccgtccgatggcagtgcacagcagattttttcttgtaagcattgtccctctacattttttagcagtcccggccttacgcggcatatcaataagtgtcatcccagcgaatccaggcaagtgctgctgctgcaaatgcctctaagacccggttgctag

SEQ ID NO: 120728 - DNA, 792 bp, synthetic construct
  misc_feature 1..792: note = Description of Artificial Sequence: Synthetic coding sequence
  source 1..792: mol_type = other DNA
atggtaaagatagccttcaacacacccacagccgtccagaaggaggaagcacgacaggacgtggaggctctgctgtcgaggactgtgcgcactcagatcttaacgggtaaggagctcagagttgccacacaggaaaaggaaggcagtagtggccgctgcatgctgacgctcctaggcttgagttttatcctggctggtctcatcgtcggcggggcttgcatctacaaatatttcatgccaaaaagcaccatctaccggggggagatgtgtttcttcgactcagaggatccagcaaacagtctgcggggcggtgaaccaaatttcctgcccgtcaccgaagaggcagatattagagaggacgacaatattgcaattatcgatgtccccgtcccgagttttagcgattcagatcccgcagcaataatacacgacttcgagaagggcatgactgcgtacctggacctcctcctgggcaactgctatcttatgcctcttaacacctcaattgtgatgccccctaaaaaccttgttgagctgttcgggaagctggccagtggtagatatctgccacagacatatgttgtgcgggaagacctcgtggccgtggaggaaatccgtgatgtcagcaatctcgggatcttcatttaccagctctgtaataataggaagtcttttcgactgcggcggagagacctgctgctcgggtttaacaaaagggcaattgataagtgttggaagatacgacattttcctaatgaattcatcgtcgaaaccaagatttgtcaggagtag

SEQ ID NO: 120729 - DNA, 660 bp, synthetic construct
  misc_feature 1..660: note = Description of Artificial Sequence: Synthetic coding sequence
  source 1..660: mol_type = other DNA
atggtgaaaattgcctttaatacaccaaccgctgtacaaaaagaagaggctcgccaggatgtagaggcgctcttgagcaggacagttcgaacacagatcctgactgggaaatcaacaatctatcggggtgaaatgtgcttttttgactcggaagatcccgccaactcactccgcggtggcgaacctaattttctgccagtgactgaggaagccgacattagggaagacgacaatatagccataatcgatgtacctgtgccttccttttctgactcggacccagccgccattatccatgacttcgaaaaaggtatgacggcgtaccttgacctattattggggaattgttatctgatgcccctgaatacgagtatcgtcatgccgcccaagaacctcgtagagctcttcgggaagctcgcttccggcaggtacttgccccaaacttacgtggtgcgtgaagacctagtggccgtcgaggagatcagggatgtgtccaacctggggatattcatctatcagctctgtaacaatcgcaaaagctttcgattacgacggcgggacctattgcttggctttaataaaagggcgatcgataagtgttggaagatccggcacttccccaacgagtttatcgtggaaacgaaaatctgtcaggagtag

SEQ ID NO: 120730 - DNA, 801 bp, synthetic construct
  misc_feature 1..801: note = Description of Artificial Sequence: Synthetic coding sequence
  source 1..801: mol_type = other DNA
atggtgaaagtgacgtttaactctgccctcgcgcaaaaggaagccaaaaaggacgagccaaagtccggcgaagaggcccttatcatcccgcctgacgcggttgcagttgactgcaaagaccctgatgacgtagtcccagtgggacagcgacgcgcctggtgttggtgcatgtgtttcggtttagcctttatgctggcaggggtgatcctcggtggcgcatatctatataagtactttgctctgcagcccgatgatgtgtattactgtgggatcaaatacataaaggacgacgtgattctgaatgagccatccgcggatgccccagctgccctgtatcagacgatcgaggaaaacattaaaatattcgaggaagaggaggttgaatttatctctgtacccgtacctgaattcgctgattccgacccagccaacatcgtgcacgactttaacaaaaagttaacagcttatctggaccttaatctcgacaaatgctacgtgatacccctgaacacaagcatagttatgcctccaaggaacctactggaactactcatcaacatcaaggcgggcacctacctgccccagtcgtacctaatccacgagcacatggttataactgatagaattgaaaatatcgaccatctcggcttttttatctaccggttgtgtcatgacaaagagacctataaactccagcggcgcgagaccattaagggaattcagaaacgggaagcttccaattgcttcgccataagacactttgagaacaagttcgctgtagagaccctgatctgtagctag

SEQ ID NO: 120731 - DNA, 693 bp, synthetic construct
  misc_feature 1..693: note = Description of Artificial Sequence: Synthetic coding sequence
  source 1..693: mol_type = other DNA
atggtgaaaatttcattccaaccagctgtggctggcatcaaaggagataaagccgacaaggcgagcgcctctgccccagcaccagcttctgccacggagatcctgctgacgcccgctagagaagagcagccaccccagcaccggagtaagcgcggaggctctgtagggggcgtatgttacctgagtatgggcatggtggtgctactcatggggctggtgtttgctagcgtctatatttaccgatatttcttcctggctcaattggcacgggacaactttttccggtgcggagtgctgtatgaagattcacttagcagtcaggttcgcacgcagatggaactggaggaggatgtgaagatctatctggatgagaattatgagcgaataaatgtgccagtgccccagtttgggggcggtgatcctgctgatatcattcatgactttcagaggcgtggtacgtatctcccacagacctacatcattcaggaagagatggtcgttacagagcatgtgtccgataaggaagccctcggtagtttcatatatcacctttgcaacgggaaagacacttaccgtcttaggcgaagagctacccggcggaggattaacaagcggggtgccaaaaattgcaatgcaatcagacacttcgagaacacatttgtggttgagacgcttatatgtggcgtggtctag

SEQ ID NO: 120732 - DNA, 804 bp, synthetic construct
  misc_feature 1..804: note = Description of Artificial Sequence: Synthetic coding sequence
  source 1..804: mol_type = other DNA
atggttaaaatctcattccaaccagccgtggcggggatcaaaggtgataaggccgacaaggccagtgcttcggcgccggcacctgcctccgccacagagatcctgttaacccccgcacgagaggagcagccccctcaacacaggagtaagcggggcggctccgtcggcggcgtgtgctacctgtctatggggatggtcgtgctgttaatgggactggtcttcgcatccgtctatatatatcggtacttcttcctcgcacagctcgcaagggataattttttccggtgtggggtgctgtatgaagattccctaagttcccaagtgaggacccaaatggaactagaggaagatgtcaaaatatacctggacgagaattatgagaggatcaatgtccccgtccctcaatttgggggaggcgaccccgccgatattatacacgatttccagcgagggttaaccgcctatcacgacataagcctagacaagtgttacgtgattgaacttaacaccactatcgtgctgccaccgaggaatttctgggaactgcttatgaatgtgaaaagggggacatacttgcctcagacttacattattcaggaggaaatggtggtcactgaacatgttagcgacaaagaagccctagggtcctttatttatcacctatgtaacggcaaggatacatacagattgaggcgacgggctacacggaggcgcatcaataaacggggagccaagaactgcaatgcaattagacactttgagaacacatttgtggtggagacactcatctgtggcgtggtgtag

SEQ ID NO: 120733 - DNA, 663 bp, synthetic construct
  misc_feature 1..663: note = Description of Artificial Sequence: Synthetic coding sequence
  source 1..663: mol_type = other DNA
atggtcaagatcagcttccagccagcagtcgccggaatcaagggcgataaagccgataaggcttcagcatcagcacccgctccagcttcagcaaccgagattctcctgacgccggcgaggctggcccgggacaattttttccggtgtggagtcctgtatgaggacagtctctcttcgcaggtgcgcacccagatggaactggaggaggatgttaagatctaccttgatgagaactacgagcgcatcaacgtgcctgtcccgcagttcggcggaggtgatcccgctgacatcatccacgatttccagaggggtctgaccgcataccacgatatctctttggacaaatgttatgtgattgaactgaatactaccattgtcctgccgccgcgcaatttctgggaactcctgatgaatgtgaaaagaggcacttacctcccacagacgtatatcatacaggaggaaatggtggttactgagcatgtttctgacaaggaggctctggggtcattcatctaccatctgtgtaatggaaaggatacatacaggctgagacgtagggctacacgcaggagaatcaacaagcgaggagctaagaattgcaacgccattaggcatttcgaaaacacctttgtggtagaaacactaatctgtggagttgtctag

SEQ ID NO: 120734 - DNA, 543 bp, synthetic construct
  misc_feature 1..543: note = Description of Artificial Sequence: Synthetic coding sequence
  source 1..543: mol_type = other DNA
atggtgaagatcagtttccagcctgccgtggcaggaattaagggagacaaggccgacaaggcatctgcctcagccccggcacctgcaagtgccacggagatccttttaacgcctgcccgtgaagaacaaccgccccagcacagatccaagagaggtggctccgtgggtggcgtctgctatctcagcatgggtatggttgttctcctgatgggactggtctttgccagcgtctacatatatcgttacttctttctcgctcagctggctagggacaacttttttcgctgcggagtcctgtacgaggactcactatctagccaggtgcgtacacaaatggagctcgaagaggacgtgaagatctacctggatgaaaactacgagaggatcaatgtgcctgtcccccagttcggtgggggcgatccagctgacatcattcatgacttccagcgtggcctgacggcttatcatgacatctccctggataagtgttatgtgatcgaattgaatacaacgatcgttctgccccctcggaatttttggtag

SEQ ID NO: 120735 - DNA, 1839 bp, synthetic construct
  misc_feature 1..1839: note = Description of Artificial Sequence: Synthetic coding sequence
  source 1..1839: mol_type = other DNA
atggcagcagctggcagactaccttcttcctgggctctgttcagcccactgctggctggattggcacttcttggggtagggccagtgcccgctagagccctgcataatgtgacagcagaactttttggggctgaggcatggggtacgttggccgcctttggagatttaaattccgacaagcagacggacttgtttgtactgcgcgaacgaaacgacctgattgtcttcctcgctgaccaaaacgctccctatttcaaacctaaagtgaaggtgtcgttcaagaaccactccgctctgattacctctgtggtgcccggggattatgacggcgactcccagatggatgtgctgttgacttatctgcccaaaaattacgcgaaatccgaattgggagcagtgattttttggggccagaatcaaacgttagatcctaacaacatgaccatcctaaataggacattccaggacgaaccgttaatcatggactttaacggggatctaataccagatatcttcggaataactaatgaatctaaccaacctcagattctcctgggcgggaatctgtcgtggcatcccgctctgacgacaacttctaagatgcgcatcccccactcccatgcctttatagacctgacagaggacttcactgctgacctcttcctcacgactctgaatgccaccacctctacgttccaatttgagatttgggagaatcttgatggcaactttagcgtgtccactatcctggaaaaaccacaaaacatgatggtggttggacagagtgcctttgcagactttgacggagatggccacatggatcacctgctccctggttgtgaggacaaaaattgtcaaaagagtacaatctatctcgtgcggtcaggaatgaaacaatgggtccctgtcctgcaggatttttccaacaaaggcacactgtggggatttgtcccatttgttgacgagcaacaacccactgagattccaatccccatcacccttcatataggggactacaacatggatggctatcccgacgcactcgtcattctgaaaaataccagtgggtctaaccagcaggcttttttgctcgaaaacgtgccctgcaacaacgcaagctgtgaagaagcccgacgcatgttcaaagtttattgggagctcacagatctaaatcagataaaggatgccatggttgccacgtttttcgatatctacgaagacggaatcttggacatagtggtgctgtctaagggctacactaagaatgattttgcgattcacacgctgaaaaacaatttcgaggcggatgcctattttgtgaaggtcattgtgctcagcgggctgtgctcaaacgactgccccaggaaaatcacaccgttcggtgtgaaccagcctggcccttacattatgtataccaccgtggatgcaaacggctacttaaaaaacggatccgccgggcagctcagccagtcagcccacctagcccttcagcttccttacaatgttctgggcctcgggcgttccgcaaattttctggatcacctttatgtggggataccaaggccttccggggaaaagtccatcagaaaacaggagtggacagctatcatacctaactcgcaactcatagttattccataccctcacaacgtgccacggtcctggtctgccaagctgtacctaaccccttctaatatcgtactgctgacagccattgcccttatcggcgtttgtgtatttatcctcgccatcataggtatcctgcactggcaggaaaagaaggccgatgacagagaaaagcgacaggaggcccataggttccacttcgatgcaatgtag

SEQ ID NO: 120736 - DNA, 819 bp, synthetic construct
  misc_feature 1..819: note = Description of Artificial Sequence: Synthetic coding sequence
  source 1..819: mol_type = other DNA
atggacggttacccagacgctctggtgatactcaagaatacgagcggctccaaccaacaggcctttttgcttgagaacgtgccttgcaataatgcctcctgcgaagaggctcgcaggatgtttaaagtttattgggagcttacagatttgaatcaaatcaaagatgccatggtggccacattcttcgacatctatgaggacggcattctggacatcgtggttctgagtaaagggtacacaaagaatgattttgcgatccacaccctgaaaaacaacttcgaagcagatgcttactttgtgaaggttatagtgcttagcggattgtgttccaatgactgccctagaaagataaccccctttggagtgaaccagcctggtccctacatcatgtacaccaccgtggatgcaaatggctacttgaaaaatggtagcgccggacagcttagccagagcgcgcacctggcgcttcagctcccctacaacgtgctggggcttggaaggagcgctaacttcctggatcatctttatgttggcattccccggccaagcggcgagaaatcaatcaggaaacaggagtggaccgccattatcccaaatagccagctcatcgtcatcccctatccacacaacgttcctagaagttggtccgctaagctgtacctgaccccctctaatattgtgctgctgactgctattgcgctgatcggagtctgtgtgttcatcctagctattatagggatcctgcattggcaagaaaagaaagctgatgaccgcgaaaagagacaggaagcccatcggttccactttgatgccatgtag

SEQ ID NO: 120737 - DNA, 1074 bp, synthetic construct
  misc_feature 1..1074: note = Description of Artificial Sequence: Synthetic coding sequence
  source 1..1074: mol_type = other DNA
atgatggtggtggggcaaagcgcctttgctgatttcgacggcgatggacacatggatcacctcttgcccggatgcgaggataagaattgtcaaaaaagcaccatttatctagtgcgctctggcatgaaacagtgggtccccgtgttgcaagatttctcgaacaaaggcaccctatggggatttgtgcccttcgtggatgagcaacagccgacagagattcccattccaattaccttgcacatcggagactataatatggatggctaccccgatgccctggtgatcctaaagaatacctctggatccaatcagcaggcttttcttctggagaatgtcccttgtaataacgcctcttgcgaggaggcccgacggatgttcaaggtctattgggagctgactgatctcaatcaaattaaggacgctatggttgctacgttcttcgatatttacgaggatgggattttagatattgtggtgctatcaaaaggatacaccaagaatgattttgcaattcacacactgaagaacaactttgaggcagacgcttatttcgttaaggtaatcgtactgtcaggactgtgctccaatgactgccctcgaaagattactccctttggggtgaatcaaccggggccttatatcatgtacactaccgtggacgctaacggttatctcaaaaacggttccgccggccaactcagccagtcagcccatttagctctccaactaccctacaacgtccttggtctgggtcggagcgctaatttcctcgaccatctctatgtgggcatcccacggccttccggagaaaaaagcatcaggaagcaggaatggacagcgattattccaaactcccagcttatcgtcattccatacccacacaacgtcccccgtagttggtccgctaaactttacctgactccatccaacatcgtgctgctcacggccattgccctgatcggtgtgtgtgtcttcattctggctatcattggcattttgcactggcaggagaagaaagctgacgatagggaaaagagacaggaggctcacaggtttcattttgatgcgatgtag

SEQ ID NO: 120738 - DNA, 1395 bp, synthetic construct
  misc_feature 1..1395: note = Description of Artificial Sequence: Synthetic coding sequence
  source 1..1395: mol_type = other DNA
atggatgtattgctcacttatctgcccaaaaattatgctaagtctgagctgggggcggtgattttctgggggcaaaatcagaccctggatcccaataacatgactatactaaatcgcaccttccaagacgaaccactgattatggatttcaatggagatctcatacctgacattttcggcatcaccaatgagagtaaccagccacaaatattgttgggaggtaatcttagctggcaccccgctctcactactacctctaagatgcgaatcccacactcacacgccttcatcgatctcacagaggactttacagctgacctgtttctcaccacacttaacgcaacaactagtactttccagtttgagatctgggaaaatttggacgggaatttcagcgtctcaaccatcctggaaaaaccacagaacatgatggtagtcggtcagagcgcttttgccgactttgacggggatgggcatatggatcaccttctgcctggctgcgaggataagaactgccagaagagcactatttacctggtccgctccggcatgaaacagtgggtccctgtgctgcaagacttcagtaacaaaggcaccctgtggggattcgtcccatttgtggacgaacagcagccgaccgagatcccaattccaataacactacatatcggggactataacatggacggctaccctgacgccctcgtcatccttaaaaacacatccgggtctaatcagcaggcctttctgctcgagaacgtgccatgcaacaacgcaagctgcgaggaggcaagacggatgtttaaagtgtattgggagctcacagatctaaatcaaattaaagatgcgatggtagcaacgttctttgacatttatgaggacggtattctcgatatagttgtactgagcaaagggtatacaaagaacgattttgcgatccataccttaaagaataatttcgaggccgatgcgtacttcgtcaaagtgatcgtcctgagcgggctgtgtagcaatgactgccctagaaagataacaccgttcggagtgaatcagcctgggccttatataatgtacacaactgtagacgctaacggatatctgaagaacgggtccgcaggacagctgtctcaatcagcccacctcgctctccagctcccatataatgtgctaggtcttggacgatccgccaatttcctggaccacctctacgttggaattcctcgcccttctggtgagaagagtatccgtaaacaggagtggacagcaatcatccctaattctcagctcatcgtgatcccctatccgcacaatgtacctcggtccagccatagatgtttgtgctttcatctgggtaacaactggcattttactttagccggaaaggaatcccgctag

SEQ ID NO: 120739 - DNA, 1044 bp, synthetic construct
  misc_feature 1..1044: note = Description of Artificial Sequence: Synthetic coding sequence
  source 1..1044: mol_type = other DNA
atgtcccttctgtgtcgcaataaaggatgtggccagcactttgaccccaatacaaacctgcccgactcttgttgccatcatcctggagttcccatatttcacgatgccttgaagggttggtcttgttgtcggaagagaaccgtggacttcagcgaatttttaaacattaagggctgcacaatgggtccacactgtgctgagaagttgcccgaggcaccgcagcctgaagggccagccacgtcaagctccctccaggaacagaaaccgctgaacgtcatcccgaagtcagccgagacccttagacgagagcgccctaagtcagaactaccactcaaactattacctctcaatatcagccaggcacttgagatggccttggaacagaaggagctcgaccaggaaccgggtgccggcttggactcccttatacgcactgggagctcatgccagaacccggggtgtgacgctgtttaccagggtcctgaatcggatgccaccccctgtacctaccaccccggggccccgaggtttcatgaagggatgaaaagctggagctgctgcggcatacagactcttgatttcggcgcttttctcgcgcaacctggatgtcgcgtcggccgacacgactgggggaagcagctgcccgcctcatgtaggcatgattggcaccaaacagacagcctggtcgtcgttaccgtttacggccagatccccctccctgccttcaactgggtcaaagcgagccagacagagctgcacgttcacattgtcttcgacggtaaccgtgtgtttcaagcccagatgaagctctggggcgtgatcaacgtggagcagagttccgtgttcttgatgccgagtcgtgtcgaaatttcactggtgaaggcagaccctgggagctgggcacaattggagcaccctgacgccctggctaaaaaggccagggccggagtcgtgctggagatggacgaggaagagtcagatgattctgatgatgacctgagctggacagaggaagaggaagaagaggaagcaatgggcgaatag

SEQ ID NO: 120740 - DNA, 990 bp, synthetic construct
  misc_feature 1..990: note = Description of Artificial Sequence: Synthetic coding sequence
  source 1..990: mol_type = other DNA
atgagcactgactcctgctgccatcatcccggtgtgccaattttccacgacgctctaaaaggttggtcctgctgcaggaaaaggacagtggattttagtgaattccttaacatcaaaggctgcacaatgggcccacattgtgctgagaagttgcctgaagccccccaaccggaaggccctgccaccagctcttcccttcaggaacagaaacctctgaatgtcatcccaaagagcgccgaaacactgcggagggaacgccccaagtctgaactgcccctgaagctgctacctctgaacatatcccaggcgctggaaatggccttagaacagaaggaactggatcaggaacccggggccggactggacagcctcatcagaaccggcagtagctgccagaaccccggatgtgatgccgtctatcaggggcctgagtctgacgccactccttgcacttaccaccccggagcacccaggttccatgaaggaatgaagtcttggtcctgctgcgggatacaaactctagattttggcgcgtttttggcccagccaggttgccgcgtgggaagacacgattggggaaagcagttgccggcaagctgtagacacgattggcatcagaccgacagcttggtagtggttacagtctatggccaaatacccctgcccgcttttaattgggtgaaggcatcccagacggaactccatgtgcacatcgttttcgatggcaatcgcgtttttcaggcacagatgaagctctggggggtaattaatgtcgaacagagctctgtgttcctgatgccctcacgggtcgagatttctctggtgaaggctgatcctggtagctgggctcaactggaacaccctgatgcccttgccaaaaaggcccgggccggcgtggtcttggaaatggacgaggaggaaagtgacgatagtgacgacgatctatcttggactgaagaggaggaggaggaagaagctatgggggaatag

SEQ ID NO: 120741 - DNA, 603 bp, synthetic construct
  misc_feature 1..603: note = Description of Artificial Sequence: Synthetic coding sequence
  source 1..603: mol_type = other DNA
atgtttcggaagggaaaaaaaaggcacagctctagctcaagccaaagcagcgaaattagcacgaaatccaaatccgtcgactctagcctcggaggcctgtctaggtcctcaacagtggcctcgctggatacagactctactaagtcatcaggccagtccaacaacaactccgatacttgcgccgagttccgaatcaaatatgtgggagccatcgagaaactgaaactctctgagggaaaggggcttgaggggcctctggatttgatcaattatatcgacgtggctcagcaggatggcaaactgccattcgttccccctgaggaggaatttatcatgggagtcagcaaatacggcataaaggttagcactagcgatcagtatgacgtgttgcacaggcatgctctttatttaattattaggatggtgtgttacgacgatggcctcggagcagggaagtctctgctggcactgaagactacagacgcctcaaacgaagaatatagtctgtgggtgtatcagtgcaatagcctggagcaggcccaggcgatctgtaaggtcttgagtacagcatttgatagtgtgctgaccagcgagaaaccttag

SEQ ID NO: 120742 - DNA, 603 bp, synthetic construct
  misc_feature 1..603: note = Description of Artificial Sequence: Synthetic coding sequence
  source 1..603: mol_type = other DNA
atgttccgcaaaggaaaaaagaggcatagctcgagctcctcacagtcctctgagatctcaacaaagagtaaaagcgtggattccagcctcggcgggctttcgaggagcagcacggtcgcttctctggataccgacagcacaaaatcctctgggcagtcaaacaacaattcagatacctgcgcagaatttcgaatcaagtatgttggcgccatcgagaaactaaagctgagcgagggaaaaggtctggaaggacctctggatctgatcaactatatagatgttgcccagcaggatgggaaacttccatttgtccctccagaggaggagttcattatgggagtgtctaagtacggtataaaggtatcaactagtgaccagtacgacgtgctgcatcgccacgctctgtatctcatcattcgcatggtctgttacgacgacggccttggggccggaaaatctttactagccctgaagaccactgacgcatccaacgaggagtactctctctgggtgtatcagtgcaattccctcgagcaagctcaggcgatctgtaaggttctctcaactgcctttgactcagtcctgacttctgagaaaccttag

SEQ ID NO: 120743 - DNA, 255 bp, synthetic construct
  misc_feature 1..255: note = Description of Artificial Sequence: Synthetic coding sequence
  source 1..255: mol_type = other DNA
atgttcagaaagggcaagaagaggcacagctcctcatcatcccaatcatctgagatatcaaccaaatcaaagagcgtggatagcagcctgggcggactatctcggtccagcacagtggcgtcactggacaccgacagtactaaaagctctggtcagagcaacaataactcagatacctgtgccgaatttaggatcaaatacgtcggcgccattgagaaactcaagttgagcgagggtaaggggttagaagggtag

SEQ ID NO: 120744 - DNA, 291 bp, synthetic construct
  misc_feature 1..291: note = Description of Artificial Sequence: Synthetic coding sequence
  source 1..291: mol_type = other DNA
atgttcaggaagggaaagaagcgccatagcagttcaagcagccagagctcagaaatttccaccaaatccaaatccgtggacagtagcctggggggactgagtagaagcagcacagttgcgtcacttgacaccgattctactaagagttccggacagtctaacaacaactccgatacttgcgcagagttccgaattaaatatgtgggcgccatcgagaagctgaaactctctgagggaaaaggcctggagggaccactagatttgattaattacatcgacgttgcccagtag

SEQ ID NO: 120745 - DNA, 261 bp, synthetic construct
  misc_feature 1..261: note = Description of Artificial Sequence: Synthetic coding sequence
  source 1..261: mol_type = other DNA
atgttccggaagggcaagaagcgacatagcagctcctcttcccagtcctcagaaatctctaccaagtccaagagcgtcgatagtagcctgggcggcctcagtaggtcctctactgtagcttcacttgatacggattccactaagtcttctggtcagtccaataacaattcagacacttgtgccgagtttcggatcaagtacgtaggtgctatcgaaaaacttaagttatcagaggggaaggggcttgaaggacctttatag

SEQ ID NO: 120746 - DNA, 411 bp, synthetic construct
  misc_feature 1..411: note = Description of Artificial Sequence: Synthetic coding sequence
  source 1..411: mol_type = other DNA
atgttccgaaagggaaagaagagacactcatcctccagctcacagtcttccgaaatctctacaaagtcgaagtctgtcgatagttcactgggtggcctcagtcgcagctctacggtcgcctccctcgataccgacagtacaaaatcctcgggccagagtaataataattcggacacctgcgcagagttccgcatcaagtacgttggtgcaatcgaaaagttaaaattgagcgagggcaaaggcctggagggacccctggatctcatcaattatattgatgttgcacaacaggacgggaagttacctttcgtgccgcccgaagaagagttcataatgggagtgtctaagtacggtataaaggtgtccacctcagaccaatatgacgtgctgcacaggcacgctctctattag

SEQ ID NO: 120747 - DNA, 345 bp, synthetic construct
  misc_feature 1..345: note = Description of Artificial Sequence: Synthetic coding sequence
  source 1..345: mol_type = other DNA
atgtttcgcaaaggcaagaagaggcactcatcttccagctcccagtccagcgagattagtaccaagagcaagtctgttgacagcagtttgggcgggctgagtagatccagcactgtggcttctctggacacagattccaccaaaagcagtggacagtccaacaataactccgatacctgcgcagagtttcggattaaatatgtgggagcaatcgaaaagctgaaactctctgaaggcaaaggcttggaaggaccattggacttgataaactacatcgatgtggcccaacaggatgggaagctgcccttcgtgccgcctgaagaggagttcataatgggtgtgtag

SEQ ID NO: 120748 - DNA, 198 bp, synthetic construct
  misc_feature 1..198: note = Description of Artificial Sequence: Synthetic coding sequence
  source 1..198: mol_type = other DNA
atgttccgtaaagggaagaagcgccatagtagtagcagttcacagagctcggaaatatcgactaagtctaagagcgttgactcaagcctgggcgggctgagcagaagctcaacagttgcctctttagacaccgatagcacgaaaagtagcgggcagtcaaataacaattctgacacctgcgccgagttcagaatatag

SEQ ID NO: 120749 - DNA, 453 bp, synthetic construct
  misc_feature 1..453: note = Description of Artificial Sequence: Synthetic coding sequence
  source 1..453: mol_type = other DNA
atgttcagaaaaggcaaaaagcgccacagctctagttcctctcagtcgtcagaaatcagcaccaagagtaagagcgttgactcaagcctgggcggactatctaggtccagtaccgtcgctagtctcgatacggattctacgaaaagcagtggtcagtctaataataactctgacacctgcgccgagttccgcatcaagtatgttggggcaatcgaaaagctcaaattgtctgagggcaaggggctggaaggtcccctggacctcataaactacatagacgtggcccagcaagacggcaaactgccatttgtgccacccgaggaggagtttatcatgggagtgagcaagtacggcattaaagtctcaacaagcgaccaatatgaacaggcccaggccatatgtaaggtgcttagcaccgccttcgattccgtactgacctctgaaaagccctag

SEQ ID NO: 120750 - DNA, 534 bp, synthetic construct
  misc_feature 1..534: note = Description of Artificial Sequence: Synthetic coding sequence
  source 1..534: mol_type = other DNA
atgcccgtcaaaagaagcctgaaactggacggcctccttgaggaaaatagtttcgatccatccaagatcacacgcaagaaatcagtgattacttatagtcctacgacaggaacgtgtcagatgtccctctttgcatctcccacttcttcggaggaacaaaagcatcggaacggcctgagcaatgaaaaacgtaagaagctcaatcacccgtccctaacggagtccaaggaatcaaccactaaggacaacgacgaatttatgatgctgctctctaaggtggagaagttgtcagaggagattatggaaatcatgcagaatctgagctcaattcaggctctggaaggctcccgggaactcgaaaacctgatcggaatttcatgcgcatcacactttttgaagcgcgaaatgcagaagacgaaagagctcatgacaaaagttaacaaacagaagctgtttgaaaaatctacaggactaccccacaaagcgtcaaggcacttagactcctacgagtttctcaaggctattctgaactag

SEQ ID NO: 120751 - DNA, 513 bp, synthetic construct
  misc_feature 1..513: note = Description of Artificial Sequence: Synthetic coding sequence
  source 1..513: mol_type = other DNA
atgcccgttaagagatccctcaagctcgatggactactcgaagagaacagtttcgatccgtctaaaattactcgtaaaaaatctgtcattacgtacagccccactacgggaacatgtcagatgtctctcttcgcctcccccacaagctccgaagagcagaaacatcgtaatggactcagcaacgaaaaaagaaagaagctgaatcatccttcgcttaccgagagtaaagaatccactactaaagacaatgatgaatttatgatgctgttgtccaaggtagaaaaactttcagaagagatcatggagatcatgcagaacttatctagcatacaggcgctggagggatcaagggaattggagaatcttattggtatatcatgtgcctcacatttcctgaaacgcgagatgcagaagacaaaagaactgatgacaaaggtgaataagcagaagctatttgaaaagagcacaggcctgccacacaaaggacaaccccagatgtctcaaccattatag

SEQ ID NO: 120752 - DNA, 651 bp, synthetic construct
  misc_feature 1..651: note = Description of Artificial Sequence: Synthetic coding sequence
  source 1..651: mol_type = other DNA
atgcccttcgcaccggtggcccaggctcgggttcagtggcacgacttcagaagcctgcagcacttgctccctgcatttaaaaggttctcatgcctgtctctcgggtcaagttgggactactccgtcaagcgatcattgaaactggatggcctgctggaagaaaactcctttgatccctcgaagatcaccagaaagaagagcgtgatcacctattccccgacaactggcacctgtcagatgtccctgtttgcctctcctacctcatcagaggaacagaagcatcggaatggcctctccaacgaaaagcggaaaaaactcaatcacccgagcctgacagagtcaaaagaaagtacaaccaaggacaatgacgaatttatgatgcttctgagcaaagttgagaaactgtctgaggagataatggagatcatgcagaatctcagtagcatccaggccctggaaggcagcagagagctggaaaaccttatcggaatttcctgtgcttcccactttctgaagcgtgagatgcagaaaaccaaggagctcatgacaaaagtgaataagcagaaattattcgaaaaaagtacaggactcccacataaggcatcccgtcatttggatagttacgaatttctgaaagccattttgaattag

SEQ ID NO: 120753 - DNA, 3540 bp, synthetic construct
  misc_feature 1..3540: note = Description of Artificial Sequence: Synthetic coding sequence
  source 1..3540: mol_type = other DNA
atggcaccaagacccagagctagacccggcgttgctgtggcgtgctgctggctgctaacagtcgtcttgcgctgttgcgtatcttttaatgttgatgtgaaaaactccatgacatttagtgggcctgtcgaagacatgtttggctacacagttcaacagtacgagaatgaggaaggcaagtgggttctcattggttccccgctagtgggccagccaaaaaatagaaccggcgacgtctacaagtgtccggtgggacgcggcgagtctctgccctgtgtgaaactcgacttgccagttaacacgagtattcccaatgtgaccgaagtgaaggagaatatgacattcggatcaaccctcgtcaccaacccaaacggtgggtttttggcctgtgggcctctctatgcataccgctgtggacatttgcattatacaactggtatttgttccgacgtctccccaacttttcaggtcgttaactcaatagcacctgtacaggagtgcagcacacagctcgatatcgtgatagtgttggacggctccaattctatctacccctgggactctgtcactgcattcctgaatgatcttctggaacgtatggatatcggccccaagcagacccaagtcggcatcgtacaatatggtgagaacgtcactcatgagttcaacctaaacaagtacagttccaccgaagaagttctggtagctgctaagaagatcgtacagcgggggggccgtcagacaatgacagctttgggcattgacacagccagaaaggaagctttcactgaggccagaggcgcccgccgaggcgttaagaaagtgatggttattgtgaccgatggggagagtcacgacaatcatagacttaaaaaggtcatccaggactgcgaagatgagaacattcagagattctccatcgcaattttaggcagctacaatagggggaatttgtccaccgaaaaattcgtcgaggaaatcaagtccatcgcctccgagccgacagagaagcacttcttcaacgtgtccgacgaattggccctcgttacaattgtcaagacactgggtgagcggatctttgccctggaggccacagccgaccagtcggccgctagctttgagatggaaatgagtcagacagggttttcagcccactactcccaggactgggtcatgctgggagctgtgggggcctacgactggaatgggactgtggtcatgcagaaggcctcccaaatcataatcccaagaaacaccacgtttaatgtcgagagcacaaaaaaaaatgaacccctcgcgagttacctgggctacacagtgaacagtgcaactgctagctctggagacgtcctttatattgccgggcaacctcgctataatcataccggacaggtgatcatatacagaatggaagatgggaatattaagatactgcagacactctctggggagcagattggcagctacttcgggagcatcctgactaccactgacattgataaggactctaacaccgacattctcctggtcggcgctccgatgtacatgggaacggagaaagaggaacagggtaaggtgtatgtctacgcactgaatcaaaccaggttcgaatatcaaatgagtttagagccgataaaacagacgtgttgcagttctcgacaacacaatagctgtacgactgagaataagaacgaaccttgcggagctcggtttggcacagcaattgccgcagtaaaggaccttaatctggacgggtttaatgacatagtcatcggagccccgttggaagacgaccacggcggcgcagtctatatttatcacggatctggtaagactataagaaaagagtacgcacagcggatcccaagcggtggtgatggaaaaaccctgaagttctttggccaatcaatacacggcgagatggacctgaacggcgacggacttaccgacgtgacaattggaggtctgggcggagcggctctcttctggagccgtgatgtagccgtggtcaaggtgaccatgaacttcgaaccaaacaaggtcaacatccagaaaaaaaattgccacatggaaggaaaggaaactgtctgtattaacgctacagtgtgcttcgatgttaaactgaagagcaaggaggacacaatttacgaggccgatctgcagtacagggtgaccttagattcattacggcagatttcacggtcattctttagcgggacccaagagcgaaaggtccagaggaatatcactgtccggaaaagcgagtgtactaagcacagtttttatatgttggataagcacgattttcaagattccgtgaggataaccttggattttaacctgactgaccctgaaaatggtccagtattggacgactcattgcccaacagcgtccacgagtacatcccctttgcgaaggattgcgggaataaagaaaagtgcatctccgatttatccctgcatgttgccaccactgaaaaggacctccttattgtacgctcccagaacgataaattcaatgtgagtctaaccgtcaagaacacaaaagactccgcctacaatactagaactatcgtgcattactctccaaacctcgtctttagtggcatagaagccatccaaaaagattcttgtgagtccaatcacaacattacgtgtaaagtcggttatccgttcctgaggagaggcgagatggtgacttttaaaatcctgtttcaattcaacacatcttatctgatggagaatgtgaccatctacctgtctgcgaccagcgacagtgaagagcctcctgagacattaagtgataacgtggtgaacatttcaataccagtgaagtacgaagtagggctgcagttctactcatcagccagcgagtaccacatctccattgcagctaacgaaacagtgcccgaagtgatcaactccacagaagatataggaaatgagattaatattttctacttaattcgaaagtctgggtccttcccaatgcctgaactgaaactgagcatctcattccccaacatgacctccaacggttaccccgtgctgtatccaaccggtctgtcctcctcagaaaacgccaattgtagaccgcacatctttgaggatccatttagcatcaattcgggcaagaagatgactaccagcacagaccatctgaagagggggactattctggactgcaacacctgtaagtttgcaacgatcacctgtaacctgactagctcagatatcagtcaggtaaacgtatctctcattctgtggaaacccacgttcataaagtcctacttttcctccctcaatctgacaatccggggtgaactgaggtccgagaacgcgtcgctggtgctgtcctctagcaaccagaagcgcgaacttgccatccagatcagtaaagatggtctccccgggcgggtgcccctgtgggtgatcctcctgtctgcctttgccggattgctcctcctgatgctcttgatattggcgttatggaaaatcgggttctttaaaaggcccctgaagaagaagatggagaagtag

SEQ ID NO: 120754 - DNA, 3567 bp, synthetic construct
  misc_feature 1..3567: note = Description of Artificial Sequence: Synthetic coding sequence
  source 1..3567: mol_type = other DNA
atggacctgcctaggggcctagtggtagcgtgggcactatcactgtggccaggctttacggatactttcaacatggatacaagaaaaccccgcgtgatccccggtagcaggaccgctttcttcgggtataccgtgcaacagcacgacatctcaggaaataagtggcttgttgtcggcgcccccctggaaacaaatgggtaccagaaaacaggcgacgtgtacaagtgtcctgtgattcacggaaattgtaccaagctcaatctggggcgcgtgactctttctaatgtgagcgaaaggaaggataacatgcggctcggactcagtctggcgaccaatcccaaagacaacagttttctagcctgctcccctctatggtcccatgagtgcggaagctcttactacacaacgggtatgtgctctcgagtcaacagcaatttccgatttagcaaaaccgtggcacctgcgctgcaaaggtgccaaacttatatggatattgttatcgtgttggacgggtccaattctatatatccgtgggtcgaagtacagcattttttgatcaacattctaaaaaagttttatataggtcccggccagattcaggtaggagtggtgcaatatggcgaggatgtagttcatgaattccaccttaacgattacaggagcgtgaaggacgtggtggaggcagcatctcacatcgagcaacgcggggggaccgagacgcggaccgcgttcggcatcgagtttgcccgatcagaggcctttcagaaaggcggccgcaagggagctaagaaggtgatgatcgtaataacagatggagagtctcacgactcgccggatctggagaaagtgatccagcagagtgaaagagataacgttacccgctatgctgttgccgtcctcgggtattacaaccgccggggtattaatcccgagacctttcttaatgaaatcaagtatattgccagtgacccagatgataaacattttttcaatgtaacggatgaggctgccttgaaggacattgtggatgcactgggtgatcgcattttttctctggagggcactaataaaaatgagacatccttcggactcgagatgtctcagacggggttttcttcacacgtggtcgaggacggagtgcttcttggggcagtgggcgcctacgattggaacggggctgtgttaaaggagaccagcgctggcaaggtgattcccctcagagaatcatatctgaaggagttcccagaggaactgaagaatcacggagcctatcttggttatacagtaacttcagtagtctcttctaggcaaggccgagtttacgtcgccggcgcccctcgttttaaccacacaggcaaggtcattttatttactatgcacaacaatagatctctaaccattcatcaggcaatgcggggccagcaaatcggatcctattttggttcagagattacttctgtggatattgacggagatggagttaccgacgtcctcttggtcggcgcacctatgtacttcaacgaggggcgagagcgaggtaaggtgtacgtatacgagttgcgacagaacctttttgtgtataatggcacacttaaggactctcactcataccagaacgcccggttcggtagtagcatagccagcgtcagagatctcaaccaggactcctataacgatgtagtcgtgggagccccgctggaggacaatcacgccggcgcaatctacatctttcacgggtttcgcgggtctatcctgaagacaccaaaacaacgcattactgcaagcgaactcgctaccggcctccagtatttcggctgcagcatccacggacaactcgatttgaacgaggatggactgattgaccttgccgtgggcgcattaggcaacgctgttatcttatggtcccgcccggtagttcagatcaacgcatctctgcactttgagccttctaaaatcaacatatttcatagagactgcaagagatccggaagggacgccacctgcctcgccgccttcctttgttttacccccatctttctggcgccacactttcagacaacgacagttggtatccgctataatgccacgatggacgaacggcgttataccccacgggcccacctggatgaaggaggcgacagattcaccaatcgcgcagtcctgctgagctctggacaagaactttgtgagagaatcaacttccatgttttggacactgccgactatgttaagcctgttacgttttcagtggagtatagcttagaggatccagaccacggacctatgctggacgatgggtggccaaccacgctgcgggtgtcggttcccttctggaatggctgcaacgaggatgagcattgcgttccagatcttgtcctggatgctaggtcagacctgcccacagcgatggaatattgccagagggtgctacgcaaacctgcccaggattgctcggcctatacgcttagctttgatacgaccgtctttattatcgaaagtacacgacaaagggtcgcagtggaagccacactcgaaaaccggggtgagaatgcttatagcacagttctgaacatttcccaatctgccaacctacagtttgcctccctcattcagaaagaggacagtgatggttccatcgaatgcgtgaacgaagagagaagacttcaaaaacaggtttgtaatgtctcttaccctttctttagagccaaggcgaaagttgcctttcgccttgatttcgaattctccaagtccatattcctccaccacctggaaatagaactggccgcggggagcgatagtaacgagcgggacagtacgaaagaagataacgttgctccgcttcgatttcaccttaagtatgaggcggatgtgctgttcacacggagctccagcctgtcacattatgaagtaaagcccaatagttccctggaacgttatgatggtattggcccgccttttagttgtatatttaggatacagaaccttggcctctttcctatccatggaatgatgatgaagatcactatccctattgctaccagatctggtaatcgtctactgaagctaagagactttcttaccgacgaggcgaataccagctgcaatatctggggcaactccaccgagtatcggccaacgccagtggaggaggacttaagaagggccccccagctcaatcatagcaactctgatgttgttagcatcaactgcaatatacgtctcgtgcccaatcaggagatcaatttccacctgttggggaacctctggctgcgaagtttgaaggcactgaagtataaatcgatgaagatcatggtcaacgcagctttgcaaagacagtttcactcccccttcatctttcgggaagaagacccttcgcgacagatcgtgttcgaaatcagcaagcaagaggattggcaggttccaatctggatcatagttggatcaaccttgggtggtctgctcctgttagctctgcttgtgctggcgctgtggaagctcggcttcttccggagcgccaggagacgaagagaacctggactggacccaacgccaaaggtcttggaatag

SEQ ID NO: 120755 - DNA, 3570 bp, synthetic construct
  misc_feature 1..3570: note = Description of Artificial Sequence: Synthetic coding sequence
  source 1..3570: mol_type = other DNA
atggatttacccaggggcctggtggtagcctgggcactgtcgctgtggcccggatttacagatacctttaatatggatacccggaaaccacgcgtgattcccgggtctcggactgctttttttggatacacggtccagcaacacgacatctcagggaataaatggcttgttgttggtgcgcccctggaaacgaacggttaccagaagaccggcgacgtctacaaatgcccagtcattcacgggaattgtacgaagctgaatcttggccgggttacgctaagcaacgtcagtgagcggaaggacaatatgcgcctggggttgagtcttgctacaaaccctaaggataattcctttctggcctgtagccccctctggagccatgaatgcggcagttcctactacactaccgggatgtgtagtcgcgtgaactctaactttagatttagtaagaccgtagcacctgctctgcagcggtgtcagacttacatggacattgtaatcgtgctcgacggcagtaactccatttatccctgggtggaggtacagcacttcttgattaacatcttgaagaaattttacataggtccaggccagatccaggtgggtgtagtgcagtacggagaggatgtagtgcatgagttccacctaaacgactatcggtctgttaaagatgtcgtcgaggccgcttctcacatcgaacagaggggaggcaccgaaacccgcaccgcctttggcattgaatttgccaggagtgaagccttccagaaaggcggaaggaagggagcaaaaaaagtcatgatagtgatcactgatggcgagtcacatgactccccagaccttgaaaaggtcatacaacagtccgagcgggacaatgttacacggtatgcggtggcagtcctcggctactataatcgtagaggcatcaatcccgaaacattcctgaacgaaatcaagtacatagcatcagatcccgacgacaaacatttttttaacgtgacagatgaggccgctctgaaagacattgttgacgcgctaggtgataggattttttctttagagggcacaaataagaacgaaacctccttcggactggagatgagtcagaccggcttctcctctcacgtggtggaggatggcgtcttgttaggggccgtcggggcctatgattggaacggagctgtgctgaaggaaacatctgccggcaaagtgatcccccttagggagagctatctgaaagaatttcctgaggagctgaaaaaccatggggcttacctgggatacacagtgacctccgtcgtttcaagtagacagggtcgagtctatgttgctggagctccccgctttaaccacacaggcaaggtgattttgttcacaatgcacaacaaccgatcactgacgatacaccaggcgatgcggggccagcagatcgggagctatttcggctctgaaatcacctccgtagacatcgatggtgacggagttactgacgtgctgctggtgggggcacccatgtacttcaatgaggggagagagcgaggaaaggtttacgtgtacgagcttcgacagaatctgttcgtttataatgggaccctgaaagattctcactcctaccaaaacgccagattcggttcttccatagccagcgtcagggacctcaaccaggattcttacaatgacgtcgtggtgggagcccccctcgaggacaaccatgccggcgctatctacatcttccacggattcagggggagtatcttaaagaccccaaagcagcggataaccgcaagcgagttggctactggactgcagtattttggctgtagcatccacggacagctagacctcaacgaggatggccttatagacctggccgtgggtgcactgggcaacgctgtcatcctttggtcacgcccagtagtccagattaatgcaagtctgcacttcgagccgagcaagatcaatatctttcatcgcgactgtaaaaggtcgggccgggatgcaacatgtcttgcagctttcctatgctttactcccattttcctcgccccccacttccagactacgacagtgggcatccgatacaatgcgacaatggacgagcgcagatacacgccccgcgctcaccttgacgagggcggggatcgattcacaaacagagcagtcctgctttcctccgggcaggaactatgcgaacgcattaattttcatgtacttgataccgctgattatgtgaaaccagtgacattctctgttgaatactctctagaggatcctgaccacggtccaatgctcgacgatgggtggcctacgacactgagagtgtctgtccctttctggaacggatgcaatgaagatgagcactgcgtgcctgacctcgtgctcgacgctcggagtgacctgcccactgctatggagtactgccagcgtgtgttgcgtaaacccgctcaagactgctctgcctatacactttcatttgacacaaccgtgtttatcatcgagagcacccgacagcgtgttgccgtcgaagccacactggaaaataggggagaaaatgcttattccaccgttctcaacattagccagagtgccaacttacagtttgccagcttgatccagaaggaagacagtgatggctcaatcgagtgtgtcaacgaggagcgacggctccagaaacaagtctgcaatgtaagctaccctttttttagggcaaaggcaaaggtggcattccggcttgacttcgagtttagcaaaagtatatttttacaccatttggaaatagagctggccgccgggtctgattccaatgagagagatagtactaaagaagataatgtcgctccgctgcggttccatctgaaatacgaggccgacgtgttgtttacccgctcaagctcattgtcccactatgaagttaagcccaacagcagtctggaaagatacgatggtatcgggcccccctttagctgcatcttccggattcagaacctaggactgtttcccatccatggcatgatgatgaagattaccattccaattgcaactcgaagcgggaacaggctgctcaagctccgtgatttcctgacggatgaagtggccaatacatcgtgcaatatttggggaaatagtactgaatatcggcccacgcctgtggaggaagatctgagaagagcgcctcagttaaaccatagcaactcagatgtggtgtccatcaattgtaacatccgcctcgtccctaatcaggaaattaatttccacctgctggggaacttatggttaagatcgttgaaagcccttaaatataaatctatgaaaatcatggtgaacgctgccctgcagcggcagtttcatagtcctttcatctttcgtgaggaggaccccagccggcagatcgtctttgaaatctccaagcaggaggactggcaagtaccaatttggatcatcgtggggagtaccctaggcggtctgctgttgttggccttgctggtgctcgccctttggaaactgggcttctttcggagcgctcggagaagacgagaacctggcctggatccaacgcctaaggtcctggagtag

SEQ ID NO: 120756 - DNA, 2472 bp, synthetic construct
  misc_feature 1..2472: note = Description of Artificial Sequence: Synthetic coding sequence
  source 1..2472: mol_type = other DNA
atgtcccagacaggattctccagccatgtggtggaggacggagtcttactgggtgcggtgggggcatatgactggaacggcgccgtgttaaaagagacgtctgccggcaaggtcatcccgctgcgcgagtcctatctgaaggaattccctgaggaactcaaaaaccacggtgcctatctgggatacacggttaccagcgtcgtttcgagccggcagggccgcgtgtacgtggcgggcgcaccgcgctttaaccacactggcaaagtgatcctttttactatgcacaacaacagatccctgacaattcaccaggcaatgagaggtcagcagataggcagctacttcgggtctgagatcacttctgtggatatcgatggagatggtgtgaccgacgtcctactcgtcggagccccaatgtactttaatgagggccgagagcgtggtaaggtttatgtctacgagctccgacagaatctttttgtgtataacggaacactgaaagatagccatagttatcagaatgcacgatttggctcaagtatcgccagcgtccgcgacctgaaccaggacagctacaatgatgtcgtggttggcgcgccactggaggacaaccacgctggcgccatttacatcttccatggatttagaggatccatcctcaaaacccctaagcaaaggatcactgcttctgagttagccaccggcttgcagtacttcggatgctctatccatgggcaattggatctgaacgaggatggcctgatcgacctcgcagttggggcactaggtaacgccgtcattttgtggagtcgtcccgtggtgcagattaatgcttcattgcactttgagccatcgaaaatcaacatcttccacagagattgcaaacggagcgggcgagatgctacgtgtctggctgcctttctctgcttcactcctatcttcctggccccccactttcagactacgacagtgggcattagatacaatgctactatggatgaacgacgatacactccgagggcacacctagatgaaggcggcgatagatttaccaatcgagctgtcttgctttctagcggtcaggagctctgcgaacggatcaacttccacgtccttgacactgcagattacgtgaagcccgtgacattttctgtggagtactcactcgaggaccctgaccacggacccatgcttgacgacggatggcctaccaccctgcgggtcagcgtccctttctggaacggatgtaacgaagatgagcactgtgttcccgatctggttttggacgctcgtagcgatctacctaccgccatggagtactgtcagagagtgttacggaagccagcccaggactgtagtgcatataccctgagctttgataccacagtgtttattattgaaagtacaagacaacgagtcgcagtggaggccactctggaaaatagaggagagaatgcatactctaccgtactcaatatcagccaatccgccaacttgcagttcgcctctctgatccaaaaggaagatagtgacggctctatcgagtgcgtcaacgaagaaagacgtctccaaaaacaagtgtgcaatgtatcctatccctttttcagggcaaaagccaaagtggcgtttaggttagacttcgaattctccaagtcaatctttctgcatcatctagaaatcgaattggccgccggatccgatagcaacgagagggactctacaaaggaagataatgtggccccactgcgatttcatctgaagtacgaggccgatgttctgttcaccaggagcagctctctatcccactatgaagtgaaacctaattccagcttggagaggtatgatggtatcggccccccattctcttgcatctttcgcatccaaaatctgggcctgttccccatccacggaatgatgatgaagataaccatcccgatcgcaacaaggtcgggaaatcggctgctgaaactccgtgactttctcaccgatgaggcaaatacatcttgcaacatctggggcaattccactgaatacaggcccacaccagttgaagaggatctacggcgggcccctcagctgaatcacagtaattcagatgtcgttagcataaattgcaatattcgccttgtgcctaaccaggagatcaacttccatctgctgggaaatctgtggctacggtctcttaaggcactgaagtacaagtctatgaaaatcatggtgaatgcggccctccaacgtcagttccattctcccttcatatttcgagaggaagacccctctcggcagattgtctttgagatttctaaacaggaagattggcaggtccctatatggatcatagtaggatcaacgctgggtggactgcttctgctggccctgctggttctggccctgtggaagctgggctttttcaggtccgctaggaggcgtcgcgagcccggcctggaccctacccctaaagtactggaatag

SEQ ID NO: 120757 - DNA, 1953 bp, synthetic construct
  misc_feature 1..1953: note = Description of Artificial Sequence: Synthetic coding sequence
  source 1..1953: mol_type = other DNA
atggatctccctagaggtctggtggttgcctgggctctgagtctctggccaggattcacagatacattcaatatggataccaggaagccgagggtgatcccagggtcccggaccgcctttttcggttatacggtgcagcagcacgatatctctggcaataaatggttggtggtgggcgctccgctggaaactaatggttaccagaaaactggtgatgtctacaaatgcccagtcatccacggaaattgcaccaagctcaatctgggaagggtcaccttgtccaacgtctccgagagaaaggacaatatgaggctggggctgagcctcgccacaaaccctaaggataactcttttctagcctgcagcccactgtggagccatgagtgcggctcatcttactataccacagggatgtgcagtcgtgtcaattcaaatttccggttctctaagaccgttgccccggcactccagaggtgccaaacctacatggatatcgtcatcgtcctagacgggtctaatagtatttatccatgggttgaagtgcagcactttttgatcaatatcttaaaaaagttctacattggtcctgggcagatacaggtaggagtagtgcagtatggagaggatgtggtgcacgagtttcatctaaatgattaccggagcgtgaaggacgtggtggaggcagcctcccacatcgagcagcgtggtgggacagagacccgcacggccttcggtatcgagtttgctcgctccgaggctttccagaagggtggacggaaaggcgcaaagaaggtcatgatagtgataaccgatggcgaaagtcacgattcaccagatcttgagaaggtcattcagcagtccgaaagggacaatgtgacccgctacgcggttgccgttttgggttattacaatcgacgaggtattaatcctgaaaccttcctcaacgagatcaaatacatagcatctgatcctgacgataaacatttcttcaatgtgaccgacgaggcagcactaaaagacatcgtggacgccctgggcgatcgtattttcagcctggagggaacaaacaagaatgagaccagctttggcctcgagatgtcccagacgggcttcagtagccatgtagtcgaagatggagtgctgctcggggccgtcggagcttatgattggaacggagcagtgcttaaggagacaagcgcgggtaaagtcataccattgcgcgagagctacctgaaggaattcccggaagaactaaagaaccacggtgcatacctggggtacactgtcacaagcgtggttagcagtaggcaaggccgagtgtacgtggccggggcaccacgctttaatcacacaggcaaggtcattctcttcacaatgcataacaataggagcctgactatacaccaggcaatgcgcgggcaacagatcggttcctattttggctctgagataacgtctgtagatatcgacggcgatggtgtaacagatgttctcttggtgggcgctcccatgtactttaatgaaggaagggaacgaggcaaggtctacgtgtacgagttacgacagaatctctttgtgtacaacgggactcttaaagactcacactcctatcagaacgctaggttcgggtcctcaatcgcatcagtgagagatctgaatcaagactcttacaacgacgtagtagtgggcgcaccgctggaggacaatcacgccggcgctatctatatcttccacggttttcgcggtagcattctgaaaacaccaaagcagcggatcacagcgtccgagctggccacagggttgcaatattttggctgttccattcacggccaactggatctgaatgaggacggcttaatcgacctggcagtgggtgcccttggcaatgcagttattctctggaccccccccccaaaatgttggtccgaggcccccgaggagacattgagttag

SEQ ID NO: 120758 - DNA, 3546 bp, synthetic construct
  misc_feature 1..3546: note = Description of Artificial Sequence: Synthetic coding sequence
  source 1..3546: mol_type = other DNA
atgggcccagagcgaaccggtgctgccccactgcccctgttgctggtgcttgccctgtcccagggcatactgaactgttgtttggcttataatgtgggactgcccgaggccaagatcttttctgggccctcctccgagcagtttggatacgcggtccaacagttcataaaccctaagggaaattggttactggtcggaagcccgtggagtgggttcccggagaaccggatgggcgatgtttacaaatgccctgttgatctgtcgaccgcaacctgtgaaaagctcaatttgcagacatctaccagtattcctaatgttaccgagatgaagactaatatgagtctcggcctgattcttaccaggaatatgggaaccggcggttttctcacgtgtggccccctctgggcacagcagtgtggtaaccagtattatacaaccggagtctgtagcgacatctcccccgacttccaactgagcgctagcttttcaccagctacccaaccctgcccctctctcatcgatgtggtggttgtctgtgatgagtccaactcaatctacccatgggatgccgtaaagaatttccttgagaagttcgtacaggggttggatatcgggccaaccaagacccaggtgggtttaatccagtacgccaacaacccccgggtggtttttaatctaaacacatacaaaacaaaagaggagatgatagtagccaccagtcagacgagccaatatggcggagatttgaccaacaccttcggcgccattcagtacgcccgtaagtatgcctactccgcggctagcggcgggaggcggtccgctacaaaggtgatggtggtagttacggatggagagagccatgatggatcaatgctcaaagctgtaatagatcagtgcaaccatgacaacatcctcagattcggtattgcagtcctcggctatctgaaccggaacgcgctcgacacaaagaacctgatcaaagaaataaaagcaatcgccagtatccctaccgaacgctatttctttaacgtgtcagacgaagccgccctccttgaaaaggccggcacactgggcgagcagattttctctattgaggggaccgtacaggggggtgataactttcagatggaaatgtcccaggttgggtttagtgccgactactcaagccagaatgacatcctgatgcttggggccgtaggagcgttcgggtggagtggcaccatcgtgcagaagacttctcatggacatcttattttccccaagcaggcttttgatcagatcctacaggataggaatcactccagttacttaggctacagtgttgcggccatctcaacaggggagagcacacatttcgtggccggtgcaccacgcgccaattatacgggtcagatcgtgttatatagcgtaaatgagaacggcaacataaccgtgatccaggcccaccggggggaccagatcggctcctacttcggttccgtcctatgttcggtggatgtcgacaaagatactattaccgacgtgctgctggtaggcgcccccatgtatatgtcagacctgaaaaaagaagaaggtcgtgtgtacctatttactattaaagaagggatcctcggccagcatcagttcctggaggggcctgaaggtatcgaaaacacccgctttggatcagccatcgcggctctgagcgatatcaatatggacggcttcaacgacgttatcgtcgggagccctttagaaaatcagaacagcggggctgtctatatctacaacgggcaccagggtactatcaggaccaaatactctcaaaagattttgggttctgacggagcctttagatctcatctgcaatatttcggaaggtctctggacggatacggcgacttgaacggggatagcatcaccgatgtttctataggagcattcggtcaagttgtgcagctctggtctcagtccatcgcagacgtggccatcgaggcctcttttacacctgaaaagataaccctggtgaacaaaaacgcccagattatcctgaagctttgcttcagcgctaaattccggcctacgaaacagaataaccaggtggcgatcgtttacaatattaccctggacgccgatggcttttcatcacgcgtcacatccagagggctgtttaaagaaaacaatgagaggtgtttacagaagaacatggtcgtgaatcaggcgcagtcctgcccagaacatataatctacatacaggaaccaagtgatgtcgtgaactctttggacctgcgggtggatatcagcctcgagaatcctggaaccagccccgcgctggaagcatattctgagacagcaaaggttttttcaatccccttccataaggattgtggagaggacgggttatgcatctcagacctggtcttagacgtcagacagattcccgcagcgcaagagcagcccttcattgtgtctaatcaaaacaaacgcctgacattcagcgtgacactcaagaacaaacgtgagtctgcctacaatactgggattgtggtcgacttctccgaaaacctcttctttgctagctttagtctgcccgtggatggtacagaggtaacatgccaagtcgccgcttcacaaaaaagtgtggcctgcgacgtcggatacccagcattgaagcgagaacagcaggtgacgtttaccatcaactttgacttcaacctgcagaatctgcagaaccaggccagtcttagcttccaggccctctcggagtcccaggaggaaaataaggccgacaaccttgtgaatcttaaaatccccctgctttatgatgcagaaattcatctgaccagatcaaccaatattaacttctacgagatctcttctgatggaaacgtgccaagcattgtccactccttcgaagacgtcgggcccaaatttattttctccctcaaagtgaccacaggctctgtccctgtgagcatggccactgtgataatccacatcccccagtacaccaaagaaaagaatccactcatgtacctgacgggagtgcagactgacaaagcaggggacatttcctgtaacgcagatatcaaccccttgaagattgggcagacaagcagttcagttagcttcaagtccgaaaattttagacacacaaaagagctgaattgtcgcacagctagttgctccaatgtgacatgttggctcaaggacgtgcacatgaagggcgagtactttgttaacgtcactactaggatttggaacggcactttcgccagttcaacctttcaaacagtgcaattaacagcggccgctgagatcaacacctataacccagagatctacgtcatcgaggacaacactgtcacaatccccctgatgatcatgaaaccagatgaaaaggccgaagtgcctacaggcgtcattattggtagtatcattgccggtattctgctccttctggccctggttgcgatcctctggaagctggggttctttaagaggaaatatgagaaaatgacaaagaaccccgatgagatcgacgaaacaactgagctttcatcctag

SEQ ID NO: 120759 - DNA, 2448 bp, synthetic construct
  misc_feature 1..2448: note = Description of Artificial Sequence: Synthetic coding sequence
  source 1..2448: mol_type = other DNA
atgggacccgagcggaccggagcggctccgctacctctccttctggtgctcgctctgagccagggcatcctgaactgttgtctggcctacaatgtcggactacccgaagccaagatcttctctggcccttccagtgaacagtttggatatgcagtccagcagttcatcaatcccaaggggaattggctgctggtgggaagtccctggagcggatttcccgagaaccgtatgggcgacgtgtataaatgcccagtggatctgtctaccgccacatgtgagaaattgaatctgcaaacgtccacaagtatcccaaacgtcactgaaatgaagacaaacatgtcgctaggactaatcctgacaagaaatatggggaccggcgggtttctgacatgcggaccgctatgggctcagcagtgcggcaaccagtattacacaaccggtgtgtgcagtgatatatccccagattttcagctatcagccagtttctcccccgcaacacagccctgcccttctctcatcgacgtagtggtcgtgtgtgatgaaagtaacagtatctatccctgggacgctgtcaaaaatttcctggagaagttcgtacagggtcttgacatcgggccaaccaaaacccaagtcgggttgattcagtatgctaataaccccagggtcgtgtttaatctaaatacctacaagactaaggaagagatgattgtcgctaccagccagacgtcacaatacggcggcgatttgactaatactttcggtgctatccagtacgccaggaagtatgcttattctgctgcttcaggtggtcgcaggagtgccaccaaggtcatggtggtagtgactgatggtgagagccacgatggaagcatgctgaaggcagtaattgatcaatgtaatcatgacaacatcctgcggtttgggatagccgtcctcggctatcttaatagaaacgccctcgacaccaagaacctgataaaggagattaaagctatcgcttctatccccacagaacggtatttctttaatgtgtcagacgaggccgctctgctcgagaaggcagggaccttgggcgaacagatattttctatagagggaacggtgcaaggaggcgacaacttccaaatggagatgtcccaggtcggctttagcgccgactacagcagccagaacgacatcctcatgctcggggctgtgggggctttcggctggtcgggcaccatagtgcagaaaacctcccacgggcatttaatcttccctaaacaggcctttgaccaaatcctccaggatcggaaccactcaagctaccttggatactcagtcgctgcaattagcacaggggagtcaactcactttgtggccggcgcaccccgcgctaattacactggtcagatagttctgtactccgttaatgaaaatgggaacataactgtgatccaggctcatcgcggtgatcaaattggctcatattttggaagcgtcctttgcagcgtcgatgtggacaaggacacgattacagacgtgttgctggttggagctcccatgtatatgagcgatcttaaaaaggaggaaggacgggtgtatctgtttaccatcaaagaagggatcttagggcaacaccaatttcttgagggccctgaaggcatagaaaacactagatttggctcagcgattgccgccctgagcgacatcaacatggacggatttaacgatgtgatcgttggcagtcccctggagaatcaaaattctggagcggtgtatatatataacggtcaccagggtaccatcaggactaaatattcccagaagatcctgggttcagatggggcgttcaggtcgcatcttcagtatttcgggcgtagcctggacggatacggcgacctgaacggtgactctattactgacgtgtcgataggcgcttttggacaggtcgtgcaactgtggagtcaatccattgctgatgttgcaattgaggcgtcctttacgcctgaaaaaatcaccctggtgaacaaaaacgctcagatcatactcaagctgtgtttctccgctaaatttcgtcctaccaaacagaataatcaggtggcaatcgtctataacattactctggatgcggatggtttctcctctcgggttacgtcccggggattatttaaagaaaacaatgaacggtgcctgcaaaagaacatggtggtgaatcaggcccagtcttgtccggagcacattatctatatacaggagccgtctgatgtggtcaattctttagacctgcgcgtggacatcagtcttgagaaccctggtacatcccctgccctggaagcgtatagcgagacagccaaggtgttttccatccccttccataaggattgtggtgaagatgggttgtgtatctcagacctggtgctagatgtcaggcagattcctgccgcacaactcatgggacagaagtag

SEQ ID NO: 120760 - DNA, 1926 bp, synthetic construct
  misc_feature 1..1926: note = Description of Artificial Sequence: Synthetic coding sequence
  source 1..1926: mol_type = other DNA
atggggcctgagagaactggcgccgcacccctgcccctcctcctggtgctcgcgctgtcccagggcatcctgaactgctgtttggcctataatgtaggcctgccggaagctaagatcttcagtggacccagcagcgagcaattcggatatgcagtgcagcagtttataaaccccaagggcaactggctcctggtcgggtcgccttggtcaggtttcccagaaaatagaatgggggatgtgtataagtgtcctgtggacctgagtactgccacctgcgagaagctcaacctgcagaccagcacctctatccctaatgtaaccgaaatgaagaccaacatgagcctcggactgattctcacccggaatatgggaacaggaggcttcctgacttgcggccccctgtgggcccagcagtgtggtaatcagtactatacgaccggcgtgtgctccgatatttcacctgactttcagctcagcgcatcattttcacctgctacacagccatgtccctctctgatcgacgtagtggttgtgtgtgatgaatccaattctatttatccgtgggacgccgtgaaaaacttcctcgagaaattcgtgcagggcctggacattggacccacaaaaacacaggtgggtctgatccagtatgccaacaatcctagggttgtctttaacctgaacacctacaaaactaaggaggaaatgattgttgcgacatcccagactagtcagtacgggggcgacctgactaacacattcggagccattcagtacgccagaaagtacgcatactcagctgcaagtgggggacggcgcagtgccaccaaagtgatggtggtggtgaccgatggagagtctcacgatggcagtatgcttaaggccgtaatcgatcaatgcaaccacgacaacatcctcagatttgggatcgctgtcctgggctacctcaataggaacgccctggacacaaaaaatctcattaaggaaatcaaagccatcgcgtccatccctaccgaaagatatttcttcaatgtatcagacgaggcagccctgttggaaaaagccggtaccctaggtgagcagatcttctccattgagggaacagtccaaggaggagataacttccagatggaaatgagtcaggtgggattctccgcagactactctagtcaaaacgatattttaatgctaggagccgtcggggcattcggctggtctggcacaattgttcagaagacaagccacggtcatctcatttttccaaagcaggcatttgaccagattctgcaggaccgcaatcatagctcatatttaggctacagcgtggctgccatctcaaccggagagagcactcacttcgtggctggggcccccagagcaaactataccggccaaatcgtgctctattcagtgaacgagaatgggaacatcaccgttattcaggcacacagaggtgatcagatcggctcttactttggctccgttctttgcagcgtcgacgtagataaagacactattacggatgtgctacttgtgggggctccaatgtacatgagtgacctgaagaaagaggaaggaagagtctacctttttacaataaaagagggcattctaggccaacaccagtttctcgagggcccagagggcattgagaatacacgattcggatccgctattgccgctctgagcgatatcaatatggatgggttcaatgacgtgattgtgggatctcccctagagaaccagaactcgggcgcggtgtacatttacaacgggcaccaggggacaatacggaccaagtactctcagttgctgtgcacaataataagttgtcagacctgctcttttcgaaaatcatgggacccgatggaacccctgggagccatttcatccacccttggcgggccgtggatggctatggagatctag

SEQ ID NO: 120761 - DNA, 2829 bp, synthetic construct
  misc_feature 1..2829: note = Description of Artificial Sequence: Synthetic coding sequence
  source 1..2829: mol_type = other DNA
atgggacctgaaaggactggcgctgcccctctcccccttctacttgtgttagccctgagtcagggaattctgaattgttgcttggcctataacgtgggcctacctgaggccaagatattctcggggccaagctccgaacaattcgggtatgcagttcagcagttcattaatcctaaaggaaactggctcctggttggctccccgtggtctgggttccctgagaaccgaatgggcgacgtgtataagtgtcctgtggacctgtcaactgctacctgtgagaagctaaatctgcagacgtccacctccattcccaacgtcacagagatgaagactaacatgagcttgggcctaattctcactaggaatatgggaactggaggattcctgacttgcggacccctctgggcacaacagtgcggtaaccagtactacactaccggggtctgttctgacatttctcccgactttcaactatctgccagcttctcaccggctacacagccttgcccaagcttgattgatgtggtggtggtttgtgacgaatccaatagtatttatccatgggacgcagtcaaaaactttctggagaaattcgtgcagggtctagacattgggcccaccaagacacaggtcggactgatccagtacgcaaataatccaagagtagtctttaatttgaatacctacaagactaaagaagagatgatagtggctacatctcagacctcacagtatggcggtgatctgaccaacacgtttggcgcaatccagtacgcacggaagtatgcatatagcgccgccagcggagggcggcggagtgccacgaaggtcatggttgttgtgaccgacggggagtcccacgacgggtctatgctaaaagctgtaatcgatcaatgtaaccatgataacatcctgaggttcggtatcgcagttttgggctatttgaatcgcaacgccctggatacaaagaacttgattaaagagatcaaagcaatcgcgtccatccccacagagaggtatttttttaatgtgagcgatgaagccgcattgttggaaaaagccggaacacttggggaacaaattttctccatcgaggggaccgttcagggcggcgataattttcaaatggaaatgtcccaagttgggtttagtgcagattacagttcccagaacgatattctcatgctgggagctgtgggagcgtttggctggagtggcacaattgtccaaaagacttcacacggccatctgatcttccctaagcaggcctttgaccagatcttacaggacagaaaccacagttcgtacctcggctatagtgtggccgccatctctacaggcgaaagtacacactttgtagccggagctccgagagctaattacaccgggcagatcgtgctttactctgtcaacgaaaatggaaacattacggtcattcaagcccacagaggggatcagataggcagttactttggaagcgtgctgtgcagcgttgatgtcgataaggacactatcacagacgtgttgctggtgggcgccccaatgtatatgagcgaccttaagaaagaagagggcagagtttacttgtttaccattaaagaagggattctgggtcagcatcaattcctggaaggaccggaaggtatcgaaaacacgagattcggatcggctatcgccgctctctctgacattaacatggacggctttaacgacgtgatcgtcggctcccccctggagaatcagaatagtggagccgtctatatctataacggccatcaggggaccatccgaacaaaatactctcaaaaaatcctgggatccgatggtgccttcaggagtcatctgcagtatttcgggcgcagtctggacggatacggcgacttaaacggtgattctatcacagatgtgtccattggcgcttttggacaggtagttcagctgtggtcacagtcaatcgctgatgtagccatcgaggccagcttcacgcctgaaaagatcacgctcgtcaacaaaaatgctcaaatcattttgaagctgtgtttcagcgccaaatttcggcctaccaaacagaacaaccaggttgctatcgtttataacattactttagatgccgacggattcagcagcagagttacctcccgaggtctcttcaaggaaaataatgagcggtgcttgcaaaagaatatggtggtgaatcaggcccagtcatgtcccgaacacataatttatatccaggaaccaagtgacgtggtgaattcacttgatctgagggtcgatatcagcttagagaacccaggaacctcacccgcgttggaggcttatagcgagactgcaaaggtgttttctattccattccataaagactgcggcgaagacggcctttgcatttctgatctcgtgctggatgtaagacagattccagctgcgcaggagcagcccttcatcgtgtcgaaccaaaacaaaaggctgactttttcagttacgctgaaaaataagcgggagtccgcatacaatacagggatcgtcgtggacttctccgagaaccttttcttcgctagttttagcctcccagttgacggcaccgaagtgacatgtcaggtcgctgccagccagaagtccgtggcctgcgatgtgggctacccagcccttaagagagagcagcaggtgacatttaccattaactttgatttcaatctgcagaacttgcaaaatcaggcaagtctgagttttcaagccctgagcgaaagccaggaagaaaacaaggcagacaatctggtgaatctcaagatcccccttctgtacgatgcagaaattcacctaactaggtag

SEQ ID NO: 120762 - DNA, 3120 bp, synthetic construct
  misc_feature 1..3120: note = Description of Artificial Sequence: Synthetic coding sequence
  source 1..3120: mol_type = other DNA
atggctagagcactgtgcccactgcaggcgttgtggctcctagagtgggttctgctcctgttaggcccatgcgccgcccctcctgcgtgggccttgaacctcgaccccgtccaactgaccttctatgccgggccaaatgggtcacagttcggtttcagcctagacttccataaagacagtcacgggcgtgtggccatcgtggtgggagcgcctcgaaccctgggcccgtcccaggaggaaacaggaggagtgtttctatgtccttggcgcgctgagggcggtcaatgtcctagtcttctctttgacctaagggatgagacaaggaacgtggggagtcaaaccctacagaccttcaaggcaaggcaggggcttggcgcctctgtcgtttcttggtctgacgtgatcgtggcttgtgcgccctggcagcactggaatgtgctggaaaaaacagaagaagctgagaaaacacccgtcggatcctgcttcctcgcacagcccgaaagcggcaggagagctgaatatagtccatgcagaggtaacactctgagccgcatttacgtcgagaacgacttcagctgggacaagcgatactgcgaggctggtttctcttccgtcgtcacgcaggctggtgaactagtgcttggtgcccctgggggctactacttcctgggccttctggctcaggcccccgtagcagacatcttcagctcataccgcccgggaattctgctttggcatgtcagtagccagagcttgagtttcgatagttccaatcctgagtattttgacggatactgggggtatagcgtggcagttggagaatttgacggcgatctgaatactaccgaatatgtcgtcggagcgcccacctggtcctggactctgggagcagttgaaatcctcgatagctattaccagcggttacaccgattgcggggggagcagatggcaagttacttcggacattcagtcgcagtgacagatgtgaacggcgacgggagacacgacttactggtcggagcccccttgtacatggagtcacgagcagaccgcaaactggccgaagtaggacgggtatacctattcctccagccgagaggtccgcacgcgcttggtgccccctcattgttgctaacaggtacgcaactgtacggccgtttcggtagcgcaatagcccctcttggtgacttggaccgggacggttacaatgatatcgccgttgcagctccctacggcggaccgtccggacgcggacaggtacttgttttcctggggcagtcagaggggctgcgctctagaccatctcaggtgctcgacagccctttccccacgggcagcgcattcggcttctccctcagaggcgccgtggacattgacgacaacgggtaccctgatctgatcgtgggagcttacggcgccaatcaagtcgccgtctaccgggctcagcctgtcgttaaagcatctgtccagctcctggtacaggatagtctgaaccccgccgtgaagtcatgcgtgctccctcagactaagaccccagtgtcctgttttaacatacagatgtgcgtgggtgccacgggccataatatcccacaaaaactgtctttaaacgctgaacttcagcttgaccgtcagaaacctcgccagggccggagagtgcttctgttgggcagccagcaggccggcactaccctcaacctcgatctgggcggcaaacactcccccatttgccataccaccatggcattcctgagagacgaggccgatttccgtgacaaactgagtcccatcgtgctcagcctaaatgtgtccctcccacctacagaggcgggcatggcgccagccgtggttctccacggagacactcatgtccaggagcagacgaggatcgtgttagactgtggagaagacgatgtgtgtgtcccccaacttcaattgacagccagcgtgactgggtccccacttcttgtcggtgccgataacgtactcgaactgcagatggacgccgccaatgagggcgaaggcgcgtacgaggctgaactcgccgtccacctgccccagggggctcactacatgcgtgccctgagcaatgttgagggctttgagagactaatctgtaaccagaaaaaggaaaatgaaacgagagtggtgctgtgcgagctcgggaatcctatgaaaaaaaatgctcagatcggcatcgccatgctggtttctgtgggcaacttggaagaagcgggtgagagcgtgtcgtttcagctgcagattaggagcaagaacagccaaaatcctaattccaagatcgtcctgctggatgtgccggtcagggcggaggcccaggtggaactgcggggcaattcattccctgcaagcctggtcgtggctgctgaggagggcgagagagaacaaaacagcctagattcgtgggggccaaaggtcgagcacacctacgaactgcacaataatgggcccggcactgtcaacggattgcacttgagcatacatctgcccggacagagccagcctagtgatctgctgtatattttggacatccaaccccagggcggtctgcaatgttttccacagccccccgtgaatccactgaaagtggactggggtttgcccattccctccccgtcccctattcaccccgctcatcacaagagggaccgcaggcaaatctttttaccagaaccagaacaaccctctcgactgcaggatcccgttctggtgtcttgcgatagcgctccctgcacagtagtgcagtgtgatctgcaggagatggcgcgcgggcaaagagccatggttactgtcttagcatttctctggctgcccagtctgtatcagagacccctggatcagtttgttctgcagagccatgcttggttcaatgtatcttctctgccctatgcagtgccccctctctctctgccacggggggaggcgcaggtttggacacagctcctccgcgcactggaagagcgtgctatccccatctggtgggtattggttggggtgctcggggggctgctgctactgaccatcctcgtcttggccatgtggaaagttgggttctttaagaggaaccggcccccattagaggaagacgacgaggaaggcgaatag

SEQ ID NO: 120763 - DNA, 3018 bp, synthetic construct
  misc_feature 1..3018: note = Description of Artificial Sequence: Synthetic coding sequence
  source 1..3018: mol_type = other DNA
atggctcgggccttgtgtcctcttcaggcgctttggttgctcgagtgggttctattattgctcggcccctgcgcagcgccacccgcttgggctttgaatctggatcccgtgcagctgacattttacgccggacctaatggctcacaattcggatttagtcttgactttcacaaagattcacatggtagggttgctatcgttgtcggggcccctagaaccctggggccttctcaggaagagacgggtggcgtgtttctttgtccctggcgggccgagggcggtcagtgtccctctctcctctttgacctgcgggacgagacccgtaatgtgggatcccagacccttcagacttttaaggcaagacagggcctgggggcctccgtcgtctcatggagcgacgtgattgtggcctgtgccccatggcagcactggaacgtgttagaaaagaccgaggaggccgagaagactcctgtggggtcatgctttctagctcaacccgagagcggacgtagggcagagtatagtccctgtcgtggcaataccttatctaggatctacgttgaaaacgatttctcatgggacaagcgttattgtgaggcaggttttagctccgtggtgacgcaggcaggcgagctcgtcctgggagcccccggaggctattatttcctcgggctgctagctcaagccccagtggccgatatcttcagttcatataggcctgggattctattatggcacgttagctcacagtctctttcatttgattcatccaatcctgagtacttcgacggatattgggggtactcggtggccgttggagagtttgacggggacctcaataccactgaatacgtcgtgggcgccccaacttggagctggactctaggggctgtggagatactggatagttactatcagagactccaccgtttgcgcggggaacaaatggcttcatacttcggtcacagtgtcgccgtcacagacgtcaatggtgacggacgccacgatctacttgtgggggcacctctatacatggaatcacgagctgatagaaagcttgcagaagtgggcagggtttaccttttccttcagcctagagggcctcacgccctaggtgctccctcccttctgctgactggtacccagctgtacggccgtttcgggtctgccatagccccattgggtgacttagaccgcgatggctataacgatattgcagtggccgcaccatatggtggtccctctgggcgtggccaagttttagtctttctgggccagtccgagggtttgaggtcaagacctagccaggtgctagattctccattcccaaccggaagtgcctttggatttagcctgcgcggggccgttgacatcgatgataacggctaccctgacctgatagtcggggcttacggtgccaatcaggtcgcggtctatcgagcccagcctgtggtcaaggcgtctgtgcagctgcttgtccaggactcactaaaccctgctgtgaagagctgtgtcctcccccaaacaaagacacccgtcagttgctttaatatccagatgtgtgtgggcgctactggccataacatcccccagaagttgtctctgaatgctgaactgcagcttgacaggcagaagcctcgccagggtcgacgagtactcctgctgggcagccagcaggcgggtactaccctgaatctggatttgggcggcaagcattcccccatttgccatactaccatggcttttttgcgagatgaagcggacttcagagataaactgagtccaattgtgctgtccctcaatgtgagtttacctcctaccgaggctggaatggccccggctgtggtattgcacggcgacacacatgtacaggagcagacacggatcgtcctggactgtggggaagacgatgtgtgcgtgcctcaactgcagctcaccgctagcgtcaccggctcacccctgctcgtcggggcggacaacgtgctggagctccagatggatgctgccaacgagggggagggcgcatacgaagccgaactggccgtgcacttgccacagggcgctcactacatgcgcgcgctttccaacgtggaaggatttgagcgtttaatatgcaaccagaagaaggagaatgagaccagggtcgtcctgtgcgagctgggaaacccaatgaagaaaaatgcccagatcgggatcgcaatgctcgtgtcagtgggcaacctcgaagaagccggcgaaagtgtgtccttccagctacagattcgctcaaaaaattcccagaacccaaatagtaaaattgtcctgctcgatgtgcctgtcagagccgaggcacaggtggagctcagaggcaattcattccccgccagcttggtggtagctgccgaagagggcgagcgggagcagaacagtctggactcctggggacccaaagtggaacatacctacgagctacacaacaatggtccgggcactgtgaatggattgcatctctcgatccacctaccgggtcagtcgcagccgagcgatcttctatatatccttgacattcagccccagggcgggcttcagtgctttccgcagccacctgtgaaccccttaaaggtggattggggcctgcccatcccatccccatcacccattcatcccgcgcaccataaaagagataggagacagattttcctgcccgaacctgagcaaccatctagactccaggacccagtgttggtttcttgtgacagcgccccctgcactgtcgttcagtgtgatttacaggaaatggctcggggccagagggccatggtaaccgtcttggcattcttatggctgccaagcttgtaccaggtttggactcagctgttaagggcactggaagaaagggccatacctatatggtgggtccttgttggagtgctgggcggactgctgctcctcaccattctagtgcttgcaatgtggaaagtgggtttcttcaaaaggaatcgaccacctctcgaggaagacgatgaagagggcgaatag

SEQ ID NO: 120764 - DNA, 660 bp, synthetic construct
  misc_feature 1..660: note = Description of Artificial Sequence: Synthetic coding sequence
  source 1..660: mol_type = other DNA
atggcatcttacttcggccacagcgtagctgtgacagacgtaaatggcgatgggaggcacgaccttttagtcggcgccccactttacatggaatctagagctgacagaaagctcgccgaggtcggaagggtttatctgttcctccagcccaggggacctcacgctctcggcgcccctagccttttactaactgggacccaactgtatggaaggttcgggagcgccattgccccccttggagacctcgacagggatggctataacgacatagctgtggccgccccatacgggggcccatcaggtcgcggacaagtccttgtgttccttggtcagtcggagggtctcaggtctagaccatcccaggtgctggacagtcctttcccgactggaagcgcttttggattcagcctgaggggagccgtggacattgatgataacggatatccgggcgccctggactgcctgcaacttgagatgcccaagaagggcccttggacttttgctggctccgccaagcggcacggtcaaggtctcatgccagggctggtctcgcactacggcctgcctgaggggctcggggagacttcttctggcggtggtggtgtgggcaatccttgggaagatgaaatgaggatcccctgcccgaaccggcaattctag

SEQ ID NO: 120765 - DNA, 3201 bp, synthetic construct
  misc_feature 1..3201: note = Description of Artificial Sequence: Synthetic coding sequence
  source 1..3201: mol_type = other DNA
atgggtcccgggcccagcagagcaccacgtgcccctaggctcatgctctgtgctctggctctgatggtagccgcaggtggttgtgtggtgtcagcgtttaacctcgacacaagattcctcgtggtcaaggaggcgggaaatccgggaagcctgtttggctattcagttgctctgcatcgccaaaccgagagacagcagaggtacctgctgctggccggcgcccctagggaattggcagtcccagatgggtacaccaaccgaaccggcgccgtatatctctgtcccctcaccgcgcataaggatgactgtgaacgcatgaacataactgtcaagaacgatcccggccaccacatcattgaggacatgtggctgggtgtcactgttgcttctcaggggccggccggccgggtgctggtgtgtgcccatcgctatacacaggtcctttggtcagggtcagaagaccagcgccgcatggtaggcaaatgttatgtgcgtggcaatgacttagaactggacagttctgacgactggcagacatatcacaacgagatgtgtaactcaaacaccgactatctggaaacaggaatgtgtcagctaggtacctcgggaggttttactcagaatacagtttactttggagcacccggcgcttataattggaaaggtaattcatatatgattcagaggaaggagtgggacctgtctgagtactcctataaagatccagaagatcagggcaatctttatattggatatacaatgcaggtcggttccttcattctccaccctaagaatattacaattgttaccggggcacctaggcaccgacatatgggggccgtgttcctgctctcgcaggaagcaggcggggatctgaggcggaggcaggttctggagggctcccaggtcggagcctacttcggaagcgccatcgccctcgctgacctgaataatgacggctggcaggatctcctcgtgggtgcaccttactactttgagaggaaagaggaggtcgggggcgccatctatgttttcatgaaccaagctggcacctcgtttccagctcatccatcgcttcttttgcatggaccctcaggctccgcattcggactaagtgtcgctagcattggcgatattaatcaggatggcttccaggacatcgcagtcggggccccttttgaggggctgggcaaagtgtacatctaccactcaagctccaagggtctactccgccaaccacagcaggtgatccacggggagaaacttgggctgcctggactggccacctttggctactctctttcaggacagatggatgttgatgagaacttttatcctgaccttctagtgggttctctgagcgatcacattgtgctgctcagggctcggccagttatcaacattgtacacaagaccctggtgccacgtcccgctgtcctggaccctgcgctctgtactgctactagctgtgtgcaggtggaactgtgctttgcctataatcagagcgccggcaacccaaattaccgccggaacatcacactggcttataccctcgaagccgaccgcgacagacgaccccctcggttacgttttgccggatccgagtctgcggtgttccacggattctttagcatgccagaaatgaggtgccagaagctcgagcttctcctcatggataatctaagggacaagctgcgacctattatcatctccatgaactacagtctcccactgaggatgcccgacagacctcgcctgggactccggtcactggacgcttaccccattcttaaccaggcacaggccctggagaaccacacggaggtccagttccaaaaagaatgcgggcctgataacaaatgtgagagcaatctgcaaatgcgagccgcattcgtgtcagaacagcaacaaaagttgtctagactccagtactcccgggatgtgagaaagctgctactgtcgattaatgtcaccaatacacgaactagcgagagatcgggggaagatgcccatgaggctttactgacactagtagttccgcctgctctccttctgtcaagtgtcaggccgccaggcgcatgtcaggctaatgagaccattttctgtgagctcggaaatccatttaaacggaatcagcgcatggagctacttatcgcttttgaagtaatcggcgtaaccctgcacacacgtgatttacaagttcagctgcagctgtctacgtctagccatcaggataatctctggcccatgatcctaacactactcgtcgactacacactgcagacttccctctctatggttaatcaccgcctgcagagcttttttggaggaacagtcatgggtgagtcgggcatgaaaacagtggaagacgttgggtcacctctgaagtatgagttccaggtgggccctatgggagagggcctggtggggttaggcactctggtgcttggtctggagtggccatacgaagtgtcaaacggcaagtggctcctgtatcccaccgaaataactgtgcacgggaacggttcctggccttgtcgacctccaggtgatctgataaacccactcaatttgacgctatccgatcctggagacagaccaagctccccgcagagaagacgaagacaactggatcctggcggcggtcagggtcctccaccagtgacccttgcggccgccaaaaaggctaagtctgagaccgtgctcacatgtgccacaggacgcgctcattgcgtgtggctcgagtgtccaatccccgatgcaccagtcgtaaccaatgtgaccgtgaaagccagggtctggaactccaccttcatcgaggactatcgggatttcgaccgggtgcgcgttaacggctgggcgacattgttcttacgcacaagcatcccaacaataaatatggaaaacaagaccacatggtttagtgtggatatcgattccgaactagtggaggaactccccgccgaaattgaactctggctggttctcgtagctgtgggcgctggactgctgttgctgggcttgattattctgctattgtggaagtgtgacttttttaagagaactaggtactaccagatcatgcctaaatatcacgcggtcaggatccgcgaggaggaaaggtacccaccccccgggagcaccctccctacaaagaagcattgggtgacctcttggcagactcgggaccagtattactag

SEQ ID NO: 120766 - DNA, 3156 bp, synthetic construct
  misc_feature 1..3156: note = Description of Artificial Sequence: Synthetic coding sequence
  source 1..3156: mol_type = other DNA
atggggccagggcctagccgcgcgcccagagcaccaagactgatgctgtgtgccttggctttgatggtggccgcaggcggctgcgtggtttcggcctttaatttagatacacgattccttgtggtgaaggaagccgggaaccccgggtcactgttcgggtacagtgtggccctccatcggcagacagagcgacagcaaaggtatctgctgctcgcaggggctccacgggaattagcggtccccgatggatacacaaacaggacgggcgccgtgtatttatgccccctcaccgcccataaggatgattgcgagcgcatgaatataactgtaaagaatgaccccggccatcacataattgaggatatgtggctgggtgtgaccgtcgccagccaaggtcccgcaggtcgagtgttagtgtgtgctcaccggtatacgcaggtgttgtggagcgggagcgaggaccagaggagaatggtaggaaagtgttacgtgagaggcaacgatctggagcttgatagttccgacgactggcagacctaccacaacgagatgtgcaacagcaatacggactatctggaaacagggatgtgccagctgggaacctcaggggggttcacacagaataccgtatattttggtgcccctggagcatacaattggaagggaaattcatatatgattcaacgtaaagagtgggatctgagtgagtattcttacaaggatcctgaggatcaggggaacctgtatatcggatataccatgcaggtcggctcctttatcctacatccaaagaacatcacgatcgtcaccggagcgccccgacaccggcacatgggggccgttttcctcctaagccaagaggctggcggagatttacgccggcggcaggtgttggagggatctcaagtgggtgcatatttcggcagcgccatcgctctggccgacctgaataacgacgggtggcaagacctactggtgggtgccccttactacttcgaacgaaaagaagaagtcgggggggccatttatgtgttcatgaatcaggccgggacatcatttccggctcaccccagccttcttctccacggcccctcaggctctgcattcggattgagtgtggcgagcattggcgatattaaccaggatggatttcaagatattgccgtgggggccccctttgaaggcctgggcaaagtgtatatataccatagcagcagcaaaggcctgctgcgacagcctcagcaggtgattcatggcgaaaaactcggcctgccggggctcgctactttcgggtatagcctgagtgggcagatggacgtagacgaaaacttttatcccgatctcctggtcgggagcctctcagaccatatcgtgctcctgcgcgcacgcccggttataaacattgtgcataaaaccttagtgccacgtccagccgtgctagaccctgccctgtgtacagctacctcatgcgtccaggtggagctgtgttttgcctataatcagagcgcaggcaatcccaattatcgcagaaatattaccctggcttacacactcgaggccgacagggatagaaggccccctcgactgcggtttgccggtagcgaaagtgcagtgttccacgggtttttttccatgcccgaaatgcgctgccagaagctggagttgctgttaatggataacctgagagataaattgcgacctatcattatctcaatgaattatagcttacctctgaggatgccagacaggccccgcttaggtctgaggagcctggacgcctaccccatactaaaccaggctcaggcgctcgaaaaccatacagaagttcagtttcagaaggaatgcggtcccgataacaagtgtgaatcaaatctccagatgcgtgctgcattcgtctcagagcagcagcaaaagctgtcccgcctgcaatacagtcgcgatgtccggaaactactgctatctatcaatgttactaatactcgcactagcgagaggtctggcgaggatgcacatgaggcgctcctcactctggtagtgccccccgctcttctgctttcatccgtgcgcccgcccggagcatgtcaggctaacgaaacaatcttctgcgaattggggaatccatttaagagaaaccaacggatggagctcctcatcgccttcgaggtcattggggtcacactgcatactcgggatcttcaggtgcaactgcagttgtcgacatcatcacaccaagataacttgtggcccatgatcttgacactgctggtagactacactcttcagaccagcctctcaatggtaaaccacagactgcaatccttttttggtgggactgtgatgggtgagtctggaatgaagaccgtcgaggacgtcgggagcccgttgaagtacgagttccaggtgggaccaatgggcgagggcctggtgggcctaggaacccttgtcctgggtctggagtggccttacgaggtctccaatggcaaatggctattgtacccaactgaaattacagtccacggaaatggttcttggccttgtcgtccccctggggacttgataaacccactaaacctgaccttgagcgatcccggagaccggccaagctcgccgcagcgtcggcggcgccagctggacccgggaggtggccaggggccacctcccgtgactctggcagcagcgaaaaaggctaagtccgagaccgtgctgacttgtgcaactggtcgtgcacactgtgtgtggctcgaatgccccataccggatgctccagtcgtgactaatgtaaccgtgaaggcccgcgtgtggaattctactttcatcgaggattatcgggacttcgaccgagtgagagttaatggctgggccaccttgtttctgcgcacatctattcctactatcaacatggaaaataagactacctggttctctgtggatattgactcagagcttgttgaggaattgcctgcagaaatcgagttatggctggttttggttgcagtgggggctggactgctcctgctcgggctgattatcttactgctgtggaaatgtggctttttcaagcgagcacgtacgcgtgctctgtacgaagcaaaacgccagaaagctgaaatgaaatcacagcccagcgagacagaacggctgactgacgactactag

SEQ ID NO: 120767 - DNA, 3114 bp, synthetic construct
  misc_feature 1..3114: note = Description of Artificial Sequence: Synthetic coding sequence
  source 1..3114: mol_type = other DNA
atgctgtgtgccctggccctgatggtagccgcaggaggctgtgtggtttccgccttcaacttggacacacgtttcctggtagtcaaggaggcagggaatccagggtctctgttcggttattctgtcgctttgcacaggcagacagagagacagcagcgctacctgctgctggcaggtgcacctagggagctggccgtcccagatggctatactaaccgcactggcgcggtgtatctttgccctctgaccgcacataaagacgactgtgaaagaatgaatattaccgtaaaaaatgaccctggccaccacataatagaagacatgtggcttggcgtgactgtggcctcccaaggccctgcaggacgagtcctggtatgtgctcataggtatacccaggtattgtggtccggtagcgaagaccagcgcagaatggtgggcaaatgctatgttcgcggtaatgacctggagcttgacagttctgatgattggcagacttatcacaacgagatgtgcaatagcaatacagactacctcgagacgggaatgtgtcagctgggaacctcgggcggcttcactcagaatactgtatacttcggtgcacctggggcctacaactggaaaggcaattcctatatgattcagagaaaagagtgggatctgtccgaatactcctacaaagaccccgaggatcagggcaacttgtacataggttacacgatgcaggtgggaagttttattcttcatcctaaaaatatcaccattgttacaggggccccacgccaccggcacatgggcgccgtattcttgctatctcaggaagcgggaggtgatctccggcgaaggcaagtattggaaggaagtcaggttggagcgtactttggttccgccatcgctctagctgacttaaacaatgacggctggcaggacctgttagtgggcgccccctattattttgaaaggaaggaggaggtggggggtgctatatacgtattcatgaatcaggccgggacaagctttccagcccatccatccctgctgctgcacgggccgagcgggtctgcgtttggacttagtgtggctagtatcggggatatcaatcaggacggttttcaggatatcgccgtgggcgctccctttgaaggactgggtaaggtatacatctatcatagctcatcgaaaggccttcttcggcagccccagcaagtaattcacggagagaagcttgggctgcctgggctggcaactttcgggtactccctgtccggccagatggacgtggatgaaaacttttaccctgatctgttagtcggctcactgagtgaccacatcgttctcctcagagcaaggcctgtgatcaacatagttcacaagacactggtgcctcgacctgccgttttggatccggccctctgtacggccacgagttgtgtacaggtagaactgtgttttgcttataatcagtctgccggcaaccccaactaccggagaaacattactctggcttatactcttgaggccgatagggatcgcagacccccccgattgagatttgccgggtcagagagcgccgtttttcacggcttcttttcgatgcctgaaatgcgatgtcaaaaactggagcttctgctcatggacaatctcagggacaaactgcgaccaataatcatcagcatgaactattccctgccactgagaatgccagacagacccaggcttggattacgctctctggatgcttaccctatccttaaccaggctcaggctcttgaaaatcataccgaggtgcagtttcagaaagagtgcggacccgacaataagtgcgagtctaacctccagatgcgtgcggctttcgttagtgagcaacagcagaagctgagtagactccaatactcaagggatgttcggaaacttctgttgtcaataaacgtgaccaatacacggaccagtgagagatctggagaggatgcacacgaggccctcctgaccctggtggtgcctcctgcactactcctcagttccgtgcggccaccgggagcttgtcaagcaaatgagactattttctgtgagctgggaaatcccttcaaacggaaccagcgtatggagctactcattgcattcgaggtgattggtgtgactctgcacacccgcgatctgcaggtacagcttcagctctcgactagcagccaccaggacaatctgtggccaatgattctcacattactggtggattatacactgcagacctcgttaagtatggtcaatcacagactccagtcattcttcggcggcaccgttatgggagagtccggcatgaagacagtggaggacgtgggtagtcctctgaaatacgagttccaggtcggacccatgggggagggcctcgtcggcctcgggaccttagtattggggctcgaatggccatacgaggtgtccaatggaaagtggctcctctatccaaccgaaatcactgtgcacggtaacgggtcctggccatgccgcccaccaggtgatttaattaacccattaaacctcacgctgagtgacccaggggacagacccagcagccctcagcgaaggagacgccagttggaccccgggggaggccaggggcccccgcctgtaaccttagccgcagcaaagaaagccaagagcgaaacagtcctaacctgtgcgaccggccgtgctcattgcgtgtggctggaatgccctatccccgacgctcccgtggtaacaaacgtgacagtaaaggctagggtgtggaattccacattcattgaggactacagagactttgaccgggtgcgggtgaatggttgggcaaccctgttcctaaggacttccatcccaactatcaatatggagaacaagacaacctggttttccgtagacattgattccgagctcgtggaagagctgccagccgaaatcgaactttggctggtgttggtcgcggtgggtgccgggctgcttctgctgggcctcataatcctgcttctgtggaagtgcggcttttttaagcgggctcggacaagggccctctatgaggcgaagaggcaaaaagccgaaatgaaatctcagccaagcgaaacggagcggttgaccgacgattactag

SEQ ID NO: 120768 - DNA, 885 bp, synthetic construct
  misc_feature 1..885: note = Description of Artificial Sequence: Synthetic coding sequence
  source 1..885: mol_type = other DNA
atgatccagcggaaggagtgggatctctctgaatactcctacaaggacccagaagaccaaggcaatctgtacattggatatactatgcaggttggctcctttatcctccacccaaagaatatcactattgtgactggtgccccaaggcaccgccatatgggagctgtatttctcctcagccaggaagcagggggagatctgcgccgcagacaggttctggaaggtagccaggttggcgcatattttggctcagcaatcgccctcgctgacctgaacaacgatggctggcaggacctcttggtgggtgctccttactactttgagagaaaggaggaggtggggggagccatatacgtgtttatgaaccaggcaggaacctctttccccgcacatccatcacttctgttgcacggaccttcaggctccgcttttggtctttccgtcgcatctattggcgatattaaccaggatggattccaggatatcgcggtgggagccccctttgagggactcggcaaggtgtatatttatcattcttcatccaaaggtttgctcagacagccccagcaagttatccacggcgaaaagctgggattgcctggcctggctacgttcggctatagcctcagcgggcaaatggacgtcgatgagaatttttaccccgacctgcttgtgggctccctgtcagaccatatcgtactgttacgggcccgccctgtgataaatattgtacacaagactctggttcctagacccgcagttctggatcctgccctgtgtaccgccacttcctgcgtgcaggttgaactctgttttgcttacaaccaaagtgctgggaaccccaactatcgcagaaatattagcgaatgttggggagccgcctag

SEQ ID NO: 120769 - DNA, 3108 bp, synthetic construct
  misc_feature 1..3108: note = Description of Artificial Sequence: Synthetic coding sequence
  source 1..3108: mol_type = other DNA
atgggaggacccgctgcaccaagaggcgccggacgcctgagggctctgttattagctctggtggtggcgggaattcccgcaggggcgtacaatttggacccacagaggcccgtccactttcagggccctgctgactctttctttggctacgccgttctggagcactttcacgataacacgcgatgggttctcgtaggggctccaaaggcagattctaagtactcccccagcgtaaagagccctggcgctgtgttcaagtgccgggtacacactaatcctgatcgtaggtgtaccgagctggatatggctagaggaaagaatagagggaccagctgcggcaagacgtgtcgggaggacagggacgacgagtggatgggggtctcattagctcggcagccgaaggcggacggcagagtgcttgcatgcgcccacaggtggaaaaacatttactacgaggccgatcacatactgccacacggtttttgttatatcataccttctaatctgcaagccaaaggccgcaccctgatcccctgttacgaggagtacaagaagaaatacggagaggaacatggctcttgccaggccggtatcgctgggttttttaccgaggagctggtggtgatgggcgctccaggttctttttactgggcaggcacaattaaggtgctaaatctcactgacaacacttatctaaaactgaacgacgaagtgatcatgaaccgccgctacacttatctcgggtatgctgtgacagctggccactttagccatccttctacgatcgatgttgtcgggggcgcaccccaggacaaaggaattggcaaggtgtacatcttcagggccgatcgcagatcggggaccctcattaaaatattccaagcgagtggtaaaaaaatgggcagctacttcggaagctcgttatgcgccgttgacctcaatggcgacgggctgagcgacttgttggtgggcgcaccaatgtttagcgaaatcagggatgaggggcaggttaccgtctacatcaaccgcggtaacggagcactcgaggagcagttagcgctgaccggtgatggggcctataatgcccactttggcgagagcatcgcctcacttgacgacctcgataatgacggcttccctgatgtcgcaattggggctccaaaggaagacgacttcgcaggcgcggtgtacatttaccacggcgacgcaggaggtattgttccgcaatattctatgaaactgagcggccaaaagattaacccggtcctacgtatgtttggccaaagcatctcaggaggcatagatatggatggtaacggataccccgatgtcaccgtcggagccttcatgtccgacagcgttgttcttttacgtgcaaggcccgtaattaccgtcgatgtgagcatttttctgcctggcagcattaatattaccgctccacagtgccatgacggccagcaaccggtcaattgcctcaatgtgactacatgtttctctttccacgggaagcacgttccaggggagatcgggctcaattacgttctgatggccgacgtggcaaagaaagaaaagggacaaatgccaagagtttacttcgtcctattgggagagacaatgggtcaggtcactgaaaagctccagctgacgtatatggaagagacgtgccgccactacgtggcacacgttaagagaagagttcaagacgtgatctctccaattgtgttcgaagctgcttactctctgagcgagcacgtgacaggcgaggaggagagggagcttccccccctcacacccgtcctccgctggaaaaaggggcagaagattgctcagaagaaccagaccgtctttgaacgcaactgtagatcggaggattgcgcggccgaccttcagttacagggcaagctgttgttgagcagcatggacgaaaagacactctacctggccctgggggcggttaaaaatattagcctcaacatctcaataagcaacctgggagatgatgcctacgacgccaatgtgagttttaatgttagcagggagctcttcttcattaacatgtggcagaaagaggagatgggaattagctgtgagttgttggagtcggacttcctcaagtgttcagtggggtttccttttatgaggtctaaatcaaagtacgagttcagtgtaatcttcgatacatcgcacctgagtggcgaagaggaagtcctctcctttattgtcaccgcacagagcggaaacacggagcgctccgagtccctgcatgacaacactctggtgctgatggtccctctgatgcacgaggtggatacctctattacgggaattatgagtccaacctcctttgtctacggcgagagtgtggatgctgctaactttatacaattggatgatcttgagtgccatttccagccaattaacattaccttgcaggtgtataacaccggtcctagcaccttgcctggctccagtgtctccatcagcttccctaataggctttctagcgggggcgctgagatgtttcatgtccaagaaatggtcgttgggcaggagaagggaaattgcagttttcaaaagaacccaaccccttgcatcattccccaagagcaggaaaacatattccacactatcttcgcattttttacaaagtccggccgtaaggtgttggattgtgagaagccaggaatctcctgtctcactgcgcactgcaatttctccgccctggccaaggaggagtcccgcacaatcgacatttacatgttgctgaacaccgagattcttaagaaagacagtagctctgtcatccagtttatgagcagagcgaaagtgaaggtggacccagccctaagagttgtcgagatcgctcatggcaaccctgaggaagtgaccgtagttttcgaagccctccataatcttgagcctcggggctatgtcgtaggctggatcatagcgatttccctgcttgtaggcattttgattttcttgctcctggccgtgctgttatggaaaatgggcttcttcagacggcgctacaaagagattatcgaggctgagaaaaaccggaaggaaaacgaagactcatgggattgggtgcaaaagaaccaatag

SEQ ID NO: 120770 - DNA, 696 bp, synthetic construct
  misc_feature 1..696: note = Description of Artificial Sequence: Synthetic coding sequence
  source 1..696: mol_type = other DNA
atgtgtcaaccgccaccaacagcacctggtagctggccagttgcaaggccctgtactgagtctgtaggacgtactcatacccaaagggtacctgccagttgctgggccagagccggtcgcagttcgagacagtcccccaccccccgccagttcgctctgatgcagtattccaacctgttgaagatccattttacctttacacagttccggacaagcccgagtcagcagtctctagtggatcctatagtgcagctgaaaggtctcacgttcaccgctactggcatcctgactgtggtcacacagctgttccaccataaaaatggggccagaaaaagtgcaaagaagatcctcatagtgatcacagatgggcagaagtataaagacccattggaatacagcgacgtgatccctcaggcggagaaggcagggatcattcgatatgccatcggagtgcgcctgttttttactcctgctccgggcagcgcctgcatctcttttaggtgttctgctgcagggctgatcctccttggctgtctctctgcggctggtggcactcggtttccaggaactcattgccaggctggtgcggagtaccatcagctgagcgctagcgcggggcctagagtacagggtggacagctttgttcaccgtggcagcaccccgaagctgccgccggcgaggatctgtgctcatag

SEQ ID NO: 120771 - DNA, 3486 bp, synthetic construct
  misc_feature 1..3486: note = Description of Artificial Sequence: Synthetic coding sequence
  source 1..3486: mol_type = other DNA
atgactttcggtactgtgctcctgctgagcgtcctagctagctaccacggctttaatctggatgttgaggaaccgacaatttttcaggaggacgcaggaggtttcggccagagcgtggtccagtttggggggtccaggcttgtggtaggtgcccccttagaagtcgtggctgccaaccagactggaagactctatgactgcgcggccgctaccggcatgtgccagccgataccactgcacatcagacctgaggcagtcaacatgtctctgggtctcacacttgctgcctcaacaaacggatctcgacttcttgcctgtggtcctactctccaccgagtatgcggagagaatagttattctaagggcagttgccttctgttaggaagtcgctgggagattattcagaccgtcccagacgccactcctgagtgtccacaccaggagatggatatcgttttcctcatcgacggctctggcagtatcgatcagaacgactttaaccaaatgaagggatttgttcaggcagtgatgggtcagtttgagggaactgatactctgtttgcgctgatgcagtactcaaacctgctcaagattcactttactttcacgcagttccggacctccccaagtcagcagagtcttgtcgacccaattgtccagctgaagggcctgacctttaccgcaaccgggattttgaccgtggtcacccaactctttcaccacaaaaatggggcacgcaagagtgctaagaagattctgatcgtgattacggacggccagaaatataaagaccccctcgagtactctgatgtgatcccccaagccgaaaaggccggcattataaggtatgctatcggggtgggtcacgcatttcagggacccactgcccgccaagagcttaatacgatctcaagtgcacccccgcaggatcacgtttttaaagtggacaactttgccgccctcggatccatacagaaacagctccaggagaagatttacgctgtggaaggtacacagagtagggcatcatccagcttccagcacgagatgtcgcaggagggattcagcacagccctgaccatggacggcctctttctgggggcagtcgggtcatttagctggtctggcggggcgtttctgtatcccccaaatatgagccccacctttatcaatatgagtcaggagaatgtcgatatgagagacagctatcttgggtacagcactgagttggctctctggaaaggcgtccagaacctggtgctgggggccccacgttaccagcacactggtaaagccgtgatctttacacaggtatccagacaatggagaaaaaaagcagaagtcactgggacccaaattggcagttattttggcgcatccttatgctcggtggacgtagacagtgatggttccacagaccttatactgattggcgctcctcattactacgagcaaacccgtggtggtcaggtgtcagtgtgtcctttgccgaggggacgcgtgcagtggcagtgcgacgccgtgctgaggggcgaacagggccatccatggggtagatttggggccgcccttactgtcctgggggatgttaacgaagataagctgatagacgtggccatcggcgccccgggagagcaagaaaacaggggagccgtttatctcttccacggcgccagtgagagtggaattagcccttcccatagccagaggatcgcctcgtcgcagctatccccccgactacaatattttggccaggctctgtccggaggacaggacctgacacaggatggtctcatggacctggctgtgggagccaggggccaggtgttactactgcgatcactgcccgtgctcaaggtcggcgtggccatgcgcttctccccggtcgaggtcgccaaggccgtctaccggtgttgggaagagaagccatcagccttagaagctggggatgctactgtctgcttaacgatccagaaatcctcactagaccagctgggagatatccagagttccgtgaggtttgatttggcccttgatcccgggcgacttacttcccgcgccattttcaatgaaacaaaaaaccctaccctcactcgcagaaagaccctgggattaggcatccactgcgaaactctgaaacttctcctcccagactgcgtcgaggacgttgtcagtcctatcatacttcatcttaacttcagtcttgtcagggagcccattcccagcccccaaaatctgaggcctgttttggctgttgggagtcaggaccttttcactgcttcgctgccttttgagaaaaattgcggccaggatgggctttgcgagggcgacctcggcgtgaccctgtctttctctggtctgcagaccctgacggtaggaagctctctggaactgaacgtgatcgtgacagtttggaacgccggcgaagatagctacggcaccgtggtgtctctgtactatcctgccgggctgtcccatcggagagtcagtggggcacagaaacagccccaccaatcggcgctccgactcgcatgcgagactgttccaaccgaggacgagggtctgcggtcttcacggtgcagcgtcaatcatccaatttttcacgaaggatccaatgggacctttatagtgaccttcgacgtatcctataaagctacactcggcgaccgaatgcttatgcgcgccagcgcctccagcgaaaacaataaggcttcttcgtccaaggccaccttccagctggaactgccagtgaagtatgctgtctacacgatgatcagccgccaggaggaatccactaaatacttcaacttcgccacatccgatgagaaaaagatgaaggaggcagagcacagataccgggtgaataatctgagtcagagggacttggctatttctatcaatttctgggtacctgtgctactcaacggcgtggcagtttgggacgtggttatggaggcacccagccagtcactcccttgcgtgtcagagaggaaaccccctcagcactccgacttcctgacacaaattagccgcagccccatgcttgactgctctatcgctgattgtctccagttccgttgtgatgtcccttcattctctgtgcaggaagaactggatttcacgcttaaaggtaatctgtcttttggttgggtgagagaaaccctgcagaaaaaggtcctggtagtgtccgtggccgagattacattcgacaccagtgtctacagccagctgcccggacaggaggcattcatgcgggcccaaatggagatggttttggaagaggacgaggtatataatgcgatcccgattattatgggatcctcagtcggcgctctcctgcttctggccttgatcacggccactctctataaactgggcttcttcaagcggcactacaaagagatgctggaggacaaacccgaggataccgctacattctcaggtgatgacttcagctgtgttgctcctaatgttcccctcagttag

SEQ ID NO: 120772 - DNA, 3534 bp, synthetic construct
  misc_feature 1..3534: note = Description of Artificial Sequence: Synthetic coding sequence
  source 1..3534: mol_type = other DNA
tgcgcactgagccctacttttcactttccatccacaaggtgttcaggcatgacgttcggcacagttttgctcttatcagtcctcgcctcatatcacggattcaatttggacgttgaagagccaacaatttttcaagaggacgccgggggcttcggacagtctgtggtgcagtttggcgggtcccgtcttgtcgtgggagcaccactcgaggtggtggcagcaaaccagactgggagactttatgactgtgcagctgccactgggatgtgccagcccattccattgcacatccgccctgaggccgtgaatatgagtcttggcttaacactggccgcaagcaccaacggtagtcgactgcttgcctgcgggcccaccttgcatcgagtttgtggcgagaattcatattcgaaaggatcgtgcttgttgctgggatcacgctgggagattatacagactgtcccggatgctacacctgagtgtccccaccaagaaatggacatagtcttccttattgacggtagcggaagtattgaccagaatgattttaaccagatgaaaggcttcgtgcaggccgtaatggggcagttcgaaggcaccgatactctgtttgcactgatgcagtatagtaatctgttaaagattcattttacttttacacagtttaggacttctccttctcagcagtcactggtcgatccgatcgttcagctaaaaggtctgacattcacagctacgggcatcctcactgtggtgacccagctgttccatcataagaacggcgctaggaagagtgctaagaagatcctcattgtaattacggacggacagaaatataaggatccgttggagtactccgacgtcattccacaagcagaaaaggccgggattatacggtacgcaatcggtgtcggccacgccttccagggacctaccgcacggcaagaactgaacactatctctagtgctcctccccaggaccacgtattcaaagtcgataacttcgccgcacttggaagcattcagaaacagctccaggaaaaaatttacgctgttgagggcactcagtccagagcctcaagcagctttcaacatgagatgtcgcaagaaggcttctctaccgctctgactatggatggcctgtttctgggggccgttggatcattctcctggagcgggggcgcatttttatatccaccgaatatgtcaccgacttttattaatatgtcacaggaaaatgtggacatgagggattcctaccttggctacagcacggaactcgccctgtggaagggagtgcagaatctcgtcctcggggccccccgttaccagcatacagggaaggcggtcatcttcactcaggtttcccggcaatggagaaagaaagcagaggtcaccggcacccagattgggtcttatttcggcgccagtctttgtagtgtcgatgtggattcagacgggagcactgacctgattctcatcggggccccgcattactacgagcagactcggggtggacaggtcagtgtgtgtccgctccctagggggagggtgcagtggcagtgcgatgcagtcctaaggggtgagcagggccatccctggggcaggttcggagccgcactgacagttctaggcgatgttaacgaggataagctgatcgatgtggccattggtgcaccgggtgagcaggagaacaggggcgccgtctaccttttccacggtgcttcagaatctggaatcagcccatctcatagccagcgaatcgcttcatctcagctatctcctagactccaatacttcggtcaggctctttcaggtggccaagatctaactcaggacggcctaatggaccttgccgtgggcgcgcgtggccaggtcttgctgttgcgcagtctcccagtgttgaaagtcggcgtagcaatgcgattttcacccgtggaagtggccaaagccgtctaccgatgttgggaagaaaagccaagcgctctggaggcaggagacgctaccgtctgtctcactatccaaaagtctagcttggatcagctcggggacatacaatcgagtgtgcggtttgatttggcgctggatcctggacgtttaacctctcgcgccatatttaatgagacgaaaaaccccacactgacccggcggaagactttagggctggggattcattgtgaaactctgaaactgctgctgccagactgtgtggaggacgttgtctccccaataattctgcatttaaatttttccctggtaagggagcctatccccagcccccagaacttacgcccagtcctggcagtggggtcacaggacctgtttaccgcatcccttcctttcgaaaagaactgcggccaagacggcttatgtgaaggcgatctcggcgtgacactatcctttagcggactgcaaactttaacagtagggagctctttagaactcaatgttatcgtcaccgtttggaacgctggagaagacagttacgggaccgtggtatccctttattaccccgcgggccttagtcatcgccgggtgagcggggcccagaaacaacctcaccagtctgccctgcgattagcctgtgagacagtaccaacagaggatgaagggcttcgaagttccaggtgctcggtcaatcaccctattttccatgaagggagtaatggtaccttcattgttacattcgacgttagttataaagctaccctgggcgatcgtatgctgatgagggcttcagcttcctctgaaaacaataaggcaagcagcagtaaagccacattccagttggagctcccagttaaatacgcggtgtacacaatgatttcacgacaggaggagagtacaaagtacttcaacttcgcaactagcgacgagaaaaagatgaaggaggctgaacaccgataccgagtgaataacctgagccagcgtgatctcgcaatctctataaatttctgggtgcctgtgctgctaaatggcgtcgccgtgtgggacgtcgtgatggaagccccaagccagtccctgccatgcgttagtgaacggaaacccccgcagcattccgactttcttacccaaatttccaggtcgccgatgctcgactgctccatcgccgactgtctgcagttcaggtgcgatgtgccaagtttttcagtgcaggaggaactggattttacactcaaggggaatctgtcatttgggtgggtaagggaaaccctgcaaaaaaaggtcctggtagtgtcagtggctgagatcacgttcgatacatctgtgtattcccaattgcccggccaagaagcattcatgcgcgctcagatggagatggttctggaggaggacgaagtgtacaacgcaatccctatcatcatgggatcctcagttggggcgttgctcctactggctctaataacagcaaccttgtataagttggggttttttaagaggcattacaaagagatgctcgaggataaaccagaggacacggccaccttttccggggatgacttctcttgcgtcgcgcccaacgtgcctttgagctag

SEQ ID NO: 120773 - DNA, 3513 bp, synthetic construct
  misc_feature 1..3513: note = Description of Artificial Sequence: Synthetic coding sequence
  source 1..3513: mol_type = other DNA
atgaaagattcttgtataaccgttatggccatggccctactgtcagggtttttcttcttcgctccagccagctcctataatctggacgtaagaggtgccaggtcttttagtcctcctcgggccggcagacattttgggtatagagtgctccaagtgggcaacggcgtaattgttggcgcccccggcgagggaaattccaccggcagcctgtaccaatgtcagtctggaacaggacattgtctgcccgtcacactgcggggttctaactacacttcaaagtacctcgggatgacattggcaacagatcctactgatgggtccatattagcctgcgatccaggactgtcaaggacatgcgaccagaatacctatctcagtgggttgtgctatctgtttcgccagaatctgcagggtccgatgttacagggtaggcccggctttcaggaatgtattaaaggcaacgtcgacctagtgtttctgtttgacggcagtatgagtctgcagccagacgagtttcagaagatactcgatttcatgaaggacgtgatgaaaaaactttccaacaccagctatcaatttgctgctgtgcagtttagcacgagctacaaaacagaatttgacttctccgattatgtcaagcgcaaggaccccgatgccctgctgaaacacgttaaacacatgctcctgcttaccaacactttcggtgccatcaattatgtagccaccgaggtttttcgggaggagttaggcgccaggcccgatgctacaaaggtgctgatcattatcaccgatggcgaggcgaccgactccggaaacatcgatgcagccaaagacataatcaggtatatcatcgggattgggaagcactttcagacaaaagaatctcaggaaactctgcataagtttgccagcaaaccagcctctgagtttgtaaagatcctagatacatttgaaaaactgaaagacctctttaccgagctccagaagaagatctacgtgatcgaggggaccagtaaacaggatttaacctcttttaacatggaactgagctcctctggcatatctgccgacctctctaggggtcatgctgtggtgggggctgtaggtgctaaggactgggcaggcggctttctggatcttaaggccgatctgcaagacgatacgttcatagggaatgagccattgaccccagaggtgcgggcagggtaccttggttatactgtgacatggctgccgagtcgtcaaaagacttccttgctggcctcaggcgcccctagataccagcacatgggaagagtgttactgtttcaggaaccacaggggggcgggcattggtctcaagttcagactatccacggcacccaaattgggagttacttcgggggagaactatgtggggtggacgtggatcaagatggcgaaacagaactcctccttatcggagcccctctcttctatggcgaacagagaggagggagagtgttcatctatcaaagacgtcagctggggtttgaggaggttagtgaactacaaggcgatcctggctaccccttggggcgtttcggagaagcaatcacagcactgactgacataaatggcgatgggttggtggatgtggccgtgggcgcccctctggaggaacagggcgccgtgtacattttcaatggcaggcatggaggtctgtctcctcaaccatctcaacgtatcgagggcacgcaggtgttatcgggtatccagtggttcggtagatccatccacggcgtcaaggacctggagggagatggcctcgcagatgtcgctgttggcgcagaaagccaaatgattgtcctcagcagcaggcctgtggttgatatggtcacgctcatgtccttctcccccgctgagatccctgtgcatgaagtggaatgctcctactccacttccaataaaatgaaggaaggagtgaatatcacaatctgcttccagatcaagtccctgataccccaatttcagggtcgcctcgttgctaacctgacttatactcttcagctggatggccacagaacacgccgacgcggtctgtttcccggaggcaggcacgaacttcggaggaatatagctgtaaccacttcaatgtcatgtaccgacttttctttccacttcccagtctgtgttcaggatttaatttcgcccatcaacgtctcccttaacttttcgctctgggaagaagaaggaaccccaagggaccagagggcccagggtaaggatatcccacctattttgaggccgtccctccattccgagacttgggaaattccattcgaaaagaattgcggagaagacaagaagtgcgaagctaacctgagggtttctttctcaccagcaaggtctcgggcacttcggctgaccgccttcgcgtccctgagcgttgaactcagcttgtcgaacctggaagaagatgcatactgggtacagctagacctgcactttccaccaggcctgagtttcagaaaggtggaaatgctcaagccgcactcccaaattcctgtatcatgtgaggagctcccagaagagtcaaggttgctgagcagagcgctctcatgcaacgtgagcagccctatcttcaaggccggacactcggtggccttgcagatgatgttcaacacattggtgaactctagttggggcgactcagtggaactgcatgcgaacgtaacttgtaacaacgaggacagcgatttgcttgaagataattcggccactaccattattcctattctatacccgattaacatactcatccaagaccaggaagattccacactctacgtgtccttcacaccaaaggggccgaagatccaccaagtcaagcatatgtaccaagtaaggatacagccgagcatccacgatcataacattcctactttagaagcagtggtgggggtgccccagccgccttcagaaggtcccatcacacatcagtggagtgtgcaaatggagccccctgtgccatgccactacgaagatctggagagactaccggacgccgccgaaccctgtctgcctggcgctctgtttaggtgtccagtggtatttaggcaagagatcctggtccaagtgatcgggactctggaattggtgggtgaaatagaagcgagttcaatgtttagcctctgtagtagcctgtctataagcttcaatagctctaaacacttccatctttatgggagtaacgcaagcctggcgcaggtggtcatgaaggtggacgtggtatacgagaagcaaatgttgtatctgtacgttttgtcagggataggtggcctcctcctgcttctgttgatctttattgtcctgtataaagtaggattctttaaacgtaacctgaaagagaagatggaggctggcagaggtgtgcccaatggaatccctgctgaggatagtgagcaattggccagtggccaagaggccggtgatcctggctgcctgaaacctctgcacgaaaaagactcggagagtggcggcggtaaggactag

SEQ ID NO: 120774 - DNA, 3261 bp, synthetic construct
  misc_feature 1..3261: note = Description of Artificial Sequence: Synthetic coding sequence
  source 1..3261: mol_type = other DNA
atgaaagactcatgcataaccgtgatggcaatggccctcctatcaggattctttttttttgctcccgcgagttcttacaatcttgatgttaggggggctagatccttcagcccccccagagcagggaggcattttggttacagggttctgcaggtgggcaatggggttatcgtaggagcccccggagagggaaactccacagggtccctgtatcaatgtcagtctgggacaggacattgcctgcctgtgactctgcgagggagtaactatactagcaagtacctggggatgacattagcgaccgacccgaccgatggctctatcctgtttgccgcagtccagttctctacatcttacaagacggagtttgactttagcgactatgttaagcgaaaagaccccgatgccctgctgaagcacgttaaacacatgctgctgctgaccaacacatttggagcaattaactatgttgcaaccgaggtattccgggaagaactgggcgccaggcccgatgcaacgaaagtcctcatcattatcacagacggtgaggccactgattccggtaatattgacgctgctaaggatatcatacggtatattatcggtatcggaaagcattttcagacaaaggagtcccaggaaacgctgcacaaatttgcgtccaagcccgcaagcgaatttgtgaaaatactcgacactttcgaaaagctgaaggatctgtttacagagctgcagaagaagatatatgtgattgaggggaccagcaagcaggatctgacttcattcaatatggagctgtcgagctccggtatctctgctgatctgtctcgaggacatgccgtggtcggcgcggtcggcgcaaaggattgggctgggggattccttgaccttaaggcagacctccaggacgatacctttatcgggaacgaacctttgacgcctgaggtgcgcgcagggtacttggggtacaccgtcacctggctgccctctaggcagaagacgtctcttcttgcttctggcgccccccgctatcagcacatgggcagagtactgctcttccaggagccccagggcggcggccattggagtcaggtccagacaatccacgggacccagattggctcatacttcgggggcgaactgtgtggggtcgacgtggaccaggatggcgaaaccgagctgttactgatcggcgcgccactattctatggtgaacagcggggcggccgggtattcatctatcagagacgtcagctcggctttgaggaagtgtccgagctccagggagatcctggctaccccctcgggagattcggggaggccattaccgctctgacagacatcaacggtgatggattagtcgacgtggctgtgggagcacctctcgaggaacagggggccgtttacatatttaatgggcgacatggtggtttgtcaccacagcctagccagcgtattgagggcactcaggtcctgtctggtatccagtggttcggcagatccatacacggggtgaaggaccttgaaggcgatggactcgccgacgttgccgtcggcgctgagtcccaaatgattgtgctgtcctctcgacctgtcgtagacatggtcacactgatgagcttttccccggccgagatcccagtgcatgaggtcgagtgttcttacagcacaagcaacaagatgaaggagggtgtaaacataactatatgtttccaaatcaagtctctgatacctcagttccaaggccgccttgtggcaaacctgacatatacgctccagctcgatggccacaggactaggcgccgaggcctgttccctggaggccgccatgagctgagaagaaacatcgccgttacaacctctatgtcgtgtacagacttctcttttcactttcctgtgtgtgttcaagacctcattagccccatcaacgtgagccttaacttctcactatgggaagaagaagggactccccgggatcaaagagccgggaaggatatcccacctattctccggccttccctgcacagcgaaacctgggaaattccctttgaaaaaaactgtggcgaggataagaaatgtgaagccaacttgcgcgtctcattcagccccgcccggagtagagcattgcggctgacggctttcgcctccctgtccgtggaactctccctctctaatctcgaggaagacgcctactgggttcagctggatctgcactttcctcccgggctgtcttttcgcaaagtggagatgctcaagcctcatagtcagattccggtctcctgtgaagagcttcctgaggagtcccggcttctcagccgcgctttgagctgcaacgtgtccagtcctatcttcaaggcagggcatagcgtggctctgcaaatgatgtttaataccttggtgaattcaagctggggtgacagtgtggaactccacgccaatgtcacatgcaataatgaggattcagacctgctggaggataattctgccaccaccatcatccccattttgtaccccattaacattctgattcaggaccaggaggattccacgctatacgtgtctttcacccccaagggtcctaaaattcaccaggttaagcatatgtaccaggtgcgaatccagcctagcatccatgatcacaatatccctactcttgaagcagtagtgggcgtgccccagcctccaagcgagggccctataacacaccagtggtcagtgcaaatggaaccacctgttccatgtcactacgaggatttggaacggctgccggacgctgccgagccctgcctgcctggagcactctttaggtgtccagttgtttttagacaggagattctggtacaggtgattggcacactggaactggtgggcgaaatcgaggcttctagcatgttcagtttgtgctcatccctgagcattagttttaactcctcaaaacacttccacctctatggtagcaatgcctcactcgctcaggtcgtgatgaaggtagacgtggtgtacgagaagcagatgctgtacttatatgtgttgtcagggatcggggggctgcttttgctcctgttgattttcattgttctgtataaagtgggcttcttcaaaagaaacctgaaggagaaaatggaggctggtcgtggcgtgccgaatgggattcccgctgaagatagcgagcagctggctagcggacaagaggcgggtgatcccggctgcctcaagcccctgcacgagaaagattctgaatcaggaggaggaaaagactag

SEQ ID NO: 120775 - DNA, 1215 bp, synthetic construct
  misc_feature 1..1215: note = Description of Artificial Sequence: Synthetic coding sequence
  source 1..1215: mol_type = other DNA
atgaaggactcatgtattacagtgatggccatggccctgttgtcaggtttcttttttttcgctcccgccagcagctacaatctggatgtgaggggcgcccggtctttctccccaccaagggcgggaaggcacttcggatatcgtgtcctccagataaaatccctgattccacagtttcagggtcgcctcgtagcaaatctcacgtacacactccaacttgacgggcaccgtacaagacgtagaggcctgttcccaggcggaagacacgaattgcggcgcaatattgccgtcacaacctcaatgtcatgtacagacttctcatttcacttccctatgatgtttaacactctcgtgaattctagttggggcgattccgtagaactccacgccaacgtgacgtgtaataacgaagactccgaccttttagaggacaatagcgcaacaacaattatccctatcttgtaccccatcaatatcctgatacaggaccaagaggatagcacgctgtacgtgagctttacccccaagggcccgaaaatccaccaggtcaaacatatgtaccaggttagaattcaaccttccatccacgatcacaacatccccacactggaagcagttgtgggcgttcctcaacccccaagcgaaggccccatcacccaccagtggagtgtacagatggagcctcccgtcccatgtcactatgaggacctggaaaggctgcccgacgccgcagaaccctgtctgcccggcgcactgtttcgttgtccggtcgtgttcagacaggaaatacttgtgcaggtgatcgggactctggagctggtcggggaaatagaggctagtagcatgttcagcctttgctcaagtctatccataagttttaatagtagcaagcatttccacctgtacggttcgaacgcgtctctggcacaggtagtgatgaaggtagacgtggtgtatgagaagcagatgttgtatctgtatgtcctgtctggtatcgggggcctgcttctgctgcttctaatcttcattgtgttgtataaggtcggatttttcaaacggaacctgaaggaaaagatggaggctggaaggggagtgcccaatggcattcctgccgaagattcagaacagttggcctccggccaagaggcgggagaccccggctgtctgaagcccttgcacgagaaggacagcgaaagtggaggtggcaaagactag

SEQ ID NO: 120776 - DNA, 489 bp, synthetic construct
  misc_feature 1..489: note = Description of Artificial Sequence: Synthetic coding sequence
  source 1..489: mol_type = other DNA
atgaaagactcatgcattaccgtaatggcgatggcactgctcagtggtttcttcttcttcgcgcctgccagtagttacaacctcgacgtccggggcgcacgcagtttcagcccgccacgagccgggagacattttggttacagggttctgcaggtggggaacggcgttatcgtgggggccccaggcgaaggcaattccaccgggtcactctatcagtgccagagtggaaccgggcattgtctgccagtgactttgaggggtagtaactatacctccaagtacctgggaatgactctggccacagatcccaccgatggctctatactcgcctgtgatcctgggctttcacgcacgtgcgatcagaatacttacctgagcggactctgttatcttttcaggcagaacttacagggccccatgctgcaggggaggcctggatttcaggtgtgctgttgcagcgtgtttcacaagcttcaaaaccgcatctag

SEQ ID NO: 120777 - DNA, 3459 bp, synthetic construct
  misc_feature 1..3459: note = Description of Artificial Sequence: Synthetic coding sequence
  source 1..3459: mol_type = other DNA
atggcattgcgagttcttcttctaaccgccctaacactgtgccatgggtttaaccttgacactgagaatgccatgacatttcaggagaatgcccgcggcttcggtcagagcgttgtccagctgcagggcagcagagtggtggtgggtgcgccacaggagatagtggctgccaaccagagaggtagcctataccagtgcgattatagtacaggttcatgcgagccgatccgcctgcaggtgccagtcgaggccgtgaatatgtcacttggcctcagcctggccgctactacatctcctcctcagctgctggcctgtggccctacggtacaccaaacatgctccgagaatacctatgtgaagggtctgtgcttcctgttcggtagcaatctacgacagcaacctcagaagttcccagaagctctgcgcggatgtcctcaggaagatagcgatattgctttccttatagatggcagcggaagcatcattccccacgactttcgtcgcatgaaagagtttgtgtctaccgtgatggagcagctcaagaaatccaagaccttgttctctctgatgcagtatagcgaggagtttaggattcatttcacctttaaagaatttcaaaataaccccaacccccgctcattggtcaaacccataacacagctgttgggccgcactcacacagctactggtatccgcaaggtggtgagagaactgtttaacattaccaatggggctaggaagaacgcatttaagatcctggtagtcatcaccgatggcgaaaaattcggcgaccctttggggtatgaggatgtgattcccgaagccgacagggagggcgtcatccgctacgtgatcggtgtaggagacgcattccgctcagaaaaatccagacaggagttgaacaccatcgccagcaagccaccaagggaccatgtgttccaggtgaacaattttgaagccttgaaaacaattcagaatcagttgagagagaagatcttcgccatagaaggaacccaaactggaagcagctcttcctttgagcatgaaatgagtcaggagggcttcagcgcagcaatcactagtaacgggccactgttatctacagtgggatcatacgattgggccggcggagtctttctctacacttccaaggaaaaatctacttttatcaatatgactagagtggacagcgatatgaacgacgcttatctgggctacgccgcagccattatcttgcggaacagggtacagagcctcgttcttggagccccccggtatcagcatattgggcttgtggctatgtttagacaaaatactggtatgtgggaaagcaatgccaacgtcaaaggaacccaaatcggcgcctacttcggggcgtccttatgcagcgtcgatgtagattcaaacggatctacagacctggtgctgattggggctccccactactacgaacagacccgaggcgggcaagtgagcgtttgtcctttgccacggggcagagccagatggcagtgcgatgcagttctgtacggtgaacagggccagccttgggggcgtttcggcgctgccttaaccgtactaggggatgtgaatggggacaaactcacagatgtggcaatcggggcaccgggggaagaggacaacaggggtgcagtttacctgtttcatggaaccagcgggtcaggaatcagccccagccactctcagcgcatagcaggcagcaagctctctcctagattgcaatattttggccagtctctttccggaggccaagatctcacaatggatggcctcgtggacctgacagtgggggcacagggtcacgtattgctgctgagatcccagccagtattgagggttaaagcgataatggaatttaacccacgcgaagtggcaaggaacgtcttcgagtgtaacgaccaagtcgtcaagggaaaagaggcaggggaggtacgggtgtgtctccatgttcagaagtccactagagacagattgcgcgagggccaaatacaaagcgttgtgacctacgacctagcgctggatagcgggcgtccccactcgagagcggtattcaatgaaactaagaactccaccagacggcagacccaggttctcggccttactcagacgtgcgagacacttaaattgcagttgccgaattgtatcgaagaccccgtctcccctattgtgctcaggctgaacttctcactcgttgggaccccgttatccgcctttgggaacctgcggccagtgcttgccgaagacgcccaacgattgttcaccgccctgttcccatttgaaaaaaattgtgggaacgacaacatctgccaagatgatttaagcattacattttcatttatgtctctggattgcttagtcgtcggcggaccaagagagtttaatgtaactgtaaccgtccggaatgacggggaagatagttaccgaacccaagtgacattttttttccctctagacctcagctacaggaaggtgtctactctgcagaatcagcgcagtcaaaggtcctggagactggcatgcgagtcggctagcagcacagaggtatctggcgctctgaaatcaacgtcctgctccataaaccacccaattttccctgagaactcggaagtgacttttaacattactttcgatgtggattctaaagcgtccttagggaacaagttgctgctgaaggcgaatgtgacatctgagaataacatgccccggaccaacaagactgagttccagcttgagctgccagtgaagtatgccgtctatatggtagtaaccagtcatggggtgagtactaaatacctgaattttacggccagcgagaacacttccagggttatgcagcaccagtaccaggtctccaaccttgggcagaggtccttgccaattagcttagtttttcttgtgccggtgagattgaaccagacggtaatctgggacagacctcaggtaactttttccgaaaatctcagctcaacatgtcataccaaggagagactgccatcccactccgacttcctggctgagttacggaaagcaccggtggtgaattgtagtattgctgtatgccagcgaattcagtgtgacatacccttctttgggatacaggaagagttcaacgccacactgaaagggaaccttagttttgattggtatattaaaacctcccacaatcacctgctgatcgtgtccaccgccgagattctttttaacgactcagtattcaccctgttgcctggacagggtgccttcgtgagatcccaaacagaaactaaggtggagccatttgaggtgcccaacccattgcccctcattgtcgggtcctctgtcggcgggctgctactgctagcactaataactgccgcattgtataagttaggattctttaagcggcagtacaaggacatgatgtcagagggaggaccgccaggggccgagccacaatag

SEQ ID NO: 120778 - DNA, 3462 bp, synthetic construct
  misc_feature 1..3462: note = Description of Artificial Sequence: Synthetic coding sequence
  source 1..3462: mol_type = other DNA
atggctttacgcgtgctattgctgactgccttaaccttgtgtcacgggtttaatctcgacaccgaaaatgccatgacatttcaggaaaacgcacgaggtttcggccagagcgttgtgcaacttcagggatccagagtggtcgtaggcgcccctcaggagatcgtggcagctaaccagcggggaagcctgtaccagtgcgactactctaccggaagttgcgaacctattcggctgcaagtgccggtggaagcggtgaatatgagccttggcctgtccctggccgccaccacaagccccccccagctgttggcatgcgggcctaccgtgcaccagacatgcagtgagaatacctatgtgaaaggactgtgtttcctgtttggaagcaacctcagacagcaaccacaaaaattccccgaagccctgcgcggttgccctcaagaagatagcgatatcgcgtttttaatcgacgggtccggctctatcattccgcatgatttcagaaggatgaaggagttcgtgtccactgtaatggagcagcttaaaaaatccaagactttgttcagtctgatgcaatactccgaggaattcaggatccacttcaccttcaaagaattccaaaataaccccaacccaagatccctggtgaaaccgatcacacagctgctcggccgaacgcatacagcaacaggaatccggaaggtcgtgcgcgagctgtttaacatcacgaacggtgcaagaaagaatgcttttaagatcttagtcgtgattacagacggagaaaagtttggcgaccccttaggttacgaggatgtgatcccagaagccgaccgggaaggggtgatccgatatgtcataggggtgggcgacgcatttcggtctgagaagtcccggcaggagctgaacacgatcgcttccaagcctcctcgagatcatgtcttccaggtgaataattttgaagctttaaagactatccagaatcagctgagagagaaaattttcgcaattgagggcacccagaccgggtccagttcgagtttcgaacacgagatgtcacaagaggggttcagtgccgccataaccagcaacgggccactgctaagcacagttgggagctatgattgggcagggggagtgtttctttacacatccaaggagaaatctactttcatcaacatgacacgagttgactctgatatgaacgatgcctacctcgggtatgcggcggctataatcctcaggaaccgggtgcagtccttagtgttaggcgctccgaggtaccagcacattggactggtggccatgttccgacaaaatacgggcatgtgggaaagtaatgccaatgtgaaaggcacacagatcggggcctacttcggggccagcttgtgtagcgtagacgtggactccaacggctcaactgatctcgttctcataggagcgccccactactatgagcagacccgtggggggcaggtgtccgtgtgtccattgccgcgagggcagcgcgcaagatggcaatgtgacgccgttctgtacggggaacagggtcagccctggggcagattcggagccgctcttactgtactgggagacgttaacggcgacaaactgactgacgtcgccatcggcgcccccggtgaggaggataatcgcggtgctgtgtacttgttccatggaactagtggtagcggcatatcacccagccactcccagcgaatagcgggaagcaagctttctcctcgcctccagtattttgggcaatcactctcaggtggacaggacctgaccatggatggtctcgtggacctcactgtgggagcccaggggcacgtgttactcctgagaagccaaccagttctgcgtgtgaaggctatcatggaatttaatccccgcgaggtcgcgcggaacgtgttcgaatgcaacgaccaagtggtgaaaggcaaagaagctggagaagtgcgtgtctgcttacacgtgcagaaaagcactcgagatcgtttgagagagggccagattcaatccgttgtaacatatgaccttgctctagacagtggaagaccacactctcgagcggtattcaacgagaccaagaacagtacccgacgccagacacaggtgcttggactgacccagacatgcgagactctgaagttacagcttcctaattgtatcgaagatccagtgtcacccatcgtgctgcggttgaatttttctctggtgggaactcctcttagtgcattcggcaaccttcggcctgtactggctgaggatgcccagcgtctctttacagccctattcccctttgagaagaattgcggtaatgacaacatttgtcaagacgacctcagcatcacgtttagcttcatgtctttggattgtctggtcgtcggaggacctcgcgagtttaatgtcacagtcacagtgagaaacgacggtgaggattcgtaccgtacccaagttacatttttcttccctctggacctttcgtataggaaagtgtccactctgcagaatcagaggtcccagagaagttggagactggcatgtgaatccgccagtagtacggaggtgtccggggcgctaaagtccacttcctgcagcattaaccatcctatattcccagagaattctgaagtcactttcaacataaccttcgatgtcgactctaaggcatcactgggcaataaactactactcaaagcgaacgttacgtccgagaacaacatgccacgtaccaataaaaccgagttccagctggagcttcccgtgaaatacgctgtgtacatggtcgttacttcacacggggtgtccacaaagtacctgaacttcactgctagcgagaacacgtcccgggtgatgcagcatcaataccaggtgtccaacctgggacaacgtagtctacctataagtctggtctttttagtgccagtccgactaaaccagactgtgatctgggaccggccccaggttacattctctgagaatctttcctctacatgtcacacaaaagagaggctcccctctcattccgactttttagctgaactgcggaaagctccagtggtaaattgttctatcgccgtgtgccagagaatacagtgtgatatacccttctttggcatccaagaggagttcaatgcgacgctgaaaggtaatctctctttcgattggtatataaagacctctcacaaccatctcttgatcgtgtcaaccgccgagatactgtttaatgatagcgtgttcaccttactacccggccagggggccttcgtccgatctcagactgaaacaaaagtggagccgtttgaagtccctaaccccctcccactcattgttggtagctctgtcggtggattactgttgctagccttaattactgcagctctctacaaactgggcttcttcaagagacagtacaaggatatgatgagcgaagggggacctccgggagctgaacctcagtag

SEQ ID NO: 120779 - DNA, 3492 bp, synthetic construct
  misc_feature 1..3492: note = Description of Artificial Sequence: Synthetic coding sequence
  source 1..3492: mol_type = other DNA
atgaccaggacacgcgccgcactcctactgtttacggctcttgctacctccctcggttttaaccttgacacggaagagctcacagcttttcgggtcgactctgcgggctttggtgactcggtcgtccagtacgcgaactcatgggtcgtcgtcggggcaccccagaagatcactgccgccaaccagacaggaggtctgtaccaatgcggatatagtacaggggcgtgtgaacccatcggactccaagtccccccagaggctgttaacatgtcccttggattgtccctggcctctaccacctcccccagccaacttctcgcctgcggcccaaccgtgcaccatgaatgtggaagaaacatgtatctgacagggctttgctttctgttaggacctacacagctcacacagaggctgcctgtcagcagacaagagtgtccacgtcaggaacaggacatcgtttttttaatcgacgggtccggttccatttcaagtaggaatttcgctaccatgatgaattttgttagggcagttattagccaatttcagaggccatccacacagtttagcctgatgcaattttctaataaatttcagacccacttcacctttgaggagttcaggcgttcgtcgaacccactgtccctcctggcgagcgtccaccagcttcagggcttcacctatacagccaccgctattcaaaatgttgtacatcgcttattccacgcaagttacggagctaggagagacgctgcgaaaatcctcatcgtgattactgacggaaagaaagaaggggactccctggattacaaagacgtgattcccatggcggatgcagcagggatcattcggtatgcaattggcgtgggactcgcctttcagaaccgtaacagctggaaggaactgaacgacatcgcctccaagcctagtcaggagcacatttttaaggtggaggacttcgatgccttgaaggatatccaaaatcagttgaaggagaagatcttcgccatagaagggacggaaaccaccagctcatcatccttcgagcttgagatggcccaggaagggttttccgccgtgttcacacctgatggaccggtcctaggcgccgtgggatcttttacgtggtccgggggagcttttctgtatccaccaaatatgagtcccactttcatcaatatgtcccaggaaaacgtcgatatgagagactcatacctcggctattcaacagaacttgccctttggaagggagttcagtccctggtcctgggggcccctcggtaccaacacaccggcaaagccgtcatattcacacaagtctcgagacagtggagaatgaaggcagaagtcaccgggacccagatcggctcatactttggggcctcgctctgcagtgtggatgtggactctgacggctcaacagatctggttctgataggcgcccctcactattatgagcagacacgaggcgggcaggtatccgtgtgcccgttgccacggggctggcgcaggtggtggtgcgatgctgtgctgtatggagaacagggacacccctggggaagatttggcgctgcccttactgtactgggtgatgtgaacggcgacaaacttacagatgtcgtcatcggcgcacccggcgaagaggagaacaggggagctgtgtatctattccacggcgttttgggtccttctatcagcccttcccatagtcagaggatcgcgggtagtcagttatctagcaggctgcagtattttggccaggcccttagtggcggtcaggacctcacccaagacgggctggtggatctggctgtgggggcaaggggacaggtgctattgctgcgtactagacctgtgctatgggtaggggtgtctatgcagtttatcccggcggaaataccccggtcggcatttgaatgtcgagagcaggtcgtgagcgagcagacactcgtgcagagcaatatttgcttatacatcgataagagatctaagaacctgctaggctccagagacttgcaaagttccgtaacgcttgacctggcattggaccctggccgtctgtcgcctagagctactttccaagaaacgaaaaatcgctcactgagtagggtgcgcgtcttgggcctgaaggctcactgtgaaaacttcaacctcctcctaccgtcttgtgtcgaagatagcgtcacccctatcactttgagattaaacttcactttagtgggaaagcccctcctcgcctttaggaacctccgtccaatgctcgcggcagatgcccagagatactttaccgcgtccctgccatttgagaaaaattgcggcgctgatcatatctgccaggacaacttggggataagtttttccttccccgggttgaaaagcctgctggttggctccaatttagaactcaatgccgaggtaatggtgtggaatgacggggaagactcttacggaacaactataacattttcccatcccgcgggtcttagctacaggtacgtagccgaaggccaaaagcagggacaactcaggtcgcttcacctcacctgcgatagtgctcccgtagggagccagggaacatggagcacctcatgtcgaatcaatcacttaatcttccgaggcggtgcacaaatcacattcctggcaacctttgatgtgtcccccaaggctgtgcttggtgataggcttctgttgactgccaacgtaagcagcgaaaacaacactccccgcacctctaagacaacgttccagctggagttgcctgtcaagtatgcggtgtacaccgtggtgtcctcccacgaacagtttacgaagtatctgaatttttccgagtccgaagagaaagagtcacacgtggctatgcacaggtaccaagtgaacaacctgggccagcgcgatcttcccgtgtctatcaatttttgggtccccgtagagttgaatcaggaagccgtctggatggacgtggaggtcagccatccacagaatccctctttgagatgcagcagcgaaaagatagccccgcctgcatctgattttttggctcacattcagaagaacccagtgctcgactgcagcatagccggctgtttgcggttcagatgcgatgtgccctctttctcggtgcaggaagaactggactttacgctgaagggtaacctctcattcggatgggtgcgccagatcctgcagaaaaaagtctcagttgtgagcgtcgccgaaattacatttgatactagcgtatactctcagttaccaggtcaggaggctttcatgcgagcacagactactactgtgcttgaaaagtacaaggttcacaacccaacaccactgatcgtggggtcaagcattggaggcctgctgctcctggccttgattactgccgttctgtacaaagtcgggttctttaagcggcagtataaggaaatgatggaagaagctaatggtcagatcgcccctgagaacggcacccagacaccttcccctccatctgagaagtag

SEQ ID NO: 120780 - DNA, 5469 bp, synthetic construct
  misc_feature 1..5469: note = Description of Artificial Sequence: Synthetic coding sequence
  source 1..5469: mol_type = other DNA
atggccggaccacggccaagcccatgggcacgcttattgttggccgcccttattagtgtttctctctcagggactttagccaatagatgtaaaaaggctcccgtgaagtcgtgcaccgaatgcgtaagggttgacaaggactgtgcctactgcactgacgagatgttccgcgacaggagatgtaatacacaggccgagctgctggccgccggatgccagagggaaagcatcgtagtcatggagtcatcttttcagatcaccgaagagacacagattgatactaccctgagacgaagtcaaatgtctccacagggtctacgagtgcgattaagacccggggaggaaaggcattttgaacttgaggtctttgagccactcgagagcccggtggacctgtatatcctcatggattttagcaacagcatgagtgacgacctggataatctgaagaaaatgggtcagaacttggcgagagtcctaagtcagcttactagtgactataccataggattcggtaaatttgtggacaaggtcagcgttccccagaccgacatgaggcctgagaaattaaaggagccttggccaaactcagacccccccttttcattcaagaatgttatatcacttacagaggacgtggacgagttccggaacaagctccaaggtgaacggatatcaggcaacctggatgcccctgagggcggattcgacgcgatcctgcagacagcagtgtgtacccgagatattggctggagacctgattccacacatttgctagttttctcaacggaatccgcgtttcactatgaagctgacggggccaatgtgttggccggtatcatgtctcgcaacgacgagaggtgccatctggacacaacagggacctacacgcaataccgtacccaggattatccctctgtgcccactctggtacgcctcctggcaaaacataacataatacccattttcgctgtgaccaactactcatactcttattacgaaaaattacacacttatttccctgtctcctcgttaggcgtgctgcaagaagattcttcaaacatcgtggaattactggaagaggcattcaatagaatccggtctaacctagacattagggccttagactcgccgcggggactgagaactgaagtcaccagcaagatgttccaaaaaacccgaaccggctccttccatatccgcagaggagaggtcggcatttaccaggtccaactcagggccctggagcatgtcgatggcactcacgtatgccaactgcccgaagatcagaagggcaatatccaccttaaaccctcattctccgatggcctgaagatggatgccggcattatttgcgacgtatgtacctgtgagctccagaaggaagtgaggtccgctaggtgtagtttcaacggtgattttgtttgtggccagtgtgtatgctccgagggctggagtgggcagacctgtaattgctcgacaggttcgctgtccgacattcagccttgcctgagagagggcgaggataaaccctgctctggccgtggggaatgccagtgcggccattgtgtttgctatggggagggacgctacgagggacagttttgtgagtatgacaattttcagtgcccccgcacctccggcttcctctgcaatgatcgcggccggtgtagtatggggcagtgcgtttgtgaacctggttggaccggcccttcttgtgactgccccctcagtaacgctacttgcattgactcgaacggcgggatctgcaacgggcgaggacactgcgagtgcgggaggtgccactgtcaccaacagtcactatacacagatacaatctgcgagatcaattactcggctatccatccaggcctctgtgaggatcttcggagctgcgtccaatgccaggcgtgggggactggtgagaagaaagggcgcacctgtgaggagtgtaactttaaagtgaaaatggtcgatgaactcaagcgggctgaggaggtagtggtcaggtgtagtttccgcgacgaagacgacgattgtacgtacagctacactatggaaggcgacggcgctccaggtccgaattctaccgtgcttgtccataaaaaaaaggactgtccacctgggtctttttggtggctgatccctctgcttctgctcctgctgccattgcttgcccttctgctccttctgtgttggaaatattgtgcgtgctgcaaagcttgcctagccctgcttccttgctgtaatcgcggacatatggtgggcttcaaagaggatcattatatgctacgagagaacctgatggcttcggaccatttggatactcctatgctccggagtggcaacctgaagggtcgagatgtcgtcaggtggaaagtgaccaacaacatgcaacgccctggatttgcaacccatgccgcatccataaatcctacagagctggtcccatatggcctcagcctcagactggccaggttatgtacggaaaatttgctgaaacctgacacaagggagtgcgcgcagctccgtcaggaggtggaggagaatctaaacgaggtgtaccgccagatatccggcgtgcacaagcttcagcagactaaatttcggcagcagccaaacgccgggaagaagcaggaccacaccatagtggacactgtgcttatggcaccgcgcagcgctaagcctgctctgctgaaactcacagaaaagcaagtggagcaaagggccttccatgacctcaaggtggcccccggctattatacactcacggctgatcaggacgcaagaggcatggtcgagtttcaggaaggcgtggagctggtcgacgtgagagtaccgttgttcattcggcccgaagatgacgatgaaaagcagctcctggttgaggctattgacgttccagccggaaccgctacccttggtcggcggctggtaaatataaccataatcaaggaacaggcccgagacgtggtatccttcgagcaaccagaattttccgtgagccgtggcgaccaagttgcgaggatccccgtgatcaggagggttctggatgggggcaaatcccaagtgagctatagaacgcaggacggaacagctcagggaaatcgcgactacatccccgtggagggcgagctcctcttccagcccggggaggcttggaaagaactccaggtgaaactgctcgagctgcaggaggtcgacagtctcctgagggggaggcaggttagacgatttcatgtccagctttctaatccaaagttcggtgcacaccttgggcagccccactctacaaccattataatacgagaccctgacgaattagatagaagcttcacttcacagatgttgtcatcccagcctccccctcacggggatctgggagcacctcaaaatcctaatgcaaaggcggctgggtccagaaagatacacttcaactggttgccaccttcaggcaaacccatgggctaccgggttaagtattggatccaaggcgacagcgagagcgaggcacatctactcgactctaaggtcccaagcgtggagctcactaatttgtacccctattgcgactatgagatgaaggtatgcgcctacggcgcccagggggaaggaccttatagctctctggtctcctgcaggactcatcaggaagtcccgtctgagcctggacgcctagcattcaacgtagtttctagcactgtcacccagctaagttgggccgagcctgccgaaaccaatggcgagatcactgcctacgaggtatgttatggactagtgaatgacgataataggcccattggtcccatgaagaaggttctggtcgataacccaaagaatcgcatgctcctgattgaaaatctccgtgagagccagccttatagatacaccgtaaaagcacgaaacggggctggttggggcccagaaagggaggccattataaaccttgctactcagccaaaacgaccgatgtccatccctattattcctgatattcctatcgtcgacgcccagagtggcgaagattacgattcctttcttatgtacagcgacgatgtcttacgctcgccttcgggctcacaaagaccatctgtaagtgatgatactggctgtggatggaagtttgaacccctgctgggagaggagctggatctgaggcgtgttacctggagactgcccccagagctgatcccccggctgtccgcctcctcaggtcgttcttccgatgccgaggctccccacggccctccagatgatggcggcgccgggggcaaaggcggtagcctgcctagaagcgcaacccccgggccaccaggagagcacctggtgaacggccgaatggactttgccttccccggcagcaccaattccctgcaccgcatgacaactaccagtgccgccgcttacggcactcatctgagcccccatgtaccccacagggttctgagtactagttctaccctgactcgtgattacaacagccttacaaggtcagagcactcacattccacaacgcttcctcgtgactatagcacccttacgagcgtgagttctcacgactctagactgacagccggagtaccagacacccctacccgtctcgtgtttagcgctttaggaccaacaagcctacgggtgagttggcaggagccccgttgcgaacgcccgctacagggttactcagtggagtatcagctacttaatggcggcgagttacatcgacttaacatccccaatcctgctcagacatcggtggttgtcgaggacttactgcctaaccactcctatgtgttccgagtcagggcccagtcccaggagggttggggccgcgagcgcgaaggagttattacaatagagagccaggtgcatccacagtcacccttgtgtcccctccctggatcagcctttaccctaagtaccccttcagctcccggacctctggtgtttactgccctcagtccggactctttgcagctgtcatgggagcgacctcgcagacccaatggcgacatagtgggctacctcgtgacctgtgagatggcccaggggggaggaccagctaccgcctttcgggtggacggtgatagcccagaaagccgcctgacggttcctggcctcagtgaaaacgtcccatataagttcaaagtgcaggcccgtacgacagaaggctttgggcctgagcgtgagggaatcattacaatcgagagccaggatgggggaccatttccccagttggggtcccgagccggcctgttccagcaccccttgcagagtgagtattcctccattaccactacacacactagtgccacagaacccttcctggttgatggtctaacgctgggcgctcagcacctagaggctggaggaagtttgacacgacacgtgacccaggaattcgtaagccggacacttaccactagcggaaccctttccactcacatggaccagcagttctttcagacctag

SEQ ID NO: 120781 - DNA, 5418 bp, synthetic construct
  misc_feature 1..5418: note = Description of Artificial Sequence: Synthetic coding sequence
  source 1..5418: mol_type = other DNA
atggccgggcccagaccctcgccatgggctcggctgctcctggccgctttgatcagcgtctccctcagtggcactctggctaatcgctgtaaaaaagcccccgttaaatcatgtaccgagtgcgtccgggtggataaggactgcgcgtattgtaccgacgaaatgtttcgagatcgcaggtgtaatacgcaagctgaactgctagctgccggctgccaaagagagtccatcgtggtcatggaaagttcttttcagattaccgaggaaacgcagatcgacacaactctcagaagaagtcagatgtccccccagggattacgggttagactccggcctggagaagagcggcatttcgagctggaggtattcgaaccattagagtcaccggtcgacctgtatatcctcatggacttttccaattccatgtcagacgatcttgataatctcaagaagatgggacagaaccttgctagagtgttatcccaactgacatccgattataccatcgggttcggaaagttcgtcgataaagttagtgtgccccaaaccgatatgcggcctgaaaaacttaaagaaccttggccaaactcagatccaccttttagctttaagaacgttataagtctcacagaggacgtggacgaattccgtaacaagctgcagggcgaaagaatctcgggaaacctggacgcccccgagggcgggttcgacgccatcctgcagaccgcagtctgcacccgcgacatcggatggagacctgatagcacccacctgttggtattttctacggagagcgctttccattatgaagctgacggtgctaatgtgttggctggaattatgtctcgtaatgatgaaaggtgtcacttggacaccactgggacttacactcaatataggacccaggactatccatcagtccctactctggtgcgtctcctcgccaagcataacatcatacccatttttgcagtgaccaactatagctattcgtattatgagaagcttcatacctacttcccggtgtccagtctgggggtacttcaagaggactcctctaatattgtggaactgctggaggaagcattcaacaggataaggtctaatcttgacattcgcgccttggattcgccgcgaggcttaaggacggaggtgacctctaaaatgttccaaaagacaaggactggatctttccacattcgtaggggggaagtcgggatatatcaggttcaactgcgcgcactggagcatgttgacggaacacatgtatgccagctccccgaggaccaaaaaggaaacattcatctcaagccttcctttagtgacgggctcaaaatggatgctggcattatttgtgatgtgtgtacctgtgaattgcagaaagaggttcgatccgctcgctgttcatttaacggagactttgtgtgtggacagtgtgtgtgctccgagggctggtctggccaaacctgtaactgctcaactggatcactctccgacattcagccgtgtcttagagagggtgaggacaaaccatgctctggaagaggcgagtgtcagtgcgggcattgcgtgtgctacggcgaaggaaggtacgaaggacagttctgcgagtatgacaatttccagtgccccagaacctctgggttcctgtgtaacgaccgcggtcgctgtagtatggggcagtgtgtgtgcgagccgggctggaccggcccctcctgcgactgcccccttagtaatgctacgtgtatagactctaacggcggtatctgtaacggacgaggacactgcgagtgtgggcggtgtcactgccatcagcaatctctgtatacagacactatctgtgagatcaactactcagccatccatcctggtctgtgcgaagacctacggagctgtgtccagtgccaggcatggggtaccggggagaagaaaggaagaacttgcgaagagtgcaactttaaggtaaagatggtagacgagctcaagcgcgctgaggaggtcgtggttcggtgtagtttccgagatgaagacgatgattgtacttactcatacaccatggagggtgacggcgctcccggtcctaatagcactgtactagtgcacaagaaaaaagactgcccccctgggtcattctggtggctaatccctcttctgctcctgttgttgcctctgcttgctctactcctccttctgtgttggaaatactgcgcatgttgtaaagcctgcttagcccttctcccatgctgcaatcggggccacatggtcggctttaaagaagatcactatatgctgcgtgagaaccttatggcctctgaccatctcgacacgcccatgctgcgtagtggaaatttaaaaggcagggacgtcgtgcggtggaaagtcaccaacaacatgcagcggcctggattcgccactcacgccgcaagcatcaatccaacagagctggtgccttatggcttgagtttgcggttggcgaggctgtgcactgaaaatctcctgaagccggacactcgggagtgtgcacagctccgacaggaagtcgaggaaaatttaaatgaggtataccggcagatatctggtgtccataaacttcaacagaccaaattccgacagcagccaaacgcgggcaagaaacaggaccacaccatagttgacacagtcctgatggctccaaggtccgcaaagcctgctttgcttaagctaacggaaaagcaggttgaacagcgagcctttcatgatcttaaggtcgcccccggctattacactctgaccgctgaccaggacgcacgcgggatggtcgagttccaagagggagtcgagctggtggatgtgcgtgtgcctctgtttatcagacctgaggatgacgacgaaaagcagctcctggtagaggccattgatgttccagccggcaccgccactctgggcagacgcctggttaacataacgataatcaaggagcaggcccgcgacgttgtgagcttcgagcagcccgagttctccgtcagtagaggcgaccaggttgcccgcattccagtgatcaggagggttctcgatggaggtaaatcccaggtctcatacagaactcaagacgggacggctcaagggaatcgggactatatcccagtagagggggaattgttgttccagccgggcgaagcctggaaggagctgcaggtaaaactgctggagctccaagaagtggacagcctgctacgcggacgccaggtgagacgttttcacgtccagctgagcaaccccaagtttggcgcccacctgggacaaccacactcgaccacgataattatcagggatccagacgagctggacaggtctttcaccagtcagatgctatcttcacagccccctccccacggcgatctgggcgcccctcagaatcccaatgcaaaggccgctgggagccgaaaaattcattttaactggctcccaccttccgggaaacctatgggctacagagtgaagtactggatccaaggagacagcgaatcagaagctcacctgttggactccaaagtaccttctgtggaattgactaacctttatccctattgtgattatgagatgaaagtgtgtgcatacggcgcccagggagagggaccctactcgtcactggtgtcatgtaggacgcatcaagaggtgccctccgagcccgggcgactggcctttaatgtggtctctagcactgtgacccaacttagttgggcagagcctgctgagacaaacggcgagatcactgcctatgaggtgtgctacgggttagtaaatgacgataaccgaccgattggcccaatgaagaaggtactcgttgacaatcctaaaaaccgcatgctgctcatcgagaaccttagggagtcccagccttatagatatactgtcaaagcccggaacggcgcgggatggggccctgagcgcgaagctatcataaacctcgccacacagccaaagcggcctatgagcatacctattatccccgacatccccatcgtggacgcccagagtggcgaagattacgatagttttcttatgtactctgacgacgtacttcggagcccctcgggaagccagaggccatctgtgtcagacgatacggaacatctggtgaatgggcggatggacttcgcctttccagggagcaccaattccctccacaggatgacaaccacttctgccgcggcttacgggactcacttgtccccacacgtgcctcaccgggtcttgtccacgtcgtctactcttaccagagactacaattccctcacccgaagcgaacacagccatagcacaaccctcccaagagactattcgactcttacctccgtttcctcccatgggttgccacccatctgggagcacggcaggtctcggctgcctctctcttgggccctcggttctaggtcccgagcgcagatgaaaggcttcccaccatctcggggccctcgcgattccatcattctagccggaaggccagccgcccccagttggggcccggatagccgacttacggcgggagtgcccgacacacctacgcgcctggtgttttcagctctgggcccaacctctcttagggtgagttggcaggagcctcgctgcgaacggcctctgcaggggtatagcgtggagtatcagcttctgaatggaggtgagttacacagactaaacatcccaaatccagctcagacaagcgtggttgtggaggatctgttaccgaatcactcctacgtcttcagggttagagcacaatcacaagaaggttggggccgggagagggagggagttatcacaatagaatctcaggtccacccgcagagccctctgtgtcccctgcctggaagcgcttttacgcttagcaccccatccgcacccggccccctggtgttcacagctctatcccctgactcgcttcaactgtcgtgggagcggccgcgtcgtccaaacggcgacatcgtaggctacctggtcacatgcgagatggctcagggcggaggtccagccactgcctttcgcgttgacggcgacagcccagagtctcggctgaccgtaccaggcctgagcgagaatgttccatataaatttaaggtgcaggccaggactaccgaggggttcggaccagaacgggagggtataattacaatcgaatctcaagacggcggaccatttccccagctgggatcacgtgctggactattccagcatcctctacagtccgagtattcatctatcacaactacccacacatcggccaccgaaccttttttggtcgatggactgacactgggtgcccagcacctggaagcaggtgggtcgctgacccggcatgtcacccaagagtttgtgtcccgaactttgaccacgagcggcactttaagcacgcacatggatcaacagtttttccagacatag

SEQ ID NO: 120782 - DNA, 5418 bp, synthetic construct
  misc_feature 1..5418: note = Description of Artificial Sequence: Synthetic coding sequence
  source 1..5418: mol_type = other DNA
atggcaggtccgaggccttccccttgggccaggcttctcctggctgccctcatatctgtcagcctgtccggcaccttagcaaacaggtgtaaaaaggctcccgttaagagctgtaccgagtgcgtacgcgtggacaaagactgcgcttattgtactgacgagatgtttcgggaccggcgctgtaatactcaggcagagcttctagcagcagggtgtcaacgggagtctattgtggtgatggaaagcagcttccagatcaccgaagagactcagattgacacaacacttcgacgaagccagatgtctccacaaggacttcgggtgcgtcttaggcctggcgaagaacgacatttcgagctggaagttttcgaaccactggaaagtccagtagatttgtacatcctgatggattttagtaatagtatgtcagacgacttagataacttgaagaaaatggggcagaacctagcgagggttttgtcccaactgacatcagactacacgattggtttcggaaagttcgttgataaggttagtgttcctcaaaccgatatgaggcctgaaaagctgaaagagccgtggccgaattctgatccacccttcagcttcaagaacgtgataagcctgacagaggatgtggacgaattccgaaacaaactgcagggagaacgcatttctggcaaccttgatgcacctgaaggtggctttgacgctatcttacagacagcagtatgtacaagggatatcggatggaggccagatagtactcatctgctggtcttcagcaccgagtcagctttccactacgaggcagacggggccaacgtgctggctggcatcatgagtagaaatgatgagcgctgccacctggacaccaccgggacctacacccaataccggactcaggactaccccagcgtgcccacactggtgagactgctggctaaacataatataattcccatctttgcagtgaccaactattcttattcatattacgagaagctgcacacctattttcctgtttcttctctcggggtgctacaggaagatagcagcaacatcgtcgagttgctcgaggaggcgttcaatagaatccggtccaacctggacatcagggcgcttgactcaccaagagggctgagaactgaggtgacaagcaagatgtttcagaagacccggaccgggtccttccacattcggcggggcgaggtgggaatctaccaggtgcaattacgagccctggaacatgtcgacggaacacatgtgtgccaattaccggaggaccagaagggcaacatccaccttaaaccctcctttagcgatggtctgaaaatggacgccggaattatttgcgacgtgtgcacctgcgagctccaaaaagaggttcgcagtgcccgatgctcatttaatggcgattttgtatgcggacagtgcgtatgctccgaaggctggagcgggcagacatgtaactgctcaaccgggtctctgtcagacatccagccatgcctgagagaaggtgaagataaaccctgctcaggccggggagagtgccaatgtggacactgtgtttgctacggagagggccgatatgaaggacaattctgcgaatatgataattttcagtgcccccgcacaagtggctttctgtgcaacgaccgcggccgttgcagcatgggccagtgcgtgtgcgagcccggatggaccggcccttcctgtgactgtcccctgtccaatgcaacttgtatcgattctaatgggggtatctgcaatggcaggggtcattgcgagtgtgggagatgtcactgccatcaacagtcattgtacacagacacaatttgcgagatcaattatagcgccattcacccaggcctgtgcgaagatctgaggtcctgtgttcagtgtcaggcttgggggaccggcgagaagaaaggaaggacctgcgaggaatgcaacttcaaggtcaagatggtggacgaactgaagagggcagaggaagtggttgttcgttgtagctttagggatgaggacgacgactgcacgtatagttataccatggagggggacggagcccccggacctaacagcactgtcttagtgcacaaaaagaaggattgtccccccggctcattctggtggttaatccccctcctgctactactcctgccccttctggctctgctccttttgttatgctggaagtactgtgcttgctgcaaagcctgtctagcactactgccctgctgtaaccgaggacacatggtgggatttaaagaggatcattatatgttgcgagaaaacctgatggctagtgaccatctcgacacgccgatgcttcgctcagggaatctgaaaggtagggatgtggtgcggtggaaggtcacaaataatatgcagcgacccggctttgccactcacgctgccagcattaaccctacagagcttgtaccttacggactcagtcttcgccttgcacgcctgtgtactgagaatctcctcaagccagacacacgcgagtgcgctcagcttagacaggaagtggaagagaatttgaatgaagtgtaccgccagatctcaggggtccataagcttcagcagacaaagttcaggcaacaacctaatgcgggaaaaaaacaggaccataccatcgttgacactgttctgatggcacctcggtcagctaaaccggccctgctgaaactcaccgagaagcaggttgaacagcgcgcctttcatgatttgaaggttgcaccaggatactacaccctcaccgctgaccaagatgctcggggaatggtggagtttcaagagggcgtggaactggtggacgtacgcgtccctctgtttattaggcctgaggacgatgatgagaaacagctcctcgtcgaagccatcgatgttccagccggtaccgccactttaggtaggcggctggtgaacattacgataatcaaggagcaagctcgggacgttgtgagttttgaacagcctgagttttccgtgtccaggggtgaccaagtggcccgcatcccagttatcagacgagtgctcgacggcggcaagagccaggtttcttataggacgcaggatggtacagcccaggggaaccgggactatataccagttgagggagaacttcttttccaaccaggcgaagcttggaaggagcttcaggtgaaactgctggagttgcaggaggtggattctctcctgcgcggacggcaggtgcggaggttccatgtccaattaagcaatcccaaattcggggctcatctgggacagccacattcaactacaattattatcagagaccccgacgagctcgaccgctcatttactagccagatgctgtctagtcagcctcctccccacggcgatctgggggctccccaaaaccctaacgccaaggcggccggttcccggaaaattcattttaattggttgccaccatcggggaaacctatgggttaccgagtgaagtactggatccagggtgatagcgagagcgaagcgcacctgctggacagtaaggtccctagtgtggaattaaccaacctgtacccctattgcgattacgagatgaaagtatgcgcctatggggcccagggagaggggccatacagctcgctcgtaagctgtcgtacccaccaggaagtcccctccgaacccggacgactggcgtttaatgtcgtttcgtctactgtgacccagctgtcctgggccgaacccgctgaaaccaatggtgaaatcaccgcttatgaagtctgctatggcctggtcaatgatgacaatcgcccgatcggccccatgaaaaaagtgctcgttgacaaccctaagaatcggatgctcctcatcgaaaatttacgtgaaagccagccctaccggtacacagtgaaagcccgtaatggagcagggtgggggccggagagagaggctataataaatttggccactcagcccaaacggccaatgtctatccccatcatcccagatattccaatagtagacgcgcaatctggagaagactacgattcatttctcatgtactcagacgatgttttgaggtcgccttccggttctcagcgccctagcgtgtccgatgacaccgaacaccttgtcaatgggcgcatggattttgcctttcccggctccacgaattcccttcatcgtatgaccactaccagcgccgccgcctatgggacacatctctcacctcatgtaccacaccgggtcctttccacctcctctaccctgacccgtgattacaattcattgacaaggtccgaacattctcactcaaccactttacccagagattatagcacactcactagtgtgagttcccatggattgccacccatctgggaacacgggaggtccagactgcccctgtcttgggcactagggagcagatctagagctcagatgaaggggttccctccgagccggggcccaagggatagtatcatccttgcagggcgaccagctgctcctagctggggcccagatagtcgtcttaccgcaggggtaccagatacacccacaagattagtgttcagcgccctaggtccaacatcactcagggtttcctggcaggaacccaggtgcgaacgtccactgcaagggtacagtgtggaatatcagttactgaatggtggcgaactacataggctaaacataccgaatcccgcacagacctcggtagtcgtcgaagatttactgcccaaccactcctatgtgtttcgcgtgcgtgcccaatctcaggagggctggggccgggaacgggaaggcgtaatcaccattgagagccaagtgcatccccagtccccactgtgtcctctgccagggtccgcctttacactgagtaccccgagcgccccaggcccgctcgtctttaccgcactatccccagatagtttacagttgtcctgggagagaccgagacgcccaaatggtgacatagtcggatatttggtgacctgtgaaatggcacagggaggaggaccagccacagcattccgggtcgacggagattctcccgaaagtcggctgaccgtgcctgggttgagtgaaaatgtgccgtacaaatttaaggtccaagcgagaacaactgaaggttttggacctgaacgagaggggataatcacaatcgagagccaggatggtggtccttttccacaactaggctcccgcgcagggctatttcaacatcctctgcagtccgagtactccagcatcacaactacacacacatcagccaccgagcctttcctggtggatggactgacactgggcgcacaacatttagaggctggcgggtctcttaccagacatgtcacgcaggaatttgtaagtcgcacactgaccacttcaggcaccctttctacccatatggatcagcagtttttccagacatag

SEQ ID NO: 120783 - DNA, 1932 bp, synthetic construct
  misc_feature 1..1932: note = Description of Artificial Sequence: Synthetic coding sequence
  source 1..1932: mol_type = other DNA
ggaggaattgaggagacccagatagacacaacgctgcgacgcagccagatgtcaccccagggccttagagtgcggctgcgcccaggtgaggagcggcacttcgagctggaggtgttcgagccccttgagagccccgtggacctgtacatcctcatggatttttccaactcaatgagcgatgacctggataatttaaaaaagatgggccagaaccttgctcgagtgctctctcagctgacgtcggactatacgattgggtttggaaaattcgttgacaaggtgtcagtgccccagacggacatgcgtcccgaaaaattgaaggagccttggcctaactccgatccgcccttttcctttaagaatgtgatctcgctgaccgaagatgtagacgaattccggaacaaactacagggcgaaaggatctcagggaatctagacgctcccgagggcggtttcgacgccattctgcagacggcagtgtgtacccgtgacataggatggcgccccgattctacccacctcctggtgttcagcaccgagagtgcattccactacgaggctgacggcgccaacgtcttagctggcatcatgagtcgcaatgacgaaagatgccacctagacacaactgggacctatacccagtatcgaactcaagactacccctccgtgcccactttggtgcgtctgctggcaaaacacaacattataccaattttcgccgtgactaactatagctactcctattacgaaaagctgcatacatattttcctgtgtccagtcttggtgtcctacaggaggatagttctaacattgtcgagctcctggaggaagcattcaacagaatccggtctaatttggacattagggccctggatagtccacgtggcctgaggactgaggtgacctccaaaatgttccagaagaccagaacagggtcattccacatccggagaggagaagtgggcatctatcaggtccagttgagagcactggagcatgtggatggaacccacgtttgccagcttcctgaagaccaaaaaggcaatatacatttgaaaccgagtttctctgatggcctgaaaatggatgccgggattatatgtgacgtctgtacttgcgagctccagaaggaagttcggagcgctcgctgtagtttcaatggtgattttgtgtgtgggcaatgtgtgtgtagtgagggatggtccggccagacatgtaactgctccacgggctccttgagtgacatccagccttgccttcgggaaggagaagataagccttgctccggaaggggagagtgtcagtgtggccactgtgtgtgctatggagaggggcggtacgaaggtcaattttgtgagtacgacaacttccagtgtcccaggacgagcggatttctttgtaacgatcgtgggagatgctccatgggtcagtgcgtgtgtgaaccagggtggacaggtccaagctgcgactgtcccctctctaacgcaacctgcatcgattccaacgggggaatctgcaacggccgtggtcactgcgaatgcgggaggtgccactgtcaccagcagtcattgtacactgacacgatctgcgagatcaactactcggctatccacccaggactgtgcgaagatcttaggtcatgtgtgcagtgccaggcctggggcacaggcgaaaaaaaggggcggacctgtgaggagtgcaactttaaagtaaagatggtggacgaactgaagcgggccgaggaggtggtggttagatgtagcttcagagatgaagacgatgattgcacatactcgtacacgatggagggggacggagctccaggaccaaactccactgttttggtgcataagaagaaagattgcccccctggatcattttggtggttaataccattgctgctgttactgctccccctgctggcgctctag

SEQ ID NO: 120784 - DNA, 2367 bp, synthetic construct
  misc_feature 1..2367: note = Description of Artificial Sequence: Synthetic coding sequence
  source 1..2367: mol_type = other DNA
atggggattgaactgctgtgcctgttctttctgtttcttggcagaaatgatcacgtccagggcggctgtgcactggggggagccgaaacctgcgaggattgtctcttgattgggccccagtgtgcctggtgtgcccaggaaaactttacgcatccttccggggtgggggagcgatgtgacactccagcaaacctacttgccaaggggtgccaattgaacttcatcgaaaatcccgtgtcccaggtggagatcctaaagaacaagccgctgtcagtggggcggcagaagaattcctccgatattgtgcagattgccccccaatccctgattctgaaacttcgacccggaggagctcaaaccttgcaagtgcatgtcagacagaccgaggattatccggtggacctgtactaccttatggacctatccgcctccatggatgacgatctgaacactattaaggagctgggctcgcgcctatctaaagaaatgagtaaacttacaagtaattttagactgggctttggatctttcgtggaaaagcctgtgtcgccgttcgttaaaacaacaccagaggaaatcgccaatccatgtagctcgataccttacttttgtttgcccacatttgggttcaaacacattttaccactgacaaatgacgccgagcgcttcaatgagatagtgaagaatcagaagattagtgcgaatatagacactcccgagggaggattcgacgccattatgcaggcagccgtgtgcaaggagaaaatcggctggagaaatgattcactccacttactcgtcttcgtatcggatgcagactcacacttcggcatggattctaagctcgctggaatcgtgattcctaatgatggcctatgccacttagattcaaaaaacgaatactcgatgagcaccgttctcgagtaccccacaattggacagctgattgacaaattggtccagaacaatgttctgctcatctttgcggtcactcaggagcaagtgcatttgtacgaaaactacgcaaagctcatcccaggagcaacggtaggtctcctccagaaggacagcggtaacatcctccagctgatcatcagcgcatatgaagaactgcgatctgaagtggagctggaggtgctgggggacacggagggtctaaatctgtctttcactgcaatctgcaataacgggacactattccagcaccagaaaaaatgctcccatatgaaggtgggcgatactgcttcattttcagtgaccgtcaacattccccattgcgagcgtagaagccgccacattattatcaaacccgtgggcttaggagacgcacttgagcttctcgtgtcacccgaatgcaattgtgactgtcagaaggaagtggaagtcaacagctctaaatgccatcacggcaatggctcctttcagtgcggcgtgtgcgcttgtcatccggggcacatgggtccaagatgtgagtgcggcgaggacatgctgtccacagattcatgcaaggaagctccagatcacccctcttgctctggaaggggggactgttattgtggccagtgtatatgtcatctgtctccctacgggaatatttacggcccatactgtcagtgtgataacttcagctgcgtacgacataaagggctgctgtgtggcgggaatggcgattgcgattgtggcgaatgtgtatgcagatccggttggacaggtgagtactgtaactgcaccacgagtactgattcatgcgtctcggaggacggcgtactgtgttccggccggggcgactgcgtgtgcggtaagtgcgtctgtaccaatcccggtgcaagcggccctacctgcgaacgatgtcctacctgcggtgacccatgcaactctaaacgatcgtgtatcgagtgccacctttccgctgccggacaggcccgggaagaatgcgtggacaaatgcaagttggccggtgcgacaatttctgaagaagaggatttttctaaggatggatcagtctcctgctctttgcagggtgagaatgaatgtctgatcacgttcttaatcaccaccgataacgaggggaaaaccatcatacacagcatcaatgaaaaggactgccccaagcctcccaatatccctatgataatgctgggcgtaagcttggcgatcctgttgattggggtggtcctgctgtgcatctggaaattgctggtgtctttccacgatcgtaaggaggtggctaaatttgaagccgaaagaagcaaggccaaatggcagaccggtaccaaccccctctaccgcggcagcacttccacttttaagaatgtaacgtacaagcaccgagagaagcaaaaggttgatttgagtactgattgttag

SEQ ID NO: 120785 - DNA, 2367 bp, synthetic construct
  misc_feature 1..2367: note = Description of Artificial Sequence: Synthetic coding sequence
  source 1..2367: mol_type = other DNA
atgggcatcgaactgttatgtttgtttttcctcttcctaggccgtaatgaccatgtacaaggaggctgcgccttggggggtgctgaaacttgtgaagactgcctcctaatcgggccccagtgcgcatggtgtgcacaggagaacttcactcatcccagtggcgtgggagaacgatgtgacactccggccaaccttctagccaagggatgtcagctgaatttcattgagaatcccgtctcgcaagtcgagatactcaaaaacaaacctctgtccgtgggccgacagaaaaactccagtgacattgtccagatcgctccccagagtcttatcctgaagctcagacccgggggcgcccagacactgcaggtgcatgttcgccagacggaggattaccctgtcgacctttactacctaatggacctatctgcctcaatggatgatgacctcaacaccattaaggagctgggaagtcgcttgtcaaaagaaatgtcaaagctaacttcaaactttcgcctgggattcgggtccttcgttgagaagcctgtgtccccattcgtcaagaccaccccagaagagattgccaatccatgttccagcatcccttatttctgcttacctactttcggcttcaagcacatcctgccccttaccaatgacgccgaacgatttaacgagatagtaaaaaatcagaaaatttcagcaaacatcgacacacctgagggcgggttcgacgccatcatgcaagccgccgtatgtaaggagaaaatcggatggagaaatgatagtctgcaccttctagtgttcgtcagcgatgctgattcccattttggtatggacagcaaactggccggaattgtcatacctaacgacgggctgtgtcatctggatagtaagaatgagtactctatgtctacagtgttagagtaccctacaatcggacagctgatcgacaaattagtgcaaaacaacgttctgctgatctttgccgtcacacaggaacaagtccatctctacgagaattatgcgaagttgataccaggggccactgtaggtctgttacagaaagatagtggaaatatcttgcagctgatcatctccgcctatgaggaattgcgtagcgaggtggaactagaagttttgggcgatacagagggactgaacctctctttcacagcgatctgcaataatggcactctatttcagcatcagaagaagtgctcacatatgaaggtgggcgatacagcttcattttctgtgacagtcaatattccccattgtgagagacgatcgcgccacattattattaagcccgtgggcctgggagatgctttggaattactggtttctcctgagtgcaattgcgattgccagaaggaggttgaggtcaattcatctaaatgccaccatggaaacgggtcattccagtgcggggtgtgtgcttgccatcctggccacatgggtccccggtgcgagtgtggggaagacatgttatctacagactcttgcaaggaggctccagatcatcctagttgtagcgggcggggtgattgttattgcggtcagtgtatttgtcacctgtctccttacggcaatatctacggaccttattgtcaatgcgataacttttcttgcgtgagacacaagggattgctatgcgggggaaacggtgactgcgattgcggcgagtgcgtctgtcgttcgggctggactggcgaatactgcaattgcacgacatccacagactcctgtgtaagcgaggatggagtgctatgcagtgggcgtggcgactgcgtgtgtggcaagtgcgtatgcaccaaccccggagcgagcggacccacctgtgaacgatgtccaacatgcggcgatccctgtaatagcaagcggtcttgtattgagtgccatttatcagccgccggacaagcgcgggaggaatgcgttgacaaatgcaagttggcaggagcgacaatcagcgaggaagaggacttctccaaagacggtagtgtctcatgctccctacagggtgagaacgaatgtctgatcacgtttctcattacgacagacaacgaagggaaaactataatacattcaatcaacgagaaggactgtcccaaacctccaaatattccaatgatcatgttaggcgtgagcctcgctatactgctgattggagtggtgctgctctgcatttggaagctcttagtttcttttcatgaccggaaggaagtagcaaagttcgaggccgaacgctcaaaagcaaagtggcagaccgggacaaatccgctctatcgtggttcaacaagtacctttaaaaatgtcacgtataaacatcgggagaaacagaaggtggatctgagtactgattgttag

SEQ ID NO: 120786 - DNA, 2397 bp, synthetic construct
  misc_feature 1..2397: note = Description of Artificial Sequence: Synthetic coding sequence
  source 1..2397: mol_type = other DNA
atggtcgctttaccgatggtactggtcctgctcctggtgctgtccaggggcgaatccgaactcgacgctaagatcccatcaacaggagatgctactgaatggaggaatccccacctgagcatgttgggcagttgtcagccagccccgagctgtcagaagtgtatcctgtcacacccaagttgtgcctggtgtaaacagttgaacttcacagcctcaggcgaggccgaagctcgtcgatgcgccaggcgcgaagaactcctcgctcgtggctgcccactggaggaactggaggaaccgcgagggcaacaagaggtgctgcaagatcaaccactatcccaaggcgctagaggagagggggctacacagctagctcctcagcgggtaagagtgacattgcgccctggcgaaccgcagcagctccaggttcgcttccttcgagctgaaggctaccctgtggacttatactacctcatggacctctcatatagtatgaaggatgacttggagcgcgtgcggcagcttgggcacgctctgcttgttcgcctgcaggaggtgacacacagtgtcagaatcgggttcggctctttcgtggacaaaacagtgctgccattcgtcagtactgtaccctcaaagttacggcacccgtgtcctacacggctggagcggtgccagtcaccgtttagcttccatcacgtcctaagtttgacaggcgatgcccaagccttcgagcgagaggtgggacgtcaatccgtgagcggaaatcttgactcgcctgaagggggttttgatgccattctgcaggctgccttgtgccaggagcagataggctggaggaacgtttctcggctgttggtatttacttccgacgacactttccacaccgccggagatgggaagctcggcggcatattcatgccatctgacggacattgccacctggattcaaacggcttatattcccgatctacagagttcgattaccccagcgtgggccaggtggcccaggcactgagtgcggccaatatccagccaatttttgcagttacaagtgctgcgctacccgtgtatcaggagctgagtaagctgatcccaaagtcagcagttggggagctgtctgaggatagcagcaacgtggttcagctcattatggacgcatataactcgctatcctcaacagttacgttagagcatagtagcctgccccccggcgtgcacatctcctacgagtcacaatgcgagggccccgaaaagagagaagggaaggccgaagatcggggacagtgcaaccatgtgagaattaatcaaacggtcactttttgggtttctctccaagccacacattgtttgcccgaacctcacttactgaggctcagggcccttggcttttcagaggagctgatagtcgaactgcatacactttgcgattgtaactgctctgatactcagccccaggcaccgcattgtagcgacgggcaggggcatctgcagtgtggcgtatgcagctgtgctccaggccgactcgggagactctgtgagtgcagcgtggcggagctctcgtctccagacttagagagcggatgtcgggcacccaacggcacaggacctctatgcagcgggaaaggtcactgccaatgcggccgttgttcctgctccggccagtcttccggccacctctgcgaatgcgacgacgcgagttgcgagaggcatgagggcatcctctgcggaggtttcggtcggtgtcaatgtggggtgtgccattgccacgcaaaccgcactgggcgtgcatgtgagtgttctggggatatggactcatgcatttcccctgaggggggtctctgctccgggcatggccgctgtaagtgcaaccgatgccagtgtctggatggatattacggcgcactgtgcgaccagtgcccggggtgcaagacaccatgtgaacgacacagagattgtgcggagtgtggggccttccgcaccgggccgctggcaaccaattgctcaacagcatgcgcacacacaaatgtaactctcgcgttagctccaatactggacgatggctggtgtaaggaaagaactctggataaccagctgttcttcttcctggtggaggacgatgctagagggacagtggttctccgcgtgcggccacaagagaaaggggccgatcacactcaggccatcgtgctgggatgcgtgggagggatcgtggccgtcggactgggactggtgcttgcctacagattaagtgtggagatctacgatcggcgcgagtactcgcggtttgagaaagaacagcaacagttgaactggaaacaggatagtaaccccctgtataagtccgcaataactaccaccattaacccaagatttcaagaggccgattcccccactctctag

SEQ ID NO: 120787 - DNA, 1953 bp, synthetic construct
  misc_feature 1..1953: note = Description of Artificial Sequence: Synthetic coding sequence
  source 1..1953: mol_type = other DNA
atggtggcgctgccaatggtgctagtactgttattagtcttgagccggggagaatccgagctggatgccaagatcccctcaacaggtgacgcaacggaatggcgaaaccctcacctctccatgctggggtcatgccagcctgctccttcatgtcaaaaatgtattctgtctcatccatcgtgcgcttggtgcaagcaactgaattttaccgccagtggcgaagccgaagcccgaagatgtgctaggagggaggagctgttggcccgcggatgccctctggaagagttggaagaacccagggggcagcaggaggtgctgcaggaccagccgctttcccagggagcacgtggggaaggggccacacagctggcacctcaaagggttagggtgacactgcgccccggcgaacctcagcaactgcaagtgcggttcttgcgagctgagggctaccccgtggatctctactacctaatggacctttcttactcaatgaaggatgacctcgagagagtacgccaattgggacatgcacttctggtgcgattgcaagaggtgacccacagcgttcgcatcggattcggttcttttgtcgacaagaccgtcttaccttttgtcagcacagtgccatctaaactcagacacccgtgccctaccagactcgagaggtgccaaagccccttctcatttcaccacgtcctatctttgacgggtgatgcccaagccttcgaacgcgaggtcgggagacaatccgttagcggcaacttggactcccccgagggcggcttcgatgctatcctccaggccgccctgtgtcaggaacaaatcggatggcggaacgtctctaggcttcttgtgtttacatcagatgacacatttcacactgccggggacggtaagcttggtggtatattcatgcctagcgacgggcactgccacttagactccaacggcctctactcacgttcaacagagttcgattatccttcagtgggacaggtggcacaggctctgagcgccgccaatatccagcccattttcgccgttacaagcgctgcactccctgtataccaagaactcagcaaattaattcccaaatctgccgtgggggagctgtccgaggactctagtaatgttgtccaactaattatggacgcttacaacagcctttcaagcaccgtaactctggagcattccagcctgcccccaggcgtgcatatttcttatgagtcccagtgcgaaggaccagagaaacgcgaagggaaggctgaggatcgcgggcagtgtaatcatgtgcggatcaaccagacagtcacgttttgggtgtcgctgcaggccacgcactgccttccagaaccccacctgctgcgattaagagcccttggcttttcagaagaactgattgtggaactccacaccctgtgcgactgtaattgttccgacacacaaccacaggctccccattgttccgatgggcagggccacctacagtgcggtgtgtgtagagattgcgcagaatgtggcgctttcaggacaggccctttagcaactaactgcagcaccgcctgcgctcatactaacgtgacgctagcccttgcacctatactcgatgatgggtggtgtaaagagcgtacactcgacaatcagctctttttctttctggtagaagacgacgccaggggcactgtggtgctgagagtgcggccccaggaaaagggagctgatcacacacaggcaatcgttttaggttgtgtagggggcatcgttgcagtgggccttgggctggtgctcgcctaccggctgtctgtggaaatctacgatagacgggagtacagtagatttgaaaaggaacagcagcaactgaattggaagcaggattcaaaccccctgtacaagtcggccatcacaaccacgattaacccacggttccaggaagccgacagcccaactctgtag

SEQ ID NO: 120788 - DNA, 2397 bp, synthetic construct
  misc_feature 1..2397: note = Description of Artificial Sequence: Synthetic coding sequence
  source 1..2397: mol_type = other DNA
atggtagcgctgcccatggttttagtgctcctactagtgcttagccgcggcgagagcgagctggacgcgaagatcccctcaacaggtgatgccactgaatggcgaaacccccacctgtccatgctcgggtcttgtcagcccgccccatcatgccaaaaatgtattctcagccacccttcctgcgcctggtgcaagcagcttaacttcacggcttcaggcgaggccgaagctagacggtgtgcccggagggaagaactactcgcccgcggatgcccactcgaagaactggaagagccacgcggccaacaggaagtgctacaggaccagcccttaagccagggagcacgtggcgaaggagcaacacagttggctcctcagagagttagagttaccttgagacctggcgaacctcagcagctgcaagtgagattcctcagagccgagggctatcccgtggatctgtattaccttatggatctgtcttatagcatgaaggacgacctcgagagggtccgacagctgggacacgctctcttagtgagactccaggaggtaactcacagcgtgcgcattgggtttgggtccttcgtagacaagacggtgctgccctttgtcagcacagtcccctccaaactgaggcacccatgtcccacccgactggagagatgccaaagcccattctctttccaccacgtactgagcttgacgggcgacgctcaagccttcgaacgcgaggtgggccgccaaagcgtctctgggaacctggatagtcccgagggcggatttgatgcaatcctgcaggcagccctctgccaagaacagattggatggaggaatgtgagccgactactggtattcacctccgatgacacattccacaccgctggagacgggaaacttggggggatttttatgccttctgatggacactgtcatcttgactccaacggcctctacagcaggagtaccgaattcgactatccaagcgtggggcaggtagcccaagctttgagcgcagcgaacattcagccaatctttgctgtcacctctgccgctttgccagtgtatcaagaactgagtaagctgattcccaaatccgccgtgggagagttgagcgaggattcttctaacgtcgtgcagttgatcatggacgcctacaactccttatctagcacggttactctggaacattcaagcctgcctccaggtgtccacatctcctatgagagccagtgtgagggccctgaaaagcgggagggaaaggctgaggacagggggcaatgtaaccacgtaagaattaatcaaactgtgacattttgggtgtctcttcaggcgacccattgcctccccgaacctcatcttctgaggctgcgtgccttaggcttcagcgaggagctcatagtggaactgcatacactttgtgactgcaactgctcagatacccaaccccaagcgccacattgctctgacggccagggacacttacaatgtggagtatgcagttgtgcccccggaaggctagggcgcctttgtgaatgttccgtggctgaactcagttctcccgatttagagtccggctgcagggctcccaacggcacaggtcctctgtgctcgggcaaagggcattgccaatgtgggcgatgctcatgttcagggcagtcttcaggtcacctctgcgaatgcgatgacgccagctgtgaaagacacgagggaatcctctgcggtggattcgggcggtgccaatgcggggtctgccactgtcatgccaacaggactggccgcgcctgcgagtgttcaggtgacatggattcttgcatctctcctgaaggcggtctttgctccggtcatggccggtgcaaatgtaataggtgccaatgcttagacgggtactacggggccctgtgtgaccagtgtcccggctgcaagacaccatgtgagcgccatagggactgtgcagagtgtggggccttccgtacaggaccgctggcaacaaactgcagcacggcatgcgcccacacgaatgtgactctagctcttgccccgatcctggatgatggatggtgcaaagaacgcactctagataatcagctctttttttttctagtcgaggacgacgccaggggcactgtagtgctcagagtaagacctcaggagaagggggccgaccatactcaagcgattgtgctggggtgtgttggcggtatcgtcgcggtaggcctggggcttgtcctggcctataggctttctgtcgagatatatgaccgacgcgagtatagtagattcgagaaagagcagcagcagctgaattggaagcaggatagtaaccctctctataagagtgccattactacaacaatcaatccaagattccaggaagccgatagccccaccttgtag

SEQ ID NO: 120789 - DNA, 1206 bp, synthetic construct
  misc_feature 1..1206: note = Description of Artificial Sequence: Synthetic coding sequence
  source 1..1206: mol_type = other DNA
atgaacctcgtcgccgttatgggagcttttaacaaaggtcacggtaagtgtgattgtggcaagtgcaaatgcgaccagggctggtacggagatgcttgccaataccccacaaattgcgatttgacaaagaaaaagtcgaatcagatgtgcaagaactcccaggacataatttgctcaaatgctggtacttgccactgcggacggtgcaaatgcgacaacagcgacggtagtggcctggtgtatgggaaattttgtgagtgcgatgatcgcgagtgcatagacgacgaaactgaggaaatttgtggaggacatggcaaatgttattgcggtaattgctactgcaaagccgggtggcacggggacaaatgtgagtttcagtgtgacatcaccccttgggaatcaaaaaggcgatgcaccagtcctgatggcaagatttgtagtaataggggcacgtgcgtgtgcggcgagtgcacttgccatgacgtggatcccactggcgattggggtgacatccacggcgatacttgtgaatgcgatgagcgggattgcagagctgtttacgaccggtatagcgacgacttctgctcaggacatggtcagtgtaattgcggccgctgtgattgcaaggctggttggtacgggaagaagtgtgaacacccacagtcgtgcaccctatcagctgaggagagtattaggaaatgccaaggtagctccgacctcccctgctctgggcgcggaaagtgcgaatgcggaaagtgtacctgctatcctcctggcgaccggagagtctacggtaaaacgtgtgagtgtgatgatcggcggtgtgaagatcttgatggtgtggtctgcggtggtcacggcacatgcagctgtggcaggtgcgtttgcgaacgcggatggttcggcaaattatgccagcatcctaggaagtgtaatatgacggaagaacagtcgaagaatctgtgcgagagtgccgatggcattctgtgttcgggcaaggggagctgccattgcgggaaatgtatctgctccgcagaggagtggtacatctcaggcgagttctgcgattgtgatgacagggactgtgacaagcacgacggcttgatttgcaccgggaatggtatttgctcctgcgggaattgtgagtgctgggatggctggaacggcaacgcttgcgagatttggctggggagcgagtacccgtag

SEQ ID NO: 120790 - DNA, 1485 bp, synthetic construct
  misc_feature 1..1485: note = Description of Artificial Sequence: Synthetic coding sequence
  source 1..1485: mol_type = other DNA
atgcggccgccaggttttaggaacttcctcctgctggccagcagtctcctgtttgccggcctgtccgccgtgccccagtctttcagcccctcgctccgctcttggcccggggctgcttgtaggctgtcaagggccgaatccgaacgaaggtgccgcgcccccggacagccaccgggagccgctctctgtcacggaagaggacgatgtgactgcggggtttgcatttgtcacgtgactgagcctgggatgttcttcgggcccctgtgcgagtgtcacgagtgggtctgtgagacgtacgacgggagtacctgtgcgggtcacggtaaatgcgactgtgggaagtgtaaatgtgaccagggctggtacggtgatgcctgccagtatccaactaattgtgaccttacaaagaaaaagtccaatcaaatgtgtaaaaatagccaggatatcatttgcagcaatgctggaacctgccactgtgggcgatgtaaatgcgataactccgatgggtccggcctggtctatggcaaattttgtgaatgtgacgatagagaatgcatcgacgacgagacagaagagatctgcggagggcatggcaaatgctactgcggaaactgctattgtaaagctggatggcacggagataaatgcgagttccagtgtgacattactccctgggagagcaaacggcgctgcacctccccagacgggaagatttgtagcaacaggggcacctgcgtgtgtggagaatgtacatgccacgacgtggaccctacaggcgactggggggacattcacggggacacttgcgagtgcgatgaacgtgattgtagagcggtttatgataggtactccgatgacttttgctctgggcatgggcaatgcaactgcggacgctgcgattgcaaggctgggtggtacggcaaaaagtgcgagcatcctcagtcttgcaccctgtcagccgaagagtctatcagaaagtgccagggcagcagtgacctcccttgtagtggccggggtaagtgcgagtgtgggaaatgcacgtgctacccacctggagatcgccgcgtttatgggaaaacctgcgagtgtgatgatagacgttgcgaggacttggatggggttgtgtgcgggggacatggcacttgcagttgtgggaggtgcgtgtgcgagcgaggctggtttgggaagctttgtcaacaccccaggaaatgtaacatgacagaagagcagagtaagaatttatgtgagtctgctgacgggatcctttgctccgggaaagggtcttgccactgtggtaaatgtatttgttcagccgaagagtggtacatcagcggcgagttctgtgactgcgacgatagggactgtgataagcatgacgggttgatttgcacaggtaacggcatatgttcttgcggcaactgtgaatgctgggatggctggaacggcaacgcctgcgagatctggctgggaagtgagtatccgtag

SEQ ID NO: 120791 - DNA, 1209 bp, synthetic construct
  misc_feature 1..1209: note = Description of Artificial Sequence: Synthetic coding sequence
  source 1..1209: mol_type = other DNA
atgtcgggctgtgcccgcccaactaccggtgcacccgtccaagctatggtgtccgtcaccggcaaatgtaaatgcgatcagggctggtatggagacgcatgtcagtaccctacaaattgtgatttaactaagaagaaaagcaaccagatgtgtaagaattcacaggacattatctgctccaacgctggaacatgccattgcggtcgctgtaaatgtgacaactccgacggtagcggcctggtctatggtaagttttgcgaatgtgacgatcgggagtgcatagacgatgagaccgaagaaatttgcggcgggcatggcaagtgttactgtggaaactgttattgtaaagccgggtggcatggtgataaatgcgagttccagtgcgatattaccccatgggagtcaaaacgtcgatgcacatcgccagatggcaaaatttgtagcaatcgcggtacttgcgtttgtggagagtgcacctgtcacgatgtcgaccccaccggggactggggcgacattcatggagatacttgcgaatgtgacgagcgcgattgcagagctgtttatgacaggtatagcgatgacttctgttccggtcacgggcagtgtaattgcggccggtgcgactgtaaggctgggtggtacggcaagaaatgcgagcaccctcagtcttgtaccctgagcgcagaggaatcgatccgcaagtgccagggcagctcagaccttccttgctcggggagggggaagtgcgaatgtggcaaatgtacatgttatcctcctggagatcggagggtgtatgggaaaacttgcgaatgcgacgaccggaggtgtgaggacctcgatggagttgtctgcggcggccacggtacatgttcttgcggccgttgcgtgtgtgagaggggctggttcggtaaactctgtcagcatccgcgaaagtgcaatatgaccgaggagcagtctaagaacttgtgtgaaagtgcagatgggatcctgtgcagcggaaaggggagctgccactgtggaaaatgcatatgcagcgccgaggaatggtacatcagcggcgaattttgtgactgtgatgaccgagactgtgacaagcacgatggtctcatttgtaccggcaatggcatctgttcttgtggcaactgcgagtgctgggacggttggaacggcaatgcatgtgagatttggctgggctctgagtatccttag

SEQ ID NO: 120792 - DNA, 1062 bp, synthetic construct
  misc_feature 1..1062: note = Description of Artificial Sequence: Synthetic coding sequence
  source 1..1062: mol_type = other DNA
atgtgtaaaaacagccaggacatcatttgttccaacgccggaacctgtcactgcggccgctgcaaatgcgacaattccgatgggagtggccttgtttacggcaaattttgtgagtgcgatgatcgggaatgcattgacgacgaaacagaggaaatatgtggcggccatggcaagtgttactgtggcaactgctattgtaaggccggatggcacggggacaagtgcgaattccagtgcgatatcaccccgtgggaaagtaaaaggaggtgcacgtcacccgatggcaaaatttgtagcaataggggtacttgcgtatgcggggagtgcacgtgccatgacgtggacccaaccggagattggggggatattcacggtgacacgtgcgagtgcgacgaacgggactgccgcgcagtttacgacagatacagcgatgacttctgttcagggcatggacaatgcaactgcggcaggtgtgattgtaaggccggatggtacggcaaaaagtgcgaacacccccagtcctgcacattatcggcggaggaatccatccgtaaatgccagggttctagcgacctaccatgcagcggaagggggaaatgcgaatgcggcaaatgtacctgttaccctccgggggatagacgcgtgtacggaaaaacatgtgagtgtgatgatcggcgatgcgaggacctggacggtgtggtgtgcggcggacacggcacctgctcttgcggccgctgtgtatgtgagcgtggctggtttggcaagctttgccaacatcctagaaaatgcaatatgactgaggagcaatccaagaatctgtgtgagtctgccgatggaatcctgtgcagtgggaagggatcttgccattgtggtaaatgtatctgctctgcagaagagtggtatatttccggggagttttgcgattgcgatgaccgagattgcgacaaacacgacgggcttatctgtacgggcaatgggatatgctcatgcggcaattgcgagtgctgggatggttggaatgggaacgcatgtgagatctggcttggcagcgaatacccatag

SEQ ID NO: 120793 - DNA, 1062 bp, synthetic construct
  misc_feature 1..1062: note = Description of Artificial Sequence: Synthetic coding sequence
  source 1..1062: mol_type = other DNA
atgtgcaaaaactcacaagacatcatttgttctaacgcaggcacctgtcactgtggcagatgcaaatgcgacaactctgatgggtctggactggtatatggtaaattttgcgaatgtgacgatcgagaatgcatagacgatgagaccgaggagatctgcggcgggcacgggaaatgttactgcggaaactgttactgcaaggctggctggcacggggacaaatgtgaattccagtgcgacatcacaccctgggagtcaaagaggaggtgtacttcaccggatggcaaaatttgttccaatagaggtacctgtgtatgcggagagtgtacatgccatgacgttgacccaaccggggattggggagacatccatggtgatacctgtgaatgcgacgaaagagactgcagggcagtgtacgatcggtactcagatgacttctgttctggccacggccagtgtaactgtgggcgatgcgactgtaaggccgggtggtacggcaagaagtgcgagcacccacagtcctgcactctcagtgccgaggaatccattcgtaagtgccagggttcttcagacttgccgtgttcaggcagggggaagtgtgagtgcggaaagtgcacgtgttatcccccaggtgatcggagagtctatggtaaaacctgcgagtgcgacgaccggaggtgtgaggatctggacggagtcgtatgtggaggccatggaacatgttcatgtggaagatgcgtgtgtgagagagggtggtttggaaagctgtgtcagcacccccggaaatgcaatatgacggaagaacaaagtaagaatctttgtgaatcagccgacggtatcctgtgtagcggaaagggctcctgtcactgcggtaaatgcatctgtagcgccgaggagtggtacatcagcggcgagttttgtgactgcgatgacagagactgcgataaacacgatggtcttatttgtactggaaatggcatttgttcgtgcggcaattgcgagtgttgggatgggtggaatggaaacgcatgtgaaatatggttgggcagcgaatacccatag

SEQ ID NO: 120794 - DNA, 903 bp, synthetic construct
  misc_feature 1..903: note = Description of Artificial Sequence: Synthetic coding sequence
  source 1..903: mol_type = other DNA
atggcgaattgtgaattctcacctgtatcgggcgataagccatgctgtcggctgtctcggcgggcgcagctgtgtctgggcgtgtccattcttgtcttaatactggtcgtggtgctcgctgtggttgtgcccagatggaggcagcagtggtccgggcctggcacaacaaagagattcccagagaccgtattggcccggtgtgttaagtacacagagatccaccccgagatgcggcatgtggactgccagtccgtgtgggacgccttcaagggcgccttcatttccaagcatccgtgtaacataacagaagaagactatcagccgctaatgaagctcggaacccagacagtgccctgcaacaaaattctgctgtggtccaggataaaggacctggctcaccaattcacacaggtacagagggacatgttcaccctggaagatacactgctgggttacctggcggacgacttgacatggtgcggagaatttaacacctcaaagatcaattatcagagttgtccagactggcgtaaagactgtagtaataatccggttagtgttttttggaaaacagtttctagaaggtttgccgaggctgcatgcgatgtcgtgcatgtgatgctcaacggctctcgatccaaaatcttcgataagaactctaccttcggcagcgtggaggtgcacaacctgcagccggaaaaggtgcagaccctcgaagcatgggtgattcatggggggagagaagattcccgcgatctctgtcaggaccccaccattaaggagctggagagcatcatttctaaaagaaacattcagttcagctgcaagaatatttacagacctgacaagttcctgcagtgtgtgaaaaatcccgaagatagcagctgtaccagcgagatctag

SEQ ID NO: 120795 - DNA, 942 bp, synthetic construct
  misc_feature 1..942: note = Description of Artificial Sequence: Synthetic coding sequence
  source 1..942: mol_type = other DNA
atgaatcagctttcgtttctgctgttccttatcgccaccactagagggtggagtactgacgaggcaaatacgtacttcaaagaatggacctgctccagctcaccctctctccccaggtcatgcaaggagattaaggacgagtgtcctagcgctttcgacgggctatattttctgcgaacagaaaacggggttatctaccagaccttctgcgatatgacaagtggtggaggagggtggacccttgtggcttctgtccacgagaatgatatgcgcggaaaatgtaccgtgggagaccggtggtcatcccagcagggcagtaaggccgtctatccagagggcgatggcaattgggctaattataacacttttggatccgccgaagccgctacatccgacgactacaagaacccgggctattacgacattcaggccaaggatctgggtatttggcatgtgcctaacaagtccccgatgcagcattggcggaactccagtctcctccggtaccggactgatacaggtttcctgcaaaccctggggcacaacttgtttggcatctaccaaaagtaccctgtgaagtatggcgagggaaagtgctggaccgacaatgggcccgtgatcccggtcgtttatgattttggtgatgcacaaaaaactgcatcctactactccccttatggccagagggagttcacagctgggttcgttcagtttagggtgttcaacaatgagcgcgctgccaacgccctctgcgcgggaatgcgggtcaccggatgtaatactgagcatcactgcatcggtggtgggggatactttcctgaggcttctcctcagcagtgcggtgacttctccggtttcgattggtcagggtatggcacccacgtgggttatagcagcagccgggaaatcacggaggctgctgtgttactcttttatcggtag

SEQ ID NO: 120796 - DNA, 978 bp, synthetic construct
  misc_feature 1..978: note = Description of Artificial Sequence: Synthetic coding sequence
  source 1..978: mol_type = other DNA
atgctctcaatgctgcgcaccatgaccagattgtgttttctgctgttctttagcgtggcaacttctggatgtagtgccgcagctgcctctagtctcgaaatgcttagcagggaattcgagacttgcgcattttcattcagttccttgccgcgtagctgcaaagaaatcaaggagcgatgccattctgcaggcgacgggctgtatttcctgcgaactaagaatggggtagtgtaccaaaccttctgtgacatgacctccggtgggggtggctggactttagtcgcttcagtccacgagaacgacatgcgcgggaagtgtaccgtaggggaccgctggtcttcgcagcaaggcaataaggccgattaccctgagggcgacgggaactgggccaattacaataccttcgggtccgcggaggctgcaacctcagatgattacaaaaatcccggatactacgatatccaggccaaggacctgggcatttggcacgtccctaataaatcgcccatgcagcactggcggaatagcgctttgttgaggtacagaaccaacacgggtttcctccagagactcggacacaatctctttggcatttatcagaagtaccccgttaaatataggtcggggaagtgttggaacgataatggtcctgcaataccagtcgtgtatgatttcggcgacgcaaagaaaactgcctcctattactccccttacggccaacgggagtttgtggcgggtttcgtgcaattccgagtcttcaataatgaacgagccgctaatgcattgtgtgcgggtatcaaagtgacaggttgtaacactgaacaccactgcatcggaggcgggggcttttttccccagggaaaaccaaggcagtgtggcgacttctctgccttcgactgggatggatacggcacccacgtgaaaagttcgtgcagtcgtgagatcacagaggctgctgtcctgcttttctatcggtag

SEQ ID NO: 120797 - DNA, 2736 bp, synthetic construct
  misc_feature 1..2736: note = Description of Artificial Sequence: Synthetic coding sequence
  source 1..2736: mol_type = other DNA
atggatggggcaatgggccctaggggactcctgctctgcatgtacctggtgtctctgttaatccttcaagcaatgccagcactgggtagcgcgaccggccgctcaaagtcttctgagaagcgtcaggccgtggacactgctgtggatggcgtgttcattcgaagcctcaaggtgaattgtaaggtaacatctaggttcgcccattacgtggtgacatcgcaggtcgtgaatactgccaatgaggctcgcgaggttgcgttcgatctggagatcccgaaaactgcttttatttccgattttgctgtaaccgccgatggaaacgcctttatcggtgatatcaaggacaaggttacagcctggaagcagtacaggaaagccgcaatctccggagaaaatgctggactggttcgagcgagcgggcgcaccatggagcagtttaccatccatctcacagtgaatcctcaatccaaagtgacctttcaactcacttacgaagaggtcttaaagcggaaccacatgcaatacgagattgtgataaaagttaaaccaaagcaactggtacaccacttcgagattgatgtggatatattcgagccgcagggtatttcaaagctggatgctcaggccagtttcttacctaaagagctagcagcccagacaatcaaaaagagcttctccgggaagaaaggccatgttctgttcaggcccaccgtgtcacagcaacaatcttgtcccacatgctccacttctctgctaaatggacattttaaggttacatacgacgtaagtagggataagatctgcgacctccttgtggccaacaaccattttgcgcatttctttgccccgcagaacttaactaatatgaacaagaatgtagtcttcgtgattgatatctctgggagcatgcgaggccagaaggtcaagcagacgaaagaagcacttcttaaaatactgggagatatgcagcctggggactactttgaccttgtgctctttggaactagggtgcaaagctggaaagggtcgctggtgcaggcctctgaagcgaatctgcaagccgcgcaggatttcgtccggggattctccttagacgaggcaaccaatctaaatgggggtctactgagggggatagagatcctgaaccaggtgcaggagagtctgcccgagctcagcaaccatgcttcgatcctcattatgctgacagacggcgaccccaccgagggcgtgacagacagaagccagatactcaagaacgtcaggaacgccattaggggccgcttcccattatacaatttaggatttggacataacgtcgatttcaatttcctcgaagtgatgtcgatggagaataatggtcgggctcaacgaatctacgaagaccacgacgcaacacagcagttacaaggtttttattcgcaggttgccaagccactgttagtggacgtggacttacagtacccgcaagacgccgttctggcacttacccagaatcatcacaagcagtactatgagggctctgagatagtcgttgccggccgaatcgccgacaataagcagtcctcattcaaagccgatgtgcaggcccacggagagggtcaggaattcagcatcacgtgcctcgtggacgaggaagaaatgaaaaagctcttacgggagcgcggccacatgttggaaaaccacgtggaaagattgtgggcttacttaaccatccaggaactgctggcaaagcgcatgaaagtagaccgggaggagcgcgccaatttgagctcccaagccctgcagatgtccctcgactatggcttcgtgactccattaaccagcatgtcaataaggggtatggcagatcaggatggcctcaaacctacgattgataagccgtctgaagactcaccaccgctcgagatgctgggtccccgccgcacctttgtgttgagcgcgttgcaaccttcccccactcactcttcatctaatacccagaggctgcctgaccgggtcaccggcgtcgacactgaccctcatttcattattcatgtgcctcagaaggaggacaccctgtgctttaatattaacgaggagcctggcgttatcttaagcctcgtccaggacccaaatacgggctttagcgttaatggccagttgattggcaacaaagcaagaagccctggtcagcatgatggcacttattttggccgactggggatcgccaaccctgccacagactttcagctggaggtgacccctcagaacatcacgctcaacccgggattcggaggccctgtgtttagttggcgggatcaggcagtactgcggcaggacggggtagttgtgactataaataaaaaaagaaacttggtagtgtcagtggacgacggaggcacttttgaggtggtgctgcatcgcgtttggaaggggtcatccgtccaccaggacttcctgggattctatgttttggattctcatcggatgagtgcccgcacccatggcttgctgggtcagttttttcatccaatagggtttgaggtgagtgacatacacccagggtcggatcccaccaagccagatgccacaatggttgttcgcaatcgtagactcaccgtaaccaggggtctccagaaggattactccaaggacccatggcatggcgcggaggttagctgctggttcatccacaacaacggtgccggattaattgacggagcctatactgactacattgtgcccgatatcttctag

SEQ ID NO: 120798 - DNA, 1872 bp, synthetic construct
  misc_feature 1..1872: note = Description of Artificial Sequence: Synthetic coding sequence
  source 1..1872: mol_type = other DNA
atgaacaaaaacgtggtctttgttatagacatcagtggctccatgcggggccagaaggtgaagcagacaaaagaggcactgttgaagattttgggcgatatgcagccaggcgactatttcgatcttgtcctgttcggtactagagtccagagctggaagggctctctggttcaggcaagcgaagcgaatttgcaggcagcccaggattttgtgcgggggttttctctggacgaagcaacgaatctgaatggcgggctgctcagaggaatagaaattcttaatcaagtgcaggaatcactgccggaattgtccaatcacgcaagtatcctgatcatgttaacagacggtgaccccacagagggagtaacggatagaagccagatcctcaagaatgtcaggaatgcaataagaggacggttcccactctataacctgggatttggacataatgtggactttaactttctggaggtcatgtcaatggagaataatgggcgggctcagagaatatatgaggaccacgatgctactcagcaactgcagggcttctatagtcaggtggctaagccgctgctggtcgatgttgacttacagtatccgcaggacgcagtgttggccctcactcaaaatcaccacaaacagtactatgaggggtctgaaattgtagtcgccggcaggatcgctgacaataagcaatcttctttcaaggccgacgttcaggcccatggcgagggccaggagttcagtatcacatgcctggtggacgaagaggagatgaaaaaactgttgagagagaggggacacatgctagagaaccacgtggaaaggctttgggcttacttaacaatccaggaattactcgcgaaacgtatgaaggttgacagagaggagagggccaatctgagcagtcaagccctgcagatgagcttggattatgggtttgttaccccattaacctctatgtccatccgcgggatggccgaccaggatggtctgaaaccaacaattgataagccgtccgaggatagcccaccattggagatgctgggcccgcggcgtacatttgtcctgagtgcactgcaaccctctccgacgcactcatcaagcaatacacaacgcctccctgatcgcgttacaggcgtcgatactgacccccactttattatccacgtgccacagaaagaggatacgctgtgctttaacatcaacgaggaacctggggttatcttgagcctcgtgcaggatcccaatacagggtttagtgtcaatgggcagctcatagggaacaaggcgcgctcccctggccaacacgatgggacttattttgggaggttagggattgccaacccggccacagactttcagctagaggtaacaccccaaaatatcactctgaaccctggcttcggagggccagttttttcctggagggatcaggccgtgctacgacaagacggtgtcgtggttacaatcaacaagaaaagaaatctagttgtgtccgtcgatgatggtgggacgttcgaagttgtgctgcacagagtgtggaaaggatcctcggtgcaccaggacttcctgggattttatgtgctggacagccatcgtatgtccgccagaactcatggcttattgggtcagtttttccatcctataggtttcgaagtatctgacatccatccaggatccgacccaactaagccagatgctacaatggtggtgaggaatcgccgtttaacagttacccgcggactccagaaagattatagtaaggatccttggcacggggccgaggtctcctgttggttcattcacaataacggggcaggacttatcgacggggcatatacagattacatcgtcccggatatcttctag

SEQ ID NO: 120799 - DNA, 2310 bp, synthetic construct
  misc_feature 1..2310: note = Description of Artificial Sequence: Synthetic coding sequence
  source 1..2310: mol_type = other DNA
atggaacagttcaccattcacctaacagtcaatcctcagagcaaggtcacctttcagttgacgtacgaagaagtgctcaaaagaaaccatatgcagtacgagattgtcatcaaagtaaagccgaagcagctggtgcaccatttcgagattgacgttgatatttttgagcctcaagggatatctaagctggacgcacaggcctcattcttacccaaagagttggcagcgcaaaccatcaaaaagtctttttcaggtaaaaaggggcacgtcctattccgccctaccgtgtcacagcagcaatcatgtcctacatgctccaccagccttctgaacggccattttaaagtcacctatgacgtgtccagggacaagatttgtgacctgctagtcgccaacaatcactttgcacacttcttcgcccctcagaatctgacgaatatgaacaagaatgtggtattcgtgattgacatttctggatccatgcggggacaaaaggttaagcagacaaaagaggcactcctgaagatcctcggggacatgcagcctggagactacttcgacctcgttctctttggtactagagtgcagtcatggaagggctcattagtgcaggcctctgaggcaaatttgcaggcagctcaggactttgtccgtggattctccttggacgaggccaccaacttaaatggaggactgctcagggggattgagatcctgaaccaagtgcaggagtccctgcccgagctcagcaaccatgcctcaattctcatcatgctaacggacggcgaccctaccgagggggtcacagaccgctcccagattctgaagaacgtcaggaatgcaattcgagggcggttccccttgtacaatctggggttcggccacaacgtggatttcaactttctcgaagttatgagcatggaaaacaacgggagagctcagcgcatttacgaagaccatgacgctactcaacagctccaggggttctattcgcaagtggccaagcctttgctagtggatgttgaccttcagtatccgcaggacgctgttttagcactgacacagaaccaccataaacagtattatgaaggaagcgaaattgtggtggctggccggatcgccgacaacaagcagagctcgtttaaggccgatgttcaggcccatggtgagggccaagagtttagcataacttgtctagtagacgaggaagagatgaaaaaactgctgcgggagaggggtcatatgctagaaaatcacgtcgagaggctctgggcttacctgacgatccaggagctcctggccaaaaggatgaaggtcgacagagaagagcgagccaacctgtcctcccaggcgttgcagatgtctctggactacgggtttgtgacaccgctcaccagcatgtctattagaggaatggcagaccaggacggactcaagccgactatagataagccatctgaggacagtcctcctcttgaaatgctcgggcctcggaggacatttgtgctatctgcgctgcagccctccccaacacatagctccagtaacactcagagactgcctgatcgcgtgaccggagtggacacagatccccatttcataattcacgtgccccagaaagaagacactctgtgcttcaatatcaatgaggagccaggcgttatcctctccctcgtacaagatcccaacaccggattttccgtaaacggccagttgattgggaacaaagctcgatctcctggtcagcatgacggcacatactttggtcgcttggggatagccaatcccgccacagattttcagctcgaggttacacctcagaacatcaccctcaatcccggatttggcgggcctgtgttctcctggagggatcaggccgtgctgcggcaggacggtgtggtggtaacaattaacaagaaaaggaaccttgtggtcagtgtggatgatggagggactttcgaagttgtcctccacagagtgtggaaggggtcctcagtgcatcaagactttctgggcttttatgttctcgacagtcacaggatgtccgcaagaacgcatggcctcctcggtcagtttttccaccctatcggatttgaagtaagcgatatacaccctggctcagatcccaccaagcccgacgcaaccatggtggtccgcaatagacggctaactgtcacacggggcctccagaaggattattccaaagacccttggcacggagccgaggtgtcctgctggtttattcacaacaatggggcagggctgatcgacggagcctacaccgactacattgttccagacatcttctag

SEQ ID NO: 120800 - DNA, 1938 bp, synthetic construct
  misc_feature 1..1938: note = Description of Artificial Sequence: Synthetic coding sequence
  source 1..1938: mol_type = other DNA
atggacggcgccatgggccccaggggcctgctcctgtgcatgtaccttgtcagtctcctgatcctccaagctatgcctgccctgggaagtgcaaccggccggtcaaagagctctgagaagaggcaagccgtggacaccgcggtagacggggttttcataaggagtttgaaagtaaattgcaaggttacgtctcgttttgcccactacgtggtcaccagtcaggtggtcaatactgccaacgaggccagggaggttgccttcgacctggagattcctaagactgcttttattagtgatttcgctgtgacggcagacggcaatgccttcatcggcgatatcaaagataaggtcactgcatggaaacagtaccgaaaagctgctatcagcggcgagaatgcaggcctagtgagggccagtgggcgcacgatggaacagtttaccatccatctaactgtgaacccacaatctaaggtaacttttcagctaacgtacgaggaagtactgaagcgtaatcatatgcagtacgagatcgtgatcaaggtcaaacccaagcagctggtgcaccatttcgaaattgatgtcgacatctttgagccacagggcatctccaagctggatgctcaagcttctttcctgcccaaggaactggcagctcagactattaagaagagcttcagtggaaaaaaggggcacgttctgttccggccgacggtatcacaacaacagagctgtcctacctgctccaccagcttgttgaatggacattttaaggtaacttatgacgtatctcgggataagatctgcgatctgcttgtggcgaacaaccactttgctcacttttttgctccacagaacctcactaacatgaataagaatgtggtcttcgtgattgacatctcaggtagcatgagaggacaaaaggtcaaacaaacaaaagaggccctgctgaaaatacttggcgacatgcaaccaggagactatttcgacttggtcctgttcgggacaagagttcagtcctggaaaggtagcctggtgcaagcgagtgaggccaacctccaggccgcccaggatttcgtgcgcggcttctcccttgatgaagccacaaaccttaatggcggcctgctacggggtattgagatactgaaccaggtgcaggagtctctccccgagctgagcaaccacgcctccatactgatcatgctgacagatggagaccctaccgagggtgtcacagacagatcacagatactgaagaacgtcagaaatgcaatccgtggaaggtttccactctacaacctagggttcggacataacgtcgattttaacttcctcgaggtgatgagcatggaaaacaatgggagggcacagaggatttatgaagaccatgacgcaactcagcagctacagggattttactcccaggtagccaagccactgctggtggacgtggatctgcagtacccccaggacgcagtgctagcgctgacacaaaaccatcataagcagtactatgaggggagcgagattgtggtagctggaagaattgctgataacaaacagtcgtccttcaaggcagatgttcaggcccatggggaaggacaagagttctcaattacttgccttgtggacgaagaggaaatgaaaaaactgctccgcgagcggggacatatgctggaaaatcacgttgaacgactctgggcctacttaacaatccaggagctcctagccaagcggatgaaggtagaccgcgaggagcgcgcaaacctgtctagccaggccctgcaaatgtccctagattatgggtttgtgacaccactcacaagcatgagcatccgggggatggcagatcaagacgggctaaagcccactatagataagccatcactccaccacccacgcgcacccgagcggggtcatccagtgctgcaacaccaatag

SEQ ID NO: 120801 - DNA, 2841 bp, synthetic construct
  misc_feature 1..2841: note = Description of Artificial Sequence: Synthetic coding sequence
  source 1..2841: mol_type = other DNA
atgaagcgcctgacctgttttttcatttgttttttcctgagcgaagtcagcggctttgagatccccataaatggtctatctgagttcgttgactacgaagacctggtcgaattggcgccagggaagtttcaactagttgctgagaaccggcgctaccagagatccttgcctggggagtccgaggaaatgatggaagaggtggaccaggttacattgtatagctacaaagtacaaagtactatcacaagtagaatggccactaccatgatacagtcaaaagtggtgaataactccccccagccacagaatgtggtgtttgatgtgcagataccgaaaggggctttcatatccaacttctcaatgaccgtggatggtaaaaccttccgatcgagcatcaaggagaaaacagtcgggcgtgcactctatgcgcaggcccgcgctaaggggaaaacagctggcctggttcgatccagcgcactggacatggaaaatttccgcaccgaggtgaacgttctgccgggcgccaaggtccaatttgaattgcactatcaggaggtgaagtggcgcaagctgggttcttacgagcaccgtatctacctccagcccgggcggctcgcaaaacatcttgaggtggatgtgtgggtaatagaaccccagggattgaggttccttcatgttccggatactttcgagggccacttcgatggggtgcccgtcatctctaaggggcaacagaaagctcacgtgtcgtttaagcccaccgtcgcccaacagcggatctgccctaattgtagggaaaccgcagtggacggcgagctcgtcgtactttacgacgtgaagcgagaagagaaagcaggcgaactcgaagtctttaacggttatttcgtgcatttttttgccccggataatctcgaccccatcccaaagaatatcttgttcgtgatcgatgtatcaggatccatgtggggcgtgaaaatgaaacagactgtcgaagcaatgaagactattttggacgatctgagggccgaagaccattttagtgtgattgatttcaaccaaaacatccgaacatggcggaacgaccttatttctgcaaccaagacacaagtggctgatgcaaagcggtacattgagaaaatacaaccatccggtggcaccaatattaatgaggccctcctgcgggccatatttatcttaaacgaggcaaataatttgggcctattagacccaaacagcgtgtccttaatcattctcgtaagcgacggcgatccaactgtcggggagttgaagctgtctaaaattcagaagaatgtaaaagagaatattcaggataatatctcgttgtttagccttggaatggggtttgatgtagactacgacttcttaaaacggctaagtaatgaaaaccatggtattgctcagcgtatatatggtaatcaggacacttcaagccagctcaagaaattctataaccaggtgtctacaccgctcctgaggaacgtgcagttcaactatccgcacactagcgtgactgatgtgacccaaaataatttccataactattttggaggctccgaaattgttgtggccggaaaatttgatcccgccaagctcgatcagatagagtccgtcatcactgcaacaagcgctaacacgcaacttgtcctggaaaccttggcacagatggacgatttgcaggacttcctctctaaagataagcatgctgacccagatttcacccgcaaactgtgggcgtatcttacaatcaaccagctgctcgcggaaagatccctagctcctacagccgctgccaaacggcggatcacccgatcaatccttcagatgtcccttgatcaccacatcgtaacgcccctgacaagcctagtcatcgagaatgaggcaggggacgagaggatgctggcagatgcccctccgcaagatccttcatgctgtagcggagctctttattatggtagtaaggttgtgcctgatagcacacccagctgggccaacccaagcccaactcctgtgatttcaatgctcgcccagggtagccaggttcttgagtccacccctcctccgcacgtgatgcgagttgaaaacgatccccatttcatcatttatcttcccaagtcccagaaaaatatttgctttaatatcgacagcgaaccaggaaaaattctgaatctggtgtccgacccagagtcaggaatcgtagtgaacggacagttggtaggggcaaagaagccaaacaacggcaagctgtcaacatactttggaaagcttgggttttacttccaaagcgaagatattaaaatcgagatctccacagaaacgatcaccttaagtcatggctccagcactttttcactctcctggtccgacacagcccaggttactaatcagcgagtgcaaatttcggtcaaaaaagagaaggtcgtgacgatcaccctggataaagaaatgtccttctccgtgctgctgcacagagtgtggaaaaagcacccggtgaatgtcgactttctgggaatctatattccacctaccaataagttctctcccaaggcacacggtttgattggacagtttatgcaggagcccaaaattcacatctttaacgagcgtccgggtaaggaccccgaaaaacctgaagccagcatggaagttaagggtcagaaactgatcatcactcgaggcctgcagaaggattacagaactgacctggtgtttggaactgatgtgacttgttggtttgtccataactctgggaaggggtttatcgacggccactataaggattatttcgttccacagctctactctttcttaaagagaccctag

SEQ ID NO: 120802 - DNA, 2658 bp, synthetic construct
  misc_feature 1..2658: note = Description of Artificial Sequence: Synthetic coding sequence
  source 1..2658: mol_type = other DNA
atggtcgcactgtctcatctgggatcagccttgcagttgggcagcttatttccacggtccccctttcgattgctcggtaaaagatctctgcccgagggcgtggccaatgggatcgaagtatactccaccaagattaactctaaggtgacttccaggttcgctcacaacgtggtgacaatgcgcgcagttaatcgggccgacactgctaaggaagtgtcttttgacgtggagcttccaaagaccgcatttatcacgaattttacattgaccatcgatggcgtgacgtacccggggaatgtgaaagagaaagaagtggccaagaagcagtatgagaaggctgtttcccaggggaagactgctggcctcgtgaaggcctctgggcgcaagttagagaagttcacggtcagcgttaacgtggctgccgggagcaaggtgactttcgagctcacctatgaagagctgctgaaacgacataaaggcaagtacgagatgtatcttaaggttcaacctaaacaactggttaagcacttcgaaatcgaggtggacattttcgagccacaaggcatttccatgttagacgcggaggcatcatttatcacaaacgacctgctgggaagtgcgctaaccaaatctttctcaggcaaaaaaggccacgtgtcattcaaaccctctctggatcagcagcgctcctgccccacttgtactgattcattacttaatggcgactttacaatcacctatgatgtcaacagggagagtccaggaaatgtccagatcgtgaacgggtactttgtgcacttcttcgccccgcagggactccccgttgtgccaaaaaacgtcgcattcgtcatcgatattagtggatctatggccgggcgcaagctcgagcagactaaagaggcactcctgcggatcctcgaagatatgcaggaggaggactatctgaattttattctgttttcaggggacgtttctacatggaaggagcacttagtgcaggcaacaccagaaaatcttcaggaagcccgcacatttgtgaagagcatggaagacaagggcatgactaacatcaatgatggactgttgaggggtatttccatgttgaacaaggcgcgcgaggagcaccgaattccagaaagaagtacatctatcgtcatcatgctgaccgatggagacgcgaatgtaggagaatcccgtcctgaaaagattcaggagaatgtgaggaatgcgattggagggaaattccccctttataacctcggttttggaaataacctgaattacaactttctggaaaatatggccctggaaaaccatgggtttgccaggaggatttacgaggatagcgatgcagatttgcagcttcagggcttttacgaagaggtggccaatcctctccttacaggtgtcgagatggaatatccagagaacgccattttagatctgacccagaatacctaccagcacttttatgacggctcagagattgtcgtcgcaggcagactggtggacgaggatatgaacagctttaaggccgacgttaagggccatggggcaactaacgacctaacatttaccgaggaggtggatatgaaggaaatggaaaaagccctgcaggagcgcgattacatctttggaaactacatcgaacgtctctgggcatatctaactatagagcagctgcttgaaaagcgcaagaatgcacatggagaggagaaagagaacctaacggcacgtgccttggacctttctctgaagtatcactttgtgactcctctgacatccatggtcgtcacaaagccggaagacaacgaggacgagcgagctattgcggataagcctggcgaaggattcagcgctacacccgttagccctgcaatgagctaccttacttcctatcagcccccacaaaatccatattactacgtggatggcgacccacacttcatcatacagatcccggagaaggacgatgccttgtgcttcaacattgatgaggcccctggtactgtcctgagactgatccaggacgccgtcaccggactgaccgttaatggtcagattaccggggacaagaggggatcccctgattcaaaaaccagaaagacctatttcggaaaactgggcattgcgaatgcacagatggacttccaggtggaggttacgaccgagaaaattaccttgtggaatagggctgtgccatccaccttctcttggctcgacactgtcacggtcactcaggacgggctttccatgatgatcaaccggaaaaacatggtagtgtccttcggcgacggcgttactttcgtcgtcgtgctgcatcaggtatggaagaagcatcctgtgcacagggactttcttggcttctatgttgtggatagccatcgtatgtccgctcagacccatggtctgctgggccaattttttcagccattcgacttcaaagtttcagacattagaccgggtagcgacccaaccaagccagatgctactttggtcgttaagaatcaccagttaatcgtaactagagggagtcagaaggattatagaaaagacgcttctatcggcacaaaagtcgtgtgttggtttgtccacaataacggagaagggctgatagacggcgtacacacagattatattgtccctaatctgttctag

SEQ ID NO: 120803 - DNA, 2013 bp, synthetic construct
  misc_feature 1..2013: note = Description of Artificial Sequence: Synthetic coding sequence
  source 1..2013: mol_type = other DNA
atggccttcgcatggtggccctgcctcatccttgcactgttatcctctctcgcagcctctgggtttcccaggagcccatttaggctgctcggaaaacggtcccttcctgaaggcgtggccaacggcattgaggtctactctactaaaatcaattccaaggtgaccagcagattcgcccataacgttgtcactatgcgggcagtaaatcgcgccgatacagccaaggaagtatcttttgacgtggaacttccaaaaactgcgttcattactaatttcacactgacaattgacggggttacctatccaggcaatgtgaaggagaaagaagtggcaaagaagcagtatgagaaggctgtttctcagggcaagacagcaggactagtgaaagcttcaggtcgtaaactggagaagttcacagtgtctgttaatgttgccgccggaagtaaggtcaccttcgagttgacttatgaggaactgctgaagagacacaaaggcaagtacgagatgtaccttaaagtgcaaccgaaacagctcgtgaaacatttcgaaatcgaggtggatatcttcgaaccacagggaatatccatgctggacgctgaagcctcgtttatcacaaatgacctcctgggatccgctctgaccaaatctttttccggaaagaagggccatgtgtcctttaaaccatccctcgaccagcagagatcctgcccaacttgtactgacagcttgcttaatggggactttaccatcacatatgacgtcaatagggagagtccagggaacgtccagattgtcaatggctatttcgtccatttctttgctcctcagggacttccagtggtgcccaagaacgtagcatttgtaatcgacatctctgggtccatggccggccgcaagctggaacaaaccaaggaggccctcctaaggattctggaggacatgcaagaggaggattacttgaactttatactgtttagcggagacgtgagcacatggaaggaacacctggtgcaggccactcctgaaaatctccaggaggctcggacttttgtgaaatcgatggaggacaagggcatgactaatattaacgacggactgctgcggggcataagcatgttgaacaaagccagggaagaacatcggatcccagaaaggtctacctccatagtcatcatgctgacagatggagacgcaaacgtgggagagtcaagaccggagaagattcaggaaaatgtgaggaacgcgatcggtggcaaatttcccttatataacctcgggtttggcaacaacttgaattacaacttcctggaaaatatggccctcgagaaccatgggttcgcgaggcgcatctacgaagactcagatgctgacctgcagctgcagggattttacgaggaagtcgcaaacccacttttgactggagttgagatggaatatcccgagaacgcaatccttgatcttacccagaatacatatcaacacttctacgacggtagcgagatcgtggttgccggccggctcgtggacgaagatatgaactcctttaaagccgatgtgaaggggcacggagctaccaatgatcttaccttcaccgaagaagtggacatgaaggaaatggagaaggcactgcaggaacgggactacatttttggaaactacatcgaacgactgtgggcctacctcacaatagagcaactactggaaaaacgcaaaaatgcacacggggaagagaaagagaacctgactgctcgggcgctggacttaagcctcaagtaccatttcgtgacccctttgacatccatggtggtcacaaaaccggaggacaatgaggatgagagggcaatcgccgacaagccaggggaaggcggagactcccacacaggcgagccacgtcatgttctgcctgatcaactccctgcctctagtaagccccttttactgtgcggcaggggatcacctttgcaccatcccaacagtggagaaaggaggtgtcctctactacagcacaggtag

SEQ ID NO: 120804 - DNA, 2673 bp, synthetic construct
  misc_feature 1..2673: note = Description of Artificial Sequence: Synthetic coding sequence
  source 1..2673: mol_type = other DNA
atggcatttgcgtggtggccgtgccttattctggccctcttgtcatcgctggccgccagcgggttccctcgcagcccgtttcgcctgcttggcaagcgcagtttgcctgaaggcgtagcgaacgggatcgaagtttacagtaccaaaatcaatagtaaggtcacctccaggtttgcgcacaatgtggtcaccatgcgtgcggtcaaccgtgccgatacggccaaggaggtgagtttcgacgttgagcttcccaagaccgcattcatcaccaattttacactcaccattgacggcgtgacatatccaggcaatgtgaaagaaaaggaggtcgccaaaaaacagtacgagaaagccgtgtcccaagggaagactgccgggctcgtgaaagcgtctggaagaaaactcgaaaaattcacggtcagcgttaacgtggcggctgggtccaaagtgaccttcgaactgacttatgaggagctcttgaaacgccataagggaaaatacgaaatgtatctgaaggttcaaccaaaacagctggttaagcacttcgaaatcgaggtagacatatttgaacctcagggcatctcaatgctggacgccgaggcgagctttataaccaatgatctgctgggatccgcccttaccaaaagcttttccgggaagaaagggcacgtgagctttaaaccctcgctggaccagcagagatcatgccctacatgtaccgactcactcttgaacggcgattttacgatcacctacgacgtgaatcgtgagagccctggcaacgtccagattgtaaacggttattttgtgcatttctttgctcctcagggcctgcccgtggtaccaaagaatgtggcattcgtcattgacattagcgggagtatggctggcagaaagctcgagcaaacgaaagaggccctgctacgaattcttgaagacatgcaggaggaagactatcttaattttatccttttctccggagacgtgagcacctggaaggaacacctggttcaagctacaccagagaacctacaggaggcgcggacgttcgtgaaatccatggaggataaggggatgactaacatcaatgacgggctgctgcgaggcatttccatgcttaacaaggccagagaagagcatcgtatcccagagagatcaacctctatcgtgattatgctaacagacggggatgccaacgtgggcgagagccgcccggagaagatacaagagaacgtgcgtaatgctattggcggaaagttccccttatataacttaggctttggtaataacctgaattacaacttcctcgagaatatggcactagaaaatcacggattcgcccggcgcatctacgaagactccgatgccgacctgcaattacagggcttttatgaagaagtggcgaatccgctgcttacaggcgtggaaatggagtaccctgagaacgctatcctcgacctgactcagaatacatatcagcatttctatgacggaagtgaaattgtggtggccggtcgactcgtggacgaggatatgaattcattcaaggctgatgtaaagggacatggggctacaaacgacctaaccttcacggaggaagttgacatgaaggagatggaaaaagcccttcaggagagggattacatcttcgggaattacattgaacgattgtgggcgtatctgaccattgaacaactcctggagaagaggaaaaatgcccatggagaggaaaaggagaacctgactgctagagcccttgacctgagtctgaaataccattttgtcacccccctgacttctatggtggtgactaaacccgaggataacgaggatgagcgggctatagcagacaagcctggggaagacgccgaagcaacaccagtttcaccagctatgtcatacctcacctcttaccagcccccacagaatccttactactatgtggacggcgaccctcactttatcatacaaatacctgagaaggacgatgctctctgtttcaacatcgacgaagccccaggaaccgtgttgagactgatacaggacgccgtaaccggcctgacagtaaatggacaaataacaggggacaagcgtgggtcaccggactcaaaaacccggaaaacctatttcggaaaactaggtattgctaatgcacagatggatttccaggtagaggtgactaccgaaaaaattactctgtggaacagagctgtacccagcacgttcagttggctagatacagttacagtgacacaggatggactatccatgatgattaatcgaaaaaacatggtggtatcattcggggatggcgtaaccttcgtggtggtgctgcaccaggtgtggaaaaaacatccagtccatcgggattttctgggtttttatgtcgtcgactctcacaggatgagcgctcaaacccacggactactgggccaattcttccagccttttgatttcaaggtttccgatatcaggcccggatcggatcccaccaagccagatgcgacacttgtcgtcaaaaatcatcaattaatcgtgacccggggaagccaaaaagactacaggaaggatgcaagtatcggcacaaaagtggtttgttggtttgtccataataacggggagggcctgattgatggcgtccataccgactatatcgtgcctaaccttttctag

SEQ ID NO: 120805 - DNA, 1977 bp, synthetic construct
  misc_feature 1..1977: note = Description of Artificial Sequence: Synthetic coding sequence
  source 1..1977: mol_type = other DNA
atggcctttgcatggtggccctgtctgattctggccttactgagctctttggctgctagcggtttcccccggagccctttccgattgctgggcaaaagatccctgccagaaggtgtagcgaacggcattgaggtttactccactaaaattaatagcaaagtcacctctcgatttgcccataatgtggtgacaatgagagccgtaaatcgcgcagataccgccaaagaggtgagctttgacgtcgaactgcccaagactgcgttcattactaacttcacattgaccattgacggtgtgacctacccaggaaatgtgaaggagaaggaggtagccaaaaaacagtatgaaaaggcagttagtcagggtaagaccgcaggcctggttaaagcctccggtcggaagttggaaaagtttactgtttctgtcaatgtggcggctggcagcaaaagacataaagggaaatacgaaatgtacttaaaggtacagcctaaacagctggtgaagcactttgaaatcgaggtcgacatctttgagccacagggaatcagtatgttagacgccgaggccagcttcatcacaaatgatcttctgggatccgcattgaccaaatcgttcagcggcaaaaaggggcatgtgtcctttaaaccatcgctggaccagcagcgcagttgtccgacgtgcactgatagtctcctcaatggcgatttcacgattacatacgacgtcaaccgggaaagcccagggaatgtccagattgtcaacggatactttgttcatttctttgcgcctcagggtctgcccgtcgtgcccaagaacgtggcatttgtgattgatatcagtggcagcatggctgggcgtaaactggaacaaacaaaagaggcgttgcttcgcatcctggaagacatgcaggaagaagactatctgaactttatcctgttttctggagacgtgtccacttggaaagaacacctcgtacaagccactcccgaaaacttgcaggaagctcgtacctttgtaaagagtatggaagataagggaatgacaaatattaatgacggccttcttagaggcattagtatgttaaacaaggctcgcgaagagcatcgcatccccgaaagatcaacctccattgtgattatgctcacagacggtgatgccaacgtgggggagtctcggccagaaaaaattcaggagaacgtgcgtaacgctatcggcggtaaattcccactttataatctgggctttggaaacaatctgaactacaatttcttagagaacatggctctggagaaccatggtttcgcccgccgtatttacgaggatagtgacgcggaccttcagcttcaaggcttctacgaagaggtggctaaccccctcttaacgggcgtagaaatggaatatcctgagaacgccatcttggatctgacccagaacacataccagcacttttacgacggcagcgaaattgtagtggcaggcaggctggtcgatgaggacatgaattcgttcaaagcagatgtaaaaggccatggagcgacgaatgatctcactttcactgaggaggtagatatgaaggagatggaaaaagccctccaagaacgggactatatattcggcaactacattgagcggttgtgggcctacttaactattgaacagctgctggagaagcggaagaatgctcatggagaggagaaggagaatctgaccgcacgggctctagacctgtcattgaaataccacttcgtcacaccacttaccagtatggtggtgacaaaacccgaggacaatgaggatgagcgggctatcgctgacaagcctggagaaggcggggattcccataccggagagccccgccatgttctgcctgaccagcttcccgcctcaagcaagcccctgctgctctgcgggagaggcagtccgttgcatcatcccaactcgggggaacgccgatgtccactgctccagcatcgctag

SEQ ID NO: 120806 - DNA, 2793 bp, synthetic construct
  misc_feature 1..2793: note = Description of Artificial Sequence: Synthetic coding sequence
  source 1..2793: mol_type = other DNA
atgaaaccaccacggcctgttcgcacgtgtagtaaagtactggtgctgttgagcctgctcgcgattcatcagaccacaactgccgaaaagaacggcattgacatttatagcttgaccgttgatagtcgcgtttcttcccgtttcgcccacaccgtggttacatcaagagtagtgaatcgcgctaacaccgtgcaggaagcgacatttcagatggagctgccaaaaaaggccttcatcaccaatttcagtatgattatagatggtatgacctaccctggtattataaaggagaaagcggaagctcaggcacaatatagtgctgcagtggccaaggggaagagcgcagggcttgtgaaagctacaggtagaaatatggagcagtttcaggtcagcgtgtcagtggcccccaacgccaaaatcactttcgaattggtgtacgaagagctgctgaaacggaggttgggtgtttacgagctgttactcaaagtgcggccacagcaacttgtgaaacatctccagatggacatccatatcttcgagcctcaggggataagttttctcgagaccgaaagcacattcatgactaaccaactggtggacgcgctcacaacctggcagaataagaccaaggctcatattaggtttaagcccactctgagccagcagcagaaaagtccagagcagcaggaaacagtgctggacgggaacctgatcattagatacgatgtggatcgtgcaatttcaggaggatcaatccagattgagaatggttactttgttcattatttcgcacctgagggtctgactaccatgcctaagaacgtggtctttgtcatcgataagtctggtagtatgtccggccgcaaaatccagcagacccgcgaagccctaatcaagatccttgatgacttatcgccccgtgatcagtttaatttgattgtcttctctactgaagcaacccagtggcggccctccctcgtgcctgccagtgctgaaaatgtcaacaaggcccggtcctttgctgcagggattcaggctcttgggggtaccaacattaacgatgccatgctgatggccgtgcagttactcgatagctctaatcaggaggaaagacttccagaaggttctgtgtctctcatcatactgctcaccgatggggatccaacggtgggagagaccaatcccaggtctatacaaaataatgtgcgcgaagctgtaagcggtcgctatagcctgttttgcttaggatttggcttcgacgtcagctatgcctttttagagaagcttgcgctcgacaacgggggacttgcaagacgtattcacgaggattctgactccgctctgcagcttcaggatttttaccaggaggtggcaaatccgctgctgaccgccgtgacttttgagtacccatcaaacgcagtggaggaggtgacccagaacaacttccgtctactgtttaaggggtcagaaatggttgtggccgggaagctgcaggaccggggcccagatgtgttaacggcgactgtgtcgggcaaattacccacgcagaacataacattccaaacagaatcgagcgtggcggagcaagaagccgaatttcagagcccaaagtatatcttccacaatttcatggagcgcttgtgggcgtaccttacaatccagcagcttctggaacagactgtcagtgccagcgacgctgatcaacaagcgctgagaaaccaagctctgaatcttagcctagcatacagcttcgtcacacctcttacaagcatggtagtgaccaagcccgacgaccaagaacaaagccaggtggccgaaaaacccatggagggcgagagtcgaaacaggaacgttcactcgggatctaccttttttaagtattatctacagggggccaagattccaaaaccggaggcatctttttcgccgaggcgaggctggaacagacaagcaggtgctgccggttctaggatgaactttagacctggggtgctgtccagtagacagcttggcctcccaggaccaccagacgtgcccgatcacgctgcgtaccaccctttccggagactcgccatactgcccgcaagtgctccacccgcaacatctaacccggatcctgccgtatcacgggtgatgaacatgaagatcgaagagactactatgaccacacagaccccagcccccatccaggcgcctagtgcaattctgccattgcccggccagtctgtcgagcgcctctgcgtggacccccgccataggcaggggccggttaatctgctttctgaccctgagcaaggggttgaagtcactgggcaatacgagagggagaaagctgggttcagctggatcgaggtcactttcaagaacccccttgtttgggtccatgcaagtcctgagcacgtggtcgtgacaagaaatcgccggtcttccgcttataagtggaaggaaacactgttctctgtcatgcctgggcttaaaatgacaatggacaagactggcctcctactcctgtcagatcccgataaagtgaccattggcctcctgttctgggatggccggggagagggattacgccttctgcttagagacacggatcgattttcctctcatgttggcggcactctcgggcagttctaccaagaagttctgtggggatcaccagccgccagtgacgacggacgccgaactctgcgagtccagggaaacgaccactcagctacccgcgagcggagactggattatcaggagggtcctcctggcgtagagatcagctgttggagcgtggaactgtag

SEQ ID NO: 120807 - DNA, 2745 bp, synthetic construct
  misc_feature 1..2745: note = Description of Artificial Sequence: Synthetic coding sequence
  source 1..2745: mol_type = other DNA
atgaagccaccccggccagtgcgtacatgttcaaaggtgctggtcctgctgtcactgctcgcaatccatcagacaactaccgccgaaaagaatgggatcgatatttattccttgacagttgattccagggtgtccagccgatttgcccacaccgtggttactagccgtgtggtcaacagagctaacactgttcaagaggccacattccagatggaactgccaaagaaggccttcatcactaacttctcaatgatcatcgatggaatgacctatccaggtatcatcaaggaaaaagcagaggcacaagcccaatactccgcagctgtcgctaaaggcaagagcgccgggttggtgaaggctaccgggcggaacatggaacagttccaggtctctgtcagcgtggctccaaacgctaaaataactttcgagctcgtctacgaggaactgctcaagagacggctcggagtgtacgagctgctcttgaaggtccgacctcaacagttggttaagcatctgcagatggacatccatatcttcgaaccacaggggatctcttttctcgaaacagagagtacatttatgaccaaccagctggtggatgccttgacgacttggcagaataagaccaaggcccacataaggtttaaacctactctgagtcagcagcagaaatcaccggagcagcaggaaacagtactggacggcaacctgatcatcaggtacgacgtggatcgggccatctcgggtggatccatccagattgaaaacggctactttgtgcattatttcgccccagagggattaaccacaatgcccaagaatgtggtctttgtgatcgacaagagtggatccatgtctggtaggaagatccagcagacccgagaggccctgattaagatcctggacgatctaagcccaagggaccagttcaatctgattgtgttctctacggaagctacccaatggaggccatccctggtacctgcttcggctgaaaacgtgaacaaagccagatcgttcgcagccgggattcaggctctgggcgggactaacatcaacgatgccatgctgatggccgtccaactgctggactcctcgaaccaggaggaaaggttaccagaggggtcagtgtccttgattatcctgctgaccgatggtgatccaacagtcggagaaacaaatcccagatcaattcagaataatgttagggaggctgtaagcggacgttacagcctgttctgtctggggttcgggtttgacgtgagctacgctttcttagaaaagctcgctctggataacgggggcctggcaagaagaatacacgaagactccgattcagccctgcaactccaggatttttatcaggaggtggctaacccacttctgacagcagtgacattcgagtatcccagtaatgctgttgaggaggtcactcagaataatttccgcttactgtttaaaggatctgagatggtagtcgccgggaaactccaagacagagggcccgacgtgctcaccgccactgtcagtggaaagcttcctactcaaaacataacattccaaacagagtcatcagtggctgaacaagaggctgaattccagtctcctaagtatatatttcacaacttcatggagcggctctgggcctacttaactattcagcaactcctggagcaaaccgttagtgccagcgatgccgaccagcaagccctgaggaatcaggccctgaatctctctcttgcctacagtttcgtgacccctctgaccagcatggtcgttactaagcccgatgatcaggaacaatcgcaggtggctgagaaacccatggagggggagagccgcaatcgcaatgtgcatagtgctggagccgccggatctcgcatgaacttcagaccgggtgtattgtcaagtcggcaactcggccttccgggcccacccgacgtcccagaccatgcagcctaccatccttttaggagattggctattttgcctgcctcagctccccccgccacatctaatccagatcctgccgtaagtcgggtaatgaacatgaaaattgaggagaccacaatgaccacccagaccccagcttgcccttcctgcagcagatcgcgtgcaccggccgtgcccgctcctattcaagctcccagtgcaatcttaccactcccaggacaatcagtggagaggctttgcgtggatcctcgacatcgccagggaccagtcaacctgctgtctgacccggagcagggcgtcgaagtgactggccagtacgagagggagaaggccggtttttcttggatcgaagtgacatttaagaacccactggtatgggttcacgcatcccccgaacatgtggtcgttacaaggaatcggagaagctcagcatacaagtggaaggaaacactgttttccgtgatgccaggattgaagatgacgatggataaaacaggtctgctgttgcttagtgatcccgataaggtcacaattggactcctcttttgggatggacgcggcgagggactgcgactattgcttagggacactgaccggttctccagccacgtcggcggaactctgggtcaattttatcaggaggtcctgtggggctcccctgcagccagtgatgacggccgtagaaccctgcgcgtgcaaggtaatgatcattctgcaaccagagaaaggagactggactaccaggagggtccaccaggtgttgagatttcctgctggagcgttgagctgtag

SEQ ID NO: 120808 - DNA, 2703 bp, synthetic construct
  misc_feature 1..2703: note = Description of Artificial Sequence: Synthetic coding sequence
  source 1..2703: mol_type = other DNA
atgaaaccaccacgccctgttcgaacttgcagtaaagtgctggttctgctgtccctgctcgccattcatcagacgactacggcagagaagaacggaatagatatctattctttaacggtagactcgagagtctccagcaggtttgctcatacagtagttacaagccgcgtagtgaatcgcgctaatacagtgcaggaagctaccttccagatggagcttccgaagaaggccttcattaccaacttttccatgataatagatggcatgacatacccgggaatcatcaaggagaaggcagaggcccaagcccagtatagcgctgcagtggctaagggaaaatctgccggcctggtgaaggctacgggcagaaatatggagcagttccaagtgtcggtgtcggtggctcctaacgctaagatcactttcgaactagtttacgaagagctgctaaaaaggcggttgggggtctatgaactcctgttaaaagttagacctcagcaattggtcaagcatctacagatggatatacatatcttcgagccccagggcatttcttttctcgaaacagaaagcactttcatgaccaatcagctagtcgatgcactgaccacatggcagaacaagacaaaggcgcacatcaggtttaagcctaccttgagccagcaacagaagagccctgaacagcaggagactgtcttggatggtaacctgatcatacggtacgacgtggaccgcgccatctccggaggtagcattcagatcgagaatggctactttgtccactattttgctcctgaagggttgacaacaatgcctaagaacgtcgtgtttgtaatagacaagtctggaagcatgtccggaaggaaaattcagcagacacgggaggccctgataaagatcctagatgatctttccccgcgcgatcaatttaacctgatcgtgtttagcaccgaggccacacagtggcgccctagccttgttcccgctagcgcggagaatgtcaataaggcacggtcgttcgccgccggcattcaggctctgggcggtaccaacatcaatgacgccatgctcatggccgtgcagctgttggattcctctaaccaagaggaacggctgcccgagggctctgtgtccctgatcattctgctgactgacggtgacccaacagtaggcgagactaatccccgctctatccagaataatgttcgggaggctgtctccggtcgctacagcctgttctgtctgggcttcgggtttgacgtctcttacgctttcctggaaaagctggccttggataacggcggcctggcgagacgcatccatgaggattccgactcagctctgcagctacaagatttttaccaggaggtggctaacccgctactgactgccgtcacttttgaatatcctagtaacgccgtcgaagaggttactcagaataactttcggctattgttcaaggggtcagagatggtggtggcaggcaaactgcaagataggggcccagatgtcctgaccgccaccgtgagtggaaaactccctactcagaatatcacattccagactgagagcagcgttgccgagcaggaagctgagttccagtcgccgaagtatatcttccacaactttatggaaagattgtgggcctacctaactattcagcagctactcgaacagactgtgagtgcatctgatgccgaccagcaggccctccgaaaccaggctttgaatttatccctcgcctacagttttgttacgccgttgacatcaatggtcgtcactaaaccagatgaccaggagcagagccaggtcgccgaaaagccgatggagggtgagtcacggaacaggaacgttcattccgcaggagcagctgggtctcgcatgaacttcaggcccggcgtgctctcatcaaggcagctgggactccctggcccgcccgatgtcccagatcacgcggcataccacccatttcgacgtctcgcaatccttccggcttcagcaccacctgctacctccaaccccgaccctgccgtgtcacgcgttatgaatatgaagatcgaggaaaccaccatgactacccagacccccgccccgattcaggccccttctgctatactcccactacccggacagagtgtcgaacggctgtgtgtggacccgaggcaccggcaggggccggtaaatctgttaagcgacccagagcaaggcgttgaagtgacaggccaatatgagagggagaaggccggctttagctggatcgaggtcactttcaagaatcctcttgtctgggtacacgctagtccggagcacgttgtggtgactcgcaatcgacgaagctctgcctataagtggaaggagacactcttctccgtcatgcctgggttgaaaatgacaatggataaaaccggactactcctgctatccgacccagataaggttactatcggcttactgttttgggacgggcggggtgagggactaaggctgctgcttcgggacacggatcggttttcaagccacgtgggaggcactctgggccaattttaccaggaagtgctctggggtagccccgctgcatccgacgacggacgccgtacccttcgcgtgcagggtaatgaccactcagcaactcgcgagcggagactggattaccaagaaggacccccgggcgtggagattagctgctggagcgtcgagctctag

SEQ ID NO: 120809 - DNA, 1683 bp, synthetic construct
  misc_feature 1..1683: note = Description of Artificial Sequence: Synthetic coding sequence
  source 1..1683: mol_type = other DNA
atgacgtatccaggtatcattaaggagaaggccgaggcccaagctcagtattcagcagccgtagccaagggaaagagcgccggcttagtgaaggcgaccggccggaacatggaacagtttcaggtgtcagtgtctgtagcccctaacgccaagattaccttcgagttagtttacgaggagttgctgaaacgcaggctgggcgtctatgagttgctcttaaaggtgaggccccaacaactagtgaagcacctccagatggatattcatattttcgaaccccaggggattagcttccttgagaccgagtcaacatttatgacaaatcagttagtagacgccttgactacctggcaaaacaagactaaagcccacatccggtttaagcctacactctcacaacaacagaaatcccccgaacagcaagagacggtccttgatggcaacctgataattaggtacgacgtggatagggccattagcggaggaagtatccagatcgagaatggttatttcgtgcattatttcgctcccgagggattaacaacgatgccaaaaaacgttgtctttgtcattgacaaaagcgggagcatgagcggacggaaaatccagcagacgcgggaagcattaatcaaaatcctggatgacttatccccccgggaccagtttaaccttattgttttttccactgaggccacgcagtggcgccccagcctcgtgccagccagcgccgagaacgttaacaaggcacgttcctttgccgcgggcatccaggccctggggggtaccaacatcaatgatgctatgctcatggctgtgcagcttttagacagctccaatcaggaagaacggctgcctgaaggctctgtttccctgatcattctgctcacagacggggaccccacagtaggtgaaacaaacccacgctccattcaaaacaacgtgagagaggcggtttctgggcgttacagcttattttgtctcggtttcggctttgacgtttcatacgcctttctagaaaagctggcgctcgacaacggagggctcgccagacgaattcatgaggactccgactctgctctgcaactccaagacttctatcaggaagtagccaatccactgctgaccgccgtgaccttcgagtaccccagcaatgcggtggaggaggtcacccagaataactttcggctgctgttcaaaggaagcgagatggtcgtcgccgggaagctgcaggaccgggggccagacgtactaacagctactgtgtcaggaaagctgcctacacaaaacatcaccttccagactgagtccagcgtggctgagcaggaagctgagttccagtcaccaaagtatatctttcataatttcatggagaggctgtgggcctatttgaccattcagcagctgcttgagcaaacggtgtcagccagtgatgcagatcagcaagcacttagaaaccaggccctgaacctcagtctcgcttacagctttgtgacaccattgacaagcatggtcgtaacaaagccagatgaccaggaacaatctcaggtggcagagaagcccatggagggggagagcaggaaccgtaacgtacactctggatcaactttcttcaaatattacctccagggggccaagatccccaagccaggggataaagtcggcggtggcggacgcggtgattag

SEQ ID NO: 120810 - DNA, 2667 bp, synthetic construct
  misc_feature 1..2667: note = Description of Artificial Sequence: Synthetic coding sequence
  source 1..2667: mol_type = other DNA
atgaagcctcctcggccagttaggacttgctccaaagtccttgtgttgctaagcctccttgctatccatcagaccactacggccgaaaaaaacgggatcgatatttactccctcacggtggacagcagagtgagctccagatttgcacacaccgtcgtgactagtcgggtcgtgaaccgggctaatactgtgcaggaggccacttttcagatggagctgccaaaaaaagcattcataaccaacttctcaatgatcatcgacgggatgacgtaccctggaatcattaaggaaaaggcggaggcgcaggctcagtactctgccgccgtggctaaaggtaagtcggcgggattggtgaaggcaacgggccggaatatggagcagttccaagtgtctgtctccgtggccccgaacgctaagagaaggctgggcgtctacgagctcctcctcaaggttaggcctcagcagttggttaagcacctgcagatggacatacacatctttgaacctcagggaatttcgttcctggagactgaatccacattcatgaccaaccagttggtcgatgcgttgaccacttggcagaacaagacaaaagcacatatccgttttaagcccacactgtcccaacagcagaaatctcccgaacagcaggaaaccgttctcgacggcaacttgattattagatacgacgttgacagagctatctcaggcgggtccatccagatagagaatggatactttgtgcactatttcgcaccagagggattgactacaatgcctaaaaacgtcgtattcgtcatagacaagagcggctctatgagcggcaggaagatccagcagactagggaggccttgattaaaatacttgatgatttgtctccaagggatcagttcaacctgatagtgttctccacagaggctactcagtggcggccctcgctcgtgccggcgtctgccgagaatgtgaataaggcccggagctttgctgccggaatacaagcgctcggagggacaaacatcaacgacgcaatgctgatggctgtgcagctgttggactcatccaatcaagaagagcggctgccggagggatctgtcagtttgatcattttgctaaccgatggagatcctacagtgggcgaaacaaatcctcgcagcattcagaacaatgtccgtgaggccgtgtccggtagatattccctgttctgcctgggatttgggttcgatgttagctacgcattcttggaaaagctcgccctcgacaatggcggactcgcccgccggatccacgaggactctgattcagcactccagcttcaggatttttatcaggaagtggctaacccgctcctcaccgccgtgaccttcgagtacccaagcaacgccgtggaagaggtcacacagaacaatttccgcctcctgttcaaaggttcagaaatggtggtcgcgggtaagctgcaggaccgcggcccagatgtccttactgcaacagtgtcggggaagcttcctacccagaacatcacattccaaacagaatcttcagtggctgagcaagaggccgaatttcaatcgccaaagtacattttccacaacttcatggagcgtctctgggcctatctcactatccagcagctcctcgaacagacggtcagtgcctccgatgccgaccaacaggcactccgtaaccaggcccttaacctcagcttggcttactccttcgtgacaccattaacctccatggtcgtcactaagcccgacgaccaggaacaatcccaagtcgctgaaaagcccatggagggcgaaagcagaaataggaacgtgcacagcgctggggctgccggctccaggatgaacttccgcccaggggtcctgagttcacggcagctgggcctgccgggacctcctgacgtgccagaccatgctgcttaccacccctttcgaagactggccatcttaccggccagtgctccccccgcgactagcaacccagatcctgccgttagccgcgtgatgaacatgaagatcgaggaaacaaccatgacgactcagaccccggctcccatccaggccccatccgctattttacccctgcccggccagtccgtggaaagactgtgtgtagaccctagacacaggcaaggcccggttaacctcctgagcgatccagagcagggcgtggaggtaacagggcagtacgagcgggagaaggccggattttcctggatagaggttacgttcaagaaccccttggtttgggttcacgcctcgccggagcatgtagtcgttactagaaaccgccgatcttcagcatacaagtggaaagagactctgttttcagtaatgccgggtctaaaaatgacaatggataagactgggctgctgttgctgtctgatcctgacaaagtcactatcggacttttattctgggacggtaggggagaggggctgcggctcttgttgcgagatactgaccggttcagtagccacgtcgggggcacattgggccaattttatcaggaggtgctatggggctctcccgccgcctcagatgacggcagaaggactctccgagtgcaagggaatgaccattctgcgaccagggagcggcggctggactatcaggaaggtccccccggagtcgagatcagctgctggtccgtggaactctag

SEQ ID NO: 120811 - DNA, 2871 bp, synthetic construct
  misc_feature 1..2871: note = Description of Artificial Sequence: Synthetic coding sequence
  source 1..2871: mol_type = other DNA
atgctactacttctcgggctctgccttggactctccctgtgtgtgggctcccaggaagaggcccaaagctggggccatagctctgaacaggatggccttcgagttcccaggcaagtgagactgttgcagcggcttaagaccaagcccctgatgaccgaatttagcgtgaagtcaactatcattagccggtatgcattcacgaccgtgtcatgccgcatgctaaacagagcgagcgaggaccaggatatcgagttccagatgcagatccctgcggcggcttttatcactaatttcacaatgttaataggggacaaagtgtatcaaggcgagattacggagcgggagaagaaaagcggcgacagagtgaaggagaaaaggaataagaccacagaggaaaatggggaaaagggtactgagattttccgggccagtgctgtgatccccagcaaagataaagccgctttttttctttcctatgaagagctcctgcaacgccggctaggtaagtatgagcacagtatctccgttcgcccacagcagttaagcggtagactgtcagtggatgtgaacatactcgaaagtgcaggcatagcctctctcgaagtgctgccattacacaattctagacagcgcggatctggtcgcggcgaagatgatagtggcccaccaccatctactgtcattaaccagaacgaaacttttgctaatataatttttaaaccgacggtggtgcagcaggcaaggatagcgcagaatggcatactgggggactttatcattaggtacgatgtaaatagggagcagagtatcggcgacatacaagtccttaacggatacttcgtccactactttgctcccaaggatctgccccctctgccgaaaaatgtggtattcgtgctggattcatccgccagtatggtgggcacgaagttacggcagactaaggatgcgttgttcaccatcttacatgatttacggccgcaggacagattcagcataatcggcttctctaacaggattaaggtctggaaagaccatctgatttcggtgacacctgacagcattagggatggcaaggtttatatccaccacatgagtccaacaggcggaaccgatataaatggtgcactccagagggcaattagactgctaaataaatatgtggcccactctgggataggggatagatccgtctctcttattgtattcctgacggatggtaaaccaactgtcggcgaaacccatacactgaagattttaaacaatactcgcgaggctgcacgcggccaagtctgtatcttcacaataggcattgggaacgatgtcgacttccgtcttctagaaaagctgtctttggaaaactgcggactgaccagaagggtacacgaagaagaggacgctgggtcccagctgattggattctacgacgaaatacggacaccgcttctttcggatattagaatcgattacccccccagctctgtagttcaggcaaccaaaacgttattccccaattattttaatggatcggaaattatcattgcaggcaagttggtcgacagaaagctggatcatttgcacgtggaagtgactgctagcaatagcaaaaaatttataatcctgaagaccgatgtccccgtgcggcctcagaaggcaggcaaagatgtaacaggatccccacgccccgggggcgatggggagggggataccaatcacatcgaacgactctggtcttacttaaccaccaaggaattgttgtcctcctggcttcagtctgatgacgagccagagaaggaacggttgagacagagagcccaggccctcgcagtgtcctatcgtttcttaacgccattcacctccatgaaactgagaggcccggtgccaagaatggatggcctggaggaagcacatggcatgagcgccgcaatggggccagaaccagtcgtgcagtctgtcaggggggctgggacccaacccgggccactgctgaagaagccttatcagccaagaataaagatcagcaagaccagcgtggacggcgatccacactttgttgtggacttcccactctctaggctgacagtttgtttcaatattgatggccagccgggggacatcctgcggctggtgtccgaccatagagattccggagtgaccgtcaacggtgaacttataggtgctccggcccctcctaacggacacaagaagcagcggacctacctccgcacaataactatcctgatcaataagcccgagcgctcttatctggagattacacccagccgagtgatcttagatggcggtgaccgactggtgctcccatgtaatcagagtgtggttgttggttcttggggactggaagtatcagtttctgctaacgcaaatgtgactgtcaccatccagggcagtattgctttcgtgattctgatccatttgtataagaaaccagcaccttttcagaggcatcacttgggcttttacattgcaaactcagaaggcctaagctctaactgccacgggctgctgggccagttccttaatcaggacgccagactcacggaagatccggccggtcccagccagaacctgacacatccactgctccttcaggtcggagaaggccccgaggccgtgctcacagtcaagggccaccaagtccctgtagtttggaaacagaggaaaatttacaatggcgaggagcagatcgactgctggttcgccaggaacaatgccgccaagctgattgacggcgagtataaggattatttggcgttccacccattcgacaccggtatggacacttggcctgggaatgtccagggcgccctgaaattggccgccctgaaaatgcaggtccacgagggacagtag

SEQ ID NO: 120812 - DNA, 2229 bp, synthetic construct
  misc_feature 1..2229: note = Description of Artificial Sequence: Synthetic coding sequence
  source 1..2229: mol_type = other DNA
atgaggaattatgactccggaccccccccatcgactgtgataaatcaaaatgagacgttcgccaacataatctttaagccaactgtggtacagcaggccagaatcgcacagaatggcattttaggtgacttcatcattagatatgacgtgaaccgagagcagtctatcggcgacatccaggtacttaacggatactttgtgcactactttgcacctaaagacctgcccccgttacccaagaacgtagtgttcgtgctcgacagtagcgcttcaatggtggggacaaagttgcggcaaactaaagatgcattgttcaccattttgcatgatctgaggcctcaggacagattcagcatcatagggttcagtaacaggataaaagtctggaaggatcacctgatctctgtcacacccgacagcattagggacggcaaggtttacatccatcacatgagcccgacaggaggtactgatatcaacggtgctctacagcgtgcaattagactgctcaataagtacgtcgcgcatagcggaatcggcgaccgctccgttagcctgattgtgttccttacagacggaaaacctactgtgggcgagacccacacactgaaaattttaaacaacacaagggaggctgcccgagggcaagtatgtatcttcaccatcggcatcggaaacgatgtggactttcggttgctggaaaagctgtccctcgagaactgtggtctcaccagacgggtccacgaggaagaagacgctggctcgcagctcataggattctatgatgaaatccgcacccctctactgagtgatattcgcatagactaccctccctctagcgtcgtccaagccaccaagacactatttcctaactattttaatggaagtgagatcatcattgctggtaagttagtggacagaaagctcgaccacctgcatgtggaagtgaccgcctcaaactcaaaaaagttcatcatccttaagaccgatgtgcctgtgcgtccgcagaaagcaggcaaagacgttacgggatccccccggcccgggggcgacggggagggtgataccaatcatattgaacggttatggagctacctcaccaccaaggagttactgtcctcctggctgcaatccgatgatgaacccgagaaggaaagactaaggcagagagcccaggccctggcggtctcttaccggtttttgaccccattcacctccatgaaactgagggggccggtcccaaggatggacggacttgaggaagcacatggcatgtcagcagccatgggcccggagccagtggttcaatctgtacgcggcgcagggactcaacctggccctctgctgaagaagccatatcagcccagaatcaagatcagcaagacttcagtggacggtgacccgcatttcgtagtggacttcccattgagccgcctgacagtttgcttcaatattgatggacagccaggcgacatccttcggctggttagtgatcatcgggactccggcgtgacagtcaatggggagctgattggagcgccggctccacctaatggtcataagaaacagcggacgtacctgcggactatcacaatactgataaataaacccgagcgttcttacctcgaaatcacaccgagcagggtaatcctcgatgggggggatcggctcgtactgccctgtaatcagtccgtggttgtgggcagctggggtctggaagtttccgtcagtgcgaacgcaaatgttacagtgacaatccaagggagtattgcatttgttatccttattcatctctataaaaagcccgcacctttccagcgacaccacctggggttctacattgcaaactcagagggtctgagctccaattgtcacggacttctgggacagttcctgaaccaggacgcccgccttacggaggatcctgcaggaccaagccagaaccttacccaccctctcctgctgcaggtgggggaggggcccgaggccgtcctcacggttaaggggcaccaggtgccagtagtgtggaagcagcggaaaatatataacggcgaagagcagattgactgttggttcgcccgcaataacgcggccaagcttatagacggggagtacaaggattatttagcattccatccctttgacactggcatggacacatggcctggtaacgtgcagggagccctgaaactggccgccctgaaaatgcaggtccatgaaggccagtag

SEQ ID NO: 120813 - DNA, 2109 bp, synthetic construct
  misc_feature 1..2109: note = Description of Artificial Sequence: Synthetic coding sequence
  source 1..2109: mol_type = other DNA
atgctactgctgctgggattatgcctcggcctctccctgtgtgtgggctcccaggaggaagcacaatcctggggtcactcatctgaacaggatggactgcgtgtgcccaggcaggtgcgtttgctgcagcggctgaagaccaagccactcatgaccgagttttctgtgaagtccacgatcatttcaagatatgcttttaccactgtgtcttgccgcatgttgaatagagcctccgaggatcaggacatagagttccaaatgcagatccctgctgccgccttcatcacaaacttcacaatgctgatcggagataaggtgtaccaaggggaaatcacagagagagaaaagaagtccggagatcgggtgaaggagaaacgcaataaaaccacggaagagaatggcgaaaagggtactgagatcttcagggcatctgctgtcatcccatccaaggacaaggctgcctttttcctctcttacgaggagctcctccagaggcgactgggaaaatatgagcactcaatatcagtacgcccgcaacaattgtccggaagactctccgttgatgttaacatcttagaatcagctggcattgctagcctcgaagtgctccctctgcataactcacgccaacgcggctctgggagaggcgaggatgatagcgggccacccccatccaccgtaataaaccagaacgaaacgttcgcgaatatcatctttaaaccaacggtcgttcagcaggcaagaattgctcagaatggaatactgggggattttataatcagatatgacgtaaatcgggagcagagtatcggtgatattcaagtgttgaatggatatttcgtccactactttgccccgaaggatttaccaccgctgcccaagaacgtggtcttcgtgttagactcatctgcctctatggttggaaccaaactgcggcagaccaaggatgcgttgttcacaatcctccacgacctgcgacctcaggatcggttctccatcattgggttttctaaccgaataaaggtttggaaagatcacctgatctctgtcacaccggattctatccgcgacgggaaggtttacatccatcatatgtctcccaccggcgggacggacatcaacggggcgcttcaacgtgccatcagacttcttaataaatatgtcgctcatagtggcatcggggaccgaagcgtgtcccttatcgttttcttgactgacgggaagcccaccgttggcgagacacataccctgaagatactcaacaacactagggaggcagctcgaggccaggtgtgtatctttacaattgggattggaaacgatgtggactttcgcctgctcgagaagctgagcctggagaattgtggtttaactagacgggtccacgaggaggaggatgctggtagtcagctcattgggttttacgatgaaatccggactcctctgttgtcagatataaggatcgattaccccccgtcatctgttgttcaagccaccaagacgctcttccccaattatttcaatggatctgaaatcatcatcgctggcaaactggtggatcgaaagttggaccatcttcatgtcgaggtgaccgcctccaactccaaaaaattcattattctgaaaaccgatgtgcccgtgaggccacagaaagccggaaaggacgtgaccgggtccccgcggcctggcggggatggggaaggagatactaatcacattgagaggctttggtcttatctcacaacaaaagagctcttgagctcatggttacagtcagacgacgaaccagagaaagagcgattgaggcagagggcgcaggcgctggccgtatcctaccgattcctcacccccttcacttctatgaagttaaggggtcccgtgccgcggatggatggcctagaggaggctcatggtatgtctgccgcaatgggtcccgaacccgtcgttcagtcggtccggggcgccggcacgcaaccaggaccactcttgaaaaaaccctaccaacctagaattaaaatatctaaaaccagtgttagaggattccggcgggaagaacagatattctctaatgtcatgaaatttccattcgcttcaatattggagctttag

SEQ ID NO: 120814 - DNA, 2088 bp, synthetic construct
  misc_feature 1..2088: note = Description of Artificial Sequence: Synthetic coding sequence
  source 1..2088: mol_type = other DNA
atgttgcttctcttgggtctttgtctcggactttctctgtgcgtaggcagccaagaagaagctcagtcatggggacactcgtctgagcaagacggcctgcgggttcctcgacaggtgagactactgcagagactaaaaaccaagcccctcatgacggagttctccgtgaaaagcacgatcatctcacgatatgcttttactacggtctcctgtcggatgttgaatcgagcctccgaggaccaggacattgaattccagatgcagatacctgccgcggcattcatcaccaactttaccatgctcatcggggataaagtgtaccagggcgaaattactgagcgggagaaaaagagcggcgatagagtcaaggagaaacgtaataaaactaccgaagagaatggcgaaaagggaacagaaatcttccgagcgtcagctgtcattccatccaaggataaagctgcattttttctgtcctatgaagagctcctccaacgacggctggggaaatatgagcactctatctcagttcgcccgcagcaactttctgggcgtctgtctgtggatgtgaacattctcgaatctgccggcatcgcttcgttggaggtacttcctctccacaacagtcgacagcggggaagcggacgaggagaggatgactctggacctcctccaagcaccgtcatcaaccaaaatgaaacattcgctaatataatcttcaaacctacagtggtacaacaggcacggatcgcccagaacgggattttgggggactttattattcgctatgacgtgaacagggagcaatccattggtgatatccaggtgctgaatgggtatttcgtccactatttcgcacccaaagatctgccaccactgccaaagaatgtggtatttgtgcttgactcaagcgcctctatggtcggtaccaaacttcgacagaccaaggatgcactcttcaccattctgcacgatttgagaccgcaggaccgtttcagcatcatcggtttcagcaacagaatcaaggtctggaaagatcacctcatctctgtaacccctgattccattagggacggcaaagtgtacatacaccacatgtctccaacgggcggtaccgatattaatggtgccctacagagagccatccgactcctgaataagtatgtggcccactctggcatcggcgacagatctgtgagcttgatcgttttcctgactgatggtaagcccacagtaggagagacacacacgcttaagattctcaataacaccagggaagctgctcgcggacaagtctgtattttcacaattgggatcggtaacgatgttgatttcagactcttagaaaaattgtcgctagaaaactgcggcctcacaaggagggtgcacgaggaagaggacgcggggtcacagctcattggcttttatgacgagatccgcacaccccttctgtctgacattcgtattgactatcctccatctagcgttgttcaggccacaaagacattgtttccaaactactttaacgggtctgaaatcataatagccgggaagttggtcgatcgcaagctggaccacctgcacgtggaagtgactgcttcaaactcaaagaagtttatcatcctcaaaacagacgtgcctgtgcggccacagaaagcagggaaagacgtgacaggctccccacgcccagggggcgacggagaaggtgacaccaatcacattgagagattgtggtcctatttgaccactaaagaactgctgagttcctggctgcagagtgacgatgagcccgaaaaagagagattgcgccagcgcgctcaagccctggctgtctcttatagattcctaacaccttttacgtccatgaaactgcgaggacccgtgccacgaatggatggcctggaagaggcccatgggatgtcagcggcgatgggccccgaacctgtggttcagtcagtccgcggagccgggactcagccaggtcccctgctgaagaaacccccaaactctgttaaaaagaagcagaataagacaaagaaacgacacggcagggatggagtctttcccctccaccatctgggaatccgctag

SEQ ID NO: 120815 - DNA, 2172 bp, synthetic construct
  misc_feature 1..2172: note = Description of Artificial Sequence: Synthetic coding sequence
  source 1..2172: mol_type = other DNA
gattcaggtcctcctccctccacggtgataaaccagaatgagacttttgcaaacattattttcaaacccaccgttgtgcagcaagcccggatagcgcagaatggtatcctaggggattttatcatccggtacgatgtaaaccgtgagcaatccatcggtgatatacaagtgctgaatggatacttcgtgcactacttcgcacccaaggacctgcccccactgcccaagaacgtggtctttgtcctggactcttcggcttcgatggtgggcacgaagctgcgccaaaccaaagatgccttgtttacaatccttcacgatttgcggccccaggataggttcagcatcatcggtttcagtaacagaataaaagtgtggaaggatcatctaatctctgtgacccctgactccattcgtgacggtaaagtatacatacaccatatgagcccaaccggcgggactgacatcaacggcgccctgcagagggccattcggttgctgaataaatacgtcgcccatagcggaatcggcgataggtccgtttccctgattgtattcctgacagacgggaagccaacggtcggggaaacccatacgttgaaaatcctcaataacactagagaagctgcacgcggtcaagtatgtatttttaccatcgggataggaaacgatgtagactttcggttgcttgagaaacttagtctcgagaactgtggcctgaccaggagggtgcatgaggaggaagatgcaggcagtcagctgattggtttctacgatgagattagaacgcctctccttagcgacatccgaatcgactatccaccctcctcagtcgtgcaggcaaccaagaccctgttcccaaactactttaacggctctgagatcatcatcgcgggtaaactagttgatcgcaagctcgatcaccttcacgttgaggttaccgcctctaattccaaaaagtttattattctaaaaacagacgtacccgtgagacctcagaaagccggcaaggacgtcacaggatctccgaggcccgggggagatggcgagggcgacacaaatcatatcgaaaggctgtggtcttatctgacaaccaaggagttactctcttcctggctgcagagcgacgacgaacctgagaaagagcgcttgagacagcgggctcaggccctggccgtaagctatcgatttcttacaccgttcacatctatgaagcttcgtgggccagttccgaggatggacgggctcgaagaagcccatggtatgtccgcggcgatgggtcctgaacctgttgttcagtctgttcgtggtgctggtactcagcccggtccgctacttaagaaaccttaccagccaaggattaaaatcagtaagactagcgtggatggcgaccctcatttcgtggtggattttccactgtcccgacttaccgtgtgcttcaatatcgacggacagcccggggatattctgagacttgtctctgaccaccgcgatagtggcgtgacagtaaacggcgaactcatcggagctcccgctcctcccaatggacacaaaaaacagcgaacctatctcagaacaattacgatcttgataaataaacctgaaaggtcctacctagagataactccgtcaagagtcatcctcgacggtggtgaccgactcgtgctaccttgcaatcaatcagtggttgttggctcatggggtctcgaggtgtctgtgagtgctaacgcaaacgtgacagtgacaattcaggggagtatcgcatttgttatcctgattcacttgtacaaaaaaccagctccttttcagaggcaccacctgggcttctacatcgccaatagcgagggactgtcaagcaattgccacggcctcctcggccagttcctgaaccaggacgcccgtctgacagaggatccagccgggcccagtcagaacctgacacaccctttactgttacaggtcggcgagggacccgaggccgttcttaccgtgaaaggccatcaggttccagtggtctggaaacagcgcaagatctacaatggagaggagcagatcgactgctggttcgcgagaaacaatgccgcgaaactgatcgacggggaatacaaagactaccttgcattccacccttttgacaccggcatgttgggcagagggatgtcaagagagctttag

SEQ ID NO: 120816 - DNA, 1599 bp, synthetic construct
  misc_feature 1..1599: note = Description of Artificial Sequence: Synthetic coding sequence
  source 1..1599: mol_type = other DNA
atggcacctagtagcccccggcccgccctgcccgctctgctggtattgctgggggctctattcccaggaccagggaacgcccagacatccgtctctccctcaaaggtaatcctcccccggggtgggtcagtgttggtcacgtgctccacttcctgcgatcagcctaagctgctgggaatagagacccctctccccaagaaggaactgctgctgcctggcaacaataggaaagtgtatgaactgtccaacgttcaagaagatagtcagcccatgtgttacagcaattgccctgatgggcagtccaccgcaaagacattcttaaccgtttattggacccctgagcgcgtggaactagccccactgccgtcatggcagccggtgggtaagaatctgactctgcggtgccaagtggagggtggggcccctcgcgctaatcttaccgttgtgctgctgcggggggaaaaagaactgaagagagaacccgcggtgggcgaaccagctgaggtgaccactactgtgctcgttcgacgggaccaccacggtgcgaacttcagctgcagaaccgagctcgaccttagacctcaggggctggaactctttgaaaatacttcggctccttaccagctgcagacttttgtgctccctgccacccccccgcagctggtgagtcctcgagtccttgaagtggatacacaggggaccgtggtctgcagtctcgacgggctgttccccgtatcagaggcacaagtgcatctggcgcttggcgaccagaggctaaaccctaccgtcacgtacgggaacgacagcttttccgccaaagcaagtgtatctgtgacagccgaggatgagggcactcaacgcctgacctgtgctgtaatacttggaaatcagtcgcaggagacgctccagaccgtcaccatatattcttttcctgctccaaacgtaatcctgaccaagccagaggtttcagaaggcaccgaggtgaccgtgaaatgcgaagcacatcctagggcaaaagtcactctgaatggagtgcctgcccagccgttgggcccaagagcacaactcctcctgaaggccactccagaagacaacgggcgaagcttttcatgctctgcaacactagaagtggctggacagctgatccacaagaaccagacccgggaactgcgggtgttatacggcccacgactggatgagagggattgtcctggtaactggacctggcctgagaactcacagcagacaccgatgtgccaggcatggggtaacccactcccagaacttaaatgcctgaaagacggaacatttccgctgcctataggtgagagcgtgaccgtgactcgtgacctggaggggacttatctgtgcagggcgcgctccactcagggcgaggttactcggaaggtgactgtgaacgtgctctccccacgatacgagatcgtgatcatcacggtggtggccgctgccgtcatcatgggtactgctggactgagcacctatctttacaatcgacaacgaaagatcaaaaagtacagactgcagcaagcccagaaaggtactcctatgaagcctaatacacaagctaccccaccttag

SEQ ID NO: 120817 - DNA, 933 bp, synthetic construct
  misc_feature 1..933: note = Description of Artificial Sequence: Synthetic coding sequence
  source 1..933: mol_type = other DNA
atggccccgagtagccccagacccgccctgccagcactgctggtgcttctcggcgcccttttccccgtgtcggaagctcaggttcacttggctctcggcgaccagcggctaaatcccacggttacatatggcaacgactccttttctgctaaggctagcgttagtgtgaccgccgaggacgaggggacccagaggcttacatgcgctgtgattctggggaatcagtcccaggagactctccagaccgtaaccatttattctttccccgctccaaatgtaatactcacaaaacccgaggttagcgaagggaccgaggtaacagtaaagtgtgaagctcacccaagggccaaggtcacgctgaacggcgtgcccgcccagccgctgggaccacgggcccagctgcttctgaaagctacgcccgaggataacggacgctcgttttcttgtagcgctaccttggaggtggctgggcagctgattcataagaaccaaaccagagaattaagggtgctgtatggacctcgcttggacgagcgggactgtcccggaaactggacttggcccgagaacagccagcagacgcctatgtgccaggcgtggggaaatcccctcccagaactgaaatgcctgaaagatgggaccttcccactgccaattggcgagtctgtgactgttacaagggatcttgagggaacctatttatgcagagcccggtccacccagggcgaggtcacacgcaaggtgactgttaacgttctgtccccccgatatgagatcgtgatcatcacagttgtcgccgctgccgtaatcatggggactgcagggttgtccacctacctttacaaccggcaacgaaaaatcaaaaagtaccgccttcagcaggcacagaagggcactccaatgaagcctaatacacaggcgactcctccttag

SEQ ID NO: 120818 - DNA, 828 bp, synthetic construct
  misc_feature 1..828: note = Description of Artificial Sequence: Synthetic coding sequence
  source 1..828: mol_type = other DNA
atgagttcctttgggtataggaccctaacagtagccctgtttactttgatttgttgtcccggcagtgatgagaaagtctttgaggtacacgtgcgcccaaagaagctggctgtggaacccaaaggctccttagaggtgaattgcagcactacatgcaaccagcccgaggtcggtggactggaaacctccctggacaaaatcctgcttgacgaacaggctcagtggaagcattatttggttagcaacatttcccatgataccgtcctgcagtgtcatttcacatgttccgggaaacaggaatctatgaactcaaatgtgagcgtgtaccagccccctagacaggtgatcttaacattacagcctactctggtcgcagtgggtaaaagcttcactattgagtgcagagtcccgacagtcgagccactcgattctctgaccttgtttttatttagggggaacgaaacactacactacgagacctttgggaaggctgccccagccccgcaggaggccactgcaacctttaacagcacagctgatagagaagatggccacaggaatttcagctgcctcgcagtcctcgacttgatgtcccgggggggcaacatttttcacaagcacagcgcaccaaagatgctggaaatctatgaaccagttagcgactcacagatggtgatcatcgtgaccgtggtgtccgtgctgctgagcctgttcgttacatctgtacttttatgtttcattttcggacagcaccttaggcagcagcggatgggcacatacggagtgagagcagcttggcgtagacttcctcaggcctttcgtccctag

SEQ ID NO: 120819 - DNA, 828 bp, synthetic construct
  misc_feature 1..828: note = Description of Artificial Sequence: Synthetic coding sequence
  source 1..828: mol_type = other DNA
atgtcctcctttggatataggaccctgacagtcgctctgttcacactaatctgctgccctgggtccgatgagaaagtgttcgaagtccatgtccggccaaaaaagttagcagtggaaccaaaaggatccctcgaagttaattgctcaactacatgtaatcaacccgaagtcggcgggctcgagacaagtcttgataaaattcttctggacgaacaggcccagtggaagcattacttagtcagcaatatcagccacgacacagtgcttcagtgccactttacctgttcgggaaagcaggaaagcatgaattccaatgtgagcgtttaccagccgccccgtcaggttatcttaacactacaacctacattggtagctgtgggaaaaagtttcactattgagtgccgagtcccaaccgttgaaccgctcgatagcctaactctttttttattccgcgggaacgagaccctgcattacgaaacattcggtaaggcagcaccagcccctcaagaagcgaccgccacatttaacagcactgccgacagagaggacggacaccgtaacttttcttgcttggccgtgctggacctgatgtcaagagggggtaatatctttcacaagcacagcgccccaaagatgctcgagatctatgaaccggtttctgattcccagatggtgatcatcgtcacagtggtgagcgtgctgctctccttgtttgtgacatcagtcctgttatgttttatattcggacagcaccttcggcagcaaagaatgggcacctacggtgtgcgggccgcttggcgccggctgcctcaggcattcaggccctag

SEQ ID NO: 120820 - DNA, 828 bp, synthetic construct
  misc_feature 1..828: note = Description of Artificial Sequence: Synthetic coding sequence
  source 1..828: mol_type = other DNA
atgtcatcttttggttaccgcaccctgactgtcgctttgttcaccctcatctgttgcccagggagcgacgagaaggtgttcgaggtccacgtcaggccaaagaagctggctgtggagccaaagggaagcctggaggtgaactgctcaactacgtgtaatcagccagaagttggcggcctagaaactagcctggacaaaattctgcttgatgaacaggcccaatggaagcactacctagtctccaatatcagccacgacaccgtactgcagtgccactttacatgttccggaaagcaggaatcaatgaattctaacgtgtcagtgtaccagccccctaggcaggtgatcttgaccctgcaacctaccctggttgctgtcggtaagtcttttacaatcgagtgccgcgttccgaccgtggaaccactggacagcctcacactgttcctttttcggggcaacgagactctgcactacgagacgtttgggaaggcagcaccagccccccaagaagctaccgctacttttaactcaaccgccgacagggaggacgggcacaggaacttttcctgtctggcagttcttgatcttatgtctcgaggaggtaacatatttcacaagcactctgcccctaagatgttggaaatatacgaacccgtgtctgatagccaaatggtcattatcgtgaccgtggtgagtgtactgctctcattgttcgttactagtgtactgctctgctttatcttcggtcagcatctcagacaacagcggatggggacttacggggttcgtgcagcgtggaggcgactcccccaggcattccgcccttag

SEQ ID NO: 120821 - DNA, 828 bp, synthetic construct
  misc_feature 1..828: note = Description of Artificial Sequence: Synthetic coding sequence
  source 1..828: mol_type = other DNA
atgtcaagttttggataccggacactcaccgtggccctatttaccttaatctgctgcccaggtagcgacgagaaagttttcgaagtgcacgtgcgcccaaagaaactagctgtggaacccaagggcagtctggaggtcaattgttccactacatgcaatcagcccgaggtggggggactggagacatcactggacaaaattctcctggacgagcaggcacagtggaagcattatctagtgagcaatatctcccacgataccgtcctccagtgtcattttacttgttcaggcaagcaggagagtatgaacagtaacgtatcagtgtatcaacctccaaggcaagtgatattgacactgcaacccacattggtggcagtggggaagagttttaccattgaatgccgggtccccactgtcgagccactcgatagccttacactgtttctattccgtggaaatgaaactttgcactacgaaacctttggtaaggccgcgccggctcctcaggaagcaacggccacttttaactctactgctgaccgggaagatggacaccggaacttctcctgccttgccgtgttagacttgatgtcacggggaggcaatattttccataagcatagcgctccaaaaatgcttgaaatttatgagcctgtttccgacagccagatggtgatcatcgtgacagtggtcagcgtcctgttgagccttttcgtcacctcagtgttgctctgtttcattttcggccagcacctcaggcaacagagaatgggcacctacggcgttcgcgctgcttggagacgcctgcctcaggcatttcgcccctag

SEQ ID NO: 120822 - DNA, 828 bp, synthetic construct
  misc_feature 1..828: note = Description of Artificial Sequence: Synthetic coding sequence
  source 1..828: mol_type = other DNA
atgagctctttcggctaccggacgctgaccgtggccttgttcacgctgatctgttgccccgggtcagatgagaaagtgtttgaagtgcatgtgaggcctaaaaaactggccgttgaacccaaagggagcctggaagtcaactgctccaccacctgtaatcaaccagaggtggggggcctggaaacttctctggataaaattctgttagatgagcaggcccaatggaaacattacttagttagtaacatctctcacgacactgtgctgcagtgtcacttcacctgctctggtaaacaggagagcatgaatagtaatgtgtccgtctaccaacctccccggcaagtaatcctcaccctacagccgaccttggttgctgtcgggaagtcatttactatcgaatgcagggtccccaccgtggagccactggatagtctgactctttttctattccggggaaacgaaacactgcactatgaaacctttggcaaagcggctcccgcccctcaggaggcaacagcaacctttaacagcactgctgatagggaagacggccatcgtaacttttcatgtcttgcggttctcgatctgatgtctcggggaggaaacatctttcacaaacactctgcacccaaaatgctcgagatttacgaaccggtctccgatagtcagatggtcattatcgtgactgtggtgagcgtgcttctctctctgtttgtgacctccgtcctgttgtgtttcattttcggacaacatcttaggcagcaaaggatgggaacatacggtgtaagggcggcttggcgcagactcccccaggcctttcgcccttag

SEQ ID NO: 120823 - DNA, 1644 bp, synthetic construct
  misc_feature 1..1644: note = Description of Artificial Sequence: Synthetic coding sequence
  source 1..1644: mol_type = other DNA
atggccacaatggtcccctcagtgctatggcctagagcctgttggactcttcttgtctgttgcctattgactcccggagttcagggtcaagaatttttgctgcgggtcgagccgcagaatcccgtgttatccgccggcggttcactctttgtgaactgctcaacagactgtcccagtagtgagaaaatcgccctcgagacgtccctttcgaaagaactcgtggctagcgggatggggtgggctgcatttaacctgagtaacgtgaccgggaactcaagaattttgtgcagcgtgtattgtaatggttcacagattactggctcctctaacattacagtctataggctgccggagcgggtcgaacttgctccgctgcccccctggcagcctgtgggccaaaactttactctcaggtgtcaggtggaggacggctctccgcgaacctcgctgactgtcgtgctgctaaggtgggaggaagaactgtcccggcagccagcggtggaagaaccagcggaggttactgccacagtattggccagcagggatgaccatggcgctcccttctcctgtagaactgagctcgacatgcaacctcagggattaggactgttcgtgaatacgagcgctccccgccagctgcgaacattcgtgctcccggtgactcctcctcgactggtggcgccgcgcttcctcgaggtggaaacatcctggccagttgactgcacacttgatggcctctttcccgcctcagaagcgcaagtgtatctagccctgggagatcaaatgcttaacgcgaccgtgatgaaccatggagatacgcttactgctaccgcgaccgctacggcacgtgctgaccaggagggggctcgggagattgtgtgcaacgtcaccctggggggggagcgaagagaggcccgtgaaaacctgaccgtgttttccttccttggacctattgtaaatcttagcgaaccaaccgcacacgaggggtccaccgtgaccgtgtcatgcatggctggcgccagggtgcaggttacgctggatggcgtgcccgctgccgcccccggtcagcccgcccaactgcagcttaatgctacagaaagcgatgatggaagatccttcttttgctccgccactctcgaggttgacggcgaattcctccacagaaactcctccgtccaattaagggtgttgtatggcccaaaaatcgatagggccacatgtccccagcatttaaaatggaaggataaaacgcgccatgttctgcagtgccaggccagaggcaacccatatccggaacttcgctgcctgaaggagggctccagtcgtgaggtccctgtaggcattccattttttgtgaatgtcacgcacaacggaacctatcagtgccaagcttcttcttcaagaggcaagtataccctcgtagttgtcatggatatcgaggctgggtctagccacttcgtccctgtgttcgtggctgttctgctgacccttggagttgtgacaattgtcttggctttgatgtacgtgtttcgcgagcaccaacgctccggatcgtaccacgtcagagaagaatcaacatacttgcctctgacgagcatgcagcccacagaagctatgggggaggagcccagtcgagctgagtag

SEQ ID NO: 120824 - DNA, 819 bp, synthetic construct
  misc_feature 1..819: note = Description of Artificial Sequence: Synthetic coding sequence
  source 1..819: mol_type = other DNA
atggggtctctgtttcctctttccttgctcttcttccttgccgcggcctatccgggcgtgggatcagccctgggcagacggacgaaaagggcgcaatcccctaaagggtctccactggccccatccggcacttcagtgcccttttgggtgcgcatgtcacccgagttcgtcgccgtccagcctgggaagagcgtgcaactcaactgtagtaactcatgcccacaaccgcagaattcttcgctgaggaccccattacgacaaggtaagactctacgggggcccgggtgggtcagctaccagctgttggatgtgagagcttggtcctctctcgcccactgcctggtgacctgtgccgggaagactaggtgggccacttcaaggataacagcctattcggtgcccggtggtctacttgggggagaccctgaagcctggaaacctggacacctgttccgaaaacccggggcactgcatagaccaggcagtggccaaagagaccttgacttaagggtctgctgctggactccgcggctgctggctgctcgtgacttacctcgagccccccaatccaggagacccgggggtccccagcaacttggcacccattatactgacgcaagattggaaccaagggcacattccttcggcttgaggttccaccgctgcccctgcagagatcccccacactgcggaagatgtgtacctatgcaggtgccctcatacgaagtaccaggggtaaagggggatgtgctttgcagattatcagagaagaagcggaacatgaagcaatccggagagatggccattcatggtggatag

SEQ ID NO: 120825 - DNA, 816 bp, synthetic construct
  misc_feature 1..816: note = Description of Artificial Sequence: Synthetic coding sequence
  source 1..816: mol_type = other DNA
atggggtccctgtttcctctgtcattactgttttttcttgcagccgcttaccctggcgtgggatcagccctcggaaggcgaactaagcgggcgcaaagtcccaagggctcccctctcgctccatctggcacatctgtgcccttttgggtgcgcatgagcccggagttcgtggccgtacaacccggaaagtccgtacaactgaactgttctaacagttgcccacagccgcagaactccagcctgcgcactcccctccggcagggcaagaccttgcgagggcccggttgggtgtcttatcagctgctggatgttcgcgcctggtctagcttggctcactgcctggtgacctgcgcaggcaagacccggtgggcaaccagtcgcatcaccgcctacaaaccccctcattccgtgatcctcgagcctcctgtgttgaaggggcgaaaatacacactcaggtgccacgtcactcaagtgttccctgttgggtacctggttgtaaccctgcgacacgggtctcgggttatctattccgaaagcctggagagatttacagggctggatcttgctaacgtcaccctgacatacgagttcgcagcaggccctcgcgacttctggcagccagtgatttgccacgccaggctaaacctggatgggctcgtggtccgtaattcctccgcgcccattacactgatgctcgcatggagccctgcgcccacagctttagccagcggttctattgccgcactcgttggcatactgctgactgttggcgccgcctacctatgcaaatgcctcgcaatgaagagccaggcctag

SEQ ID NO: 120826 - DNA, 714 bp, synthetic construct
  misc_feature 1..714: note = Description of Artificial Sequence: Synthetic coding sequence
  source 1..714: mol_type = other DNA
atgggatcactttttccgctgagtctgctctttttcctggcagctgcgtacccaggtgtgggctccgcgttggggagacgaacaaagcgggcccaaagtccaaagggctcccccctggccccttcagggacatccgttccattttgggtgcggatgagcccagaattcgttgccgtccagccaggtaagagcgtacagttaaactgcagcaattcttgtccacaaccacagaatagctcactgagaaccccgctgcgtcaggggaagaccctccgaggccctggatgggtgagttaccagttactagacgttagagcctggtcaagcttggcccactgcctggtgacctgcgctgggaagactagatgggctacctctcgaatcacagcttacaaaccaccgcattctgtgattctcgaacctccagtacttaaagggagaaaatacacactcaggtgccatgttacacaggtgttcccagtgggttacctcgtggtaacccttcgtcacgggtctcgcgtgatttacagcgaaagtttggaacggttcactggcctcgacttagcaaatgtaacgctgacctacgaatttgccgctggaccgagggatttctggcagcctgtcatatgccatgcaagactgaacctggacgggctagtcgtgaggaattcatccgctcctatcacactcatgcttggcgaagcccctctgtag

SEQ ID NO: 120827 - DNA, 498 bp, synthetic construct
  misc_feature 1..498: note = Description of Artificial Sequence: Synthetic coding sequence
  source 1..498: mol_type = other DNA
atggagctctgcaggagcctggctttgttaggcgggtcactcgggctcatgttctgcctgatcgctctttccaccgacttttggtttgaggccgttggccccacccacagcgcccactccggactgtggccgaccggtcacggagatatcatcagtggctacatccatgtgacacagaccttcagcatcatggcagtgctgtgggcgcttgtatccgtctccttcctggtgttaagttgttttcccagcctgtttccaccaggccatgggcccctagtgtccactacggccgcttttgcagctgccatctcaatggtcgtcgctatggcagtctatacctccgaacggtgggaccagcctccccacccccagatccagaccttcttctcttggtcattttatcttggctgggtcagcgccatactgttgctttgcactggagctctgtcccttggagctcattgcgggggtccacggccgggatacgagacactttag

SEQ ID NO: 120828 - DNA, 1674 bp, synthetic construct
  misc_feature 1..1674: note = Description of Artificial Sequence: Synthetic coding sequence
  source 1..1674: mol_type = other DNA
atgatggtggtgctgctaggggcaacaacattggttctggttgcagtggccccttgggtactgtccgcggctgccggaggcaaaaatttgaagagtccccagaaggtagaggttgacataatagatgataatttcattcttagatggaacagaagtgacgagtcagttgggaatgtgaccttcagcttcgattatcagaaaactgggatggacaattggattaagctgtcaggttgccagaacattacgtcaactaaatgtaacttctcgtcactaaaactgaatgtgtatgaggagattaagctgcgcatccgcgctgagaaggaaaatacatcttcttggtacgaggtggattccttcaccccatttagaaaagcccagatcggccctcctgaagtgcacttggaagcagaggacaaagctatcgtgatccacattagccccggtacaaaagattccgtgatgtgggccctggatggccttagctttacttattctctcgtgatttggaagaacagtagcggcgtggaggaaagaatcgagaatatttatagccgtcataagatttataagctctcgccagagacaacctactgcctcaaagttaaggcagccctgcttaccagctggaagattggggtgtactcccccgtgcattgtataaagactaccgttgaaaatgaactcccccctcccgaaaacatcgaagtctcggttcagaaccaaaattatgttctaaaatgggattacacctacgccaacatgaccttccaggtgcagtggctgcacgcctttcttaaacggaacccgggcaaccatctatataaatggaagcagattccagactgcgagaacgtgaaaaccacacaatgtgtcttcccccagaacgtcttccagaaaggcatttatcttcttcgggtgcaggccagtgatggaaacaatacgtcattttggtccgaagaaattaaattcgacaccgaaattcaggcattcctactcccccctgtgttcaatatccgctccctctcagactcattccacatatacatcggcgcccctaagcagtctggaaatacccccgtcatccaagactacccactgatttatgagattatcttctgggagaacacttcgaatgccgaaaggaagattatcgaaaagaaaaccgatgtgactgttcctaatctgaaaccactgacggtttactgcgttaaggcacgcgcccacaccatggacgaaaaactcaacaaatcatccgtgttctccgatgccgtctgcgaaaaaaccaaacccgggaacacctcgaagatttggctcattgtgggtatatgcatcgcactgttcgccctcccttttgtgatctacgcggccaaggtgtttctgcggtgtatcaattacgtctttttcccctctcttaagcccagctccagcatagacgaatacttcagtgagcagccgctgaagaatctgttactgagcactagcgaggagcagatcgagaaatgctttattatcgagaatatctctacaatagccactgttgaggagactaatcagacggacgaggaccacaaaaaatacagcagccagactagtcaggattccggaaattactctaacgaggacgaatctgagagtaaaactagcgaggagctgcagcaggacttcgtttag

SEQ ID NO: 120829 - DNA, 1467 bp, synthetic construct
  misc_feature 1..1467: note = Description of Artificial Sequence: Synthetic coding sequence
  source 1..1467: mol_type = other DNA
atggataactggatcaaactaagtggctgtcaaaacatcacgtcaaccaagtgtaattttagttcgcttaaactgaacgtgtacgaggaaatcaagctgcgcattcgcgcggaaaaggaaaacaccagttcttggtatgaagttgatagcttcacacctttccgcaaggcacagatcggacccccagaggttcatcttgaggccgaagataaagctatagtcatacacatctccccaggaaccaaagacagcgtgatgtgggccctggacggtctgagcttcacctacagcctcgtcatttggaagaactcaagtggagttgaggaacgcattgagaacatctacagcagacacaagatttataaactctccccagagaccacttattgtctgaaagtgaaggccgcattgctgacctcttggaagataggagtttatagtccagtgcactgtattaagacaaccgtggagaacgagctgcctcctccagagaatatcgaagtgagtgtgcagaaccagaattacgttctgaagtgggattacacctacgcaaacatgacctttcaggtgcagtggctgcacgcatttcttaagcggaacccggggaatcacctgtacaagtggaagcagattcctgattgcgaaaatgttaaaaccacccagtgcgtgttcccccaaaatgtctttcaaaaaggtatctacctgcttcgggtccaagcatctgatggcaataacactagcttctggtctgaagaaatcaagtttgacaccgaaatccaagcgttcctgttgccccctgtcttcaacatacgctctctcagcgattcattccatatttatatcggggcccccaagcagagcggcaacacaccagtcatccaggactaccccctgatctatgagatcattttttgggaaaatacctccaatgctgagcggaaaattatagaaaagaaaacagatgtaactgtccctaacttgaaacctctgacagtttattgcgtgaaagcccgagcccacaccatggacgaaaagcttaataagtcctctgtctttagcgatgcggtgtgtgagaagaccaaacctggaaatacaagtaagatctggttaattgtggggatctgtattgccctatttgcgctgccatttgtgatctatgccgccaaggtgttcctgaggtgcataaattatgtattttttcctagtttaaaaccgtcatcttctatcgatgaatatttctccgagcaacctttaaaaaacctcctgttgagcacgtcagaggagcaaattgagaagtgctttataattgaaaacatttctaccattgccactgtggaagagaccaaccagactgacgaggatcataagaagtattcgtctcaaacatcacaggactctggaaactactccaacgaagacgaaagtgaatctaaaacaagtgaggaactgcaacaagattttgtgtag

SEQ ID NO: 120830 - DNA, 1491 bp, synthetic construct
  misc_feature 1..1491: note = Description of Artificial Sequence: Synthetic coding sequence
  source 1..1491: mol_type = other DNA
atgatggtcgtactgctgggcgccaccacacttgtgcttgtggctgtcgccccatgggttctgagtgctgcggctggtggaaagaatctaaaaagcccacaaaaggtggaggtggacattattgatgataacttcatcttaaggtggaaccgctccgatgaatctgtcgggaatgtcacattcagctttgattaccaaaagaccgggatggacaattggatcaagctcagcggctgtcagaacatcaccagtactaaatgtaacttcagttccctgaagctgaacgtctacgaagaaatcaagctgcgtattagagctgagaaagaaaacacatcctcctggtatgaggttgatagctttacacccttccgcaaggcccagataggccctccagaggtgcacttagaggccgaagataaggcgatcgtgattcacatctcgccaggcaccaaagattccgtgatgtgggccttagacggactctccttcacctactccctggttatatggaagaatagctccggcgtggaggaaaggatagaaaacatctatagtagacacaagatctacaaactttccccagagaccacgtactgtcttaaagtgaaggcagctctcctcaccagttggaagatcggtgtgtactcccccgtgcattgcataaagacaaccgtggaaaacgagttgcctccacctgagaatatcgaagtttccgtacagaaccaaaattacgtgttgaagtgggactatacttacgctaacatgacatttcaggtgcagtggttgcacgcctttctgaagcggaatcctggcaatcacctttacaagtggaagcagatcccagactgcgagaatgtaaagactacccagtgcgtttttccacagaacgtgttccaaaaagggatttacctccttagggtgcaagcctccgatgggaacaacactagtttctggagtgaggagatcaaatttgacacagagatccaggcctttctcctgcctcctgtgttcaacataagatctctgagcgactcgttccacatctatattggcgcccctaaacaatcaggaaacacgcctgtcattcaggattacccccttatctacgagatcatattttgggagaacacctccaacgccgaaagaaaaattattgaaaagaagacagatgttactgttccaaacctgaagcccctcacagtctactgtgtgaaggcacgtgcccacaccatggacgagaatgatgctgtctgtgaatacttttcagaacaaccgctgaagaatctcctactgagcacaagtgaggagcagattgagaaatgtttcatcattgagaacatatctacgatcgccacagtagaggaaactaaccagactgacgaggatcacaaaaagtattcctcccagacaagtcaggactcagggaactattccaacgaggacgagagtgaatccaagacttccgaagaactgcagcaggattttgtgtag

SEQ ID NO: 120831 - DNA, 1548 bp, synthetic construct
  misc_feature 1..1548: note = Description of Artificial Sequence: Synthetic coding sequence
  source 1..1548: mol_type = other DNA
atgttactcagtcagaacgccttcatcttccggagcctaaatctggtgttgatggtctatatctcattggtattcggcatctcttacgacagccccgattacacagacgagtcttgcacgttcaagataagtttgcgaaatttccgcagtatactctcgtgggagctgaaaaaccactctatcgtgcccacacactataccctgctgtacacaataatgtctaagcctgaggacttaaaggtagttaagaattgtgccaataccacccgcagtttctgtgacctgacagatgagtggcgaagcacgcacgaagcatacgtgacagtgttggaaggattttccggcaacaccacacttttctcttgcagccacaacttctggttggcgatcgatatgtcatttgagccaccagaatttgaaatcgttggctttacaaatcacatcaacgtcatggtgaagtttccctctatagtggaggaagagcttcagtttgatctatctctagttatcgaagaacagtcagaaggtatagtgaagaaacacaaaccagagataaaaggaaatatgtcaggaaatttcacttatatcattgacaagctgatacccaatacgaactattgcgtttctgtgtacttagaacactcagacgagcaggcagtgatcaagtcccctcttaagtgcaccctgttgccacccgggcaagaatcggaatctgcagagtccgcaaagatcggtgggatcattaccgtgttcttaattgccctggtcctgacttcgactatcgtgacgcttaagtggattgggtatatctgcttacggaatagtctgcccaaagttctgaatttccataacttccttgcatggccctttcccaatcttcccccactcgaggccatggatatggttgaagttatttacattaacagaaagaagaaggtgtgggactataactatgacgacgaaagtgattccgataccgaggccgcccctagaactagtggcggcggatacacaatgcatggcttaacagtgcggcccctggggcaggcatctgccacttccactgagagtcagttgatagaccctgaatctgaggaggagcccgacctcccagaggttgacgttgagctaccgaccatgcccaaagacagccctcagcagctagaactactgtcaggaccctgtgaaagaagaaagtcccctttgcaagacccattccccgaagaagattacagttccaccgaggggtccggcgggcgcatcactttcaacgtggatctgaatagcgtgttcctcagagtcctagatgatgaagatagtgacgatctagaggccccacttatgctgtcaagccatctcgaggagatggttgatcccgaagacccagacaatgtgcagagtaatcatcttcttgcctccggggagggaacgcaacctacatttccatcaccttccagcgagggcttatggagcgaggatgcaccttctgaccagtcagacacatcagaatctgatgtggatttgggtgacggctacattatgcgctag

SEQ ID NO: 120832 - DNA, 1548 bp, synthetic construct
  misc_feature 1..1548: note = Description of Artificial Sequence: Synthetic coding sequence
  source 1..1548: mol_type = other DNA
atgctccttagtcaaaatgcttttattttcaggtcactcaacctggtgttgatggtctatatttccctggtgtttggtatcagctacgactcaccagactacactgacgagagctgcacttttaagatctccttgcggaattttcggtctattcttagttgggagctgaaaaatcatagcattgtgcccacacactacacactgttgtacactattatgtctaagcctgaagatcttaaggtcgttaagaattgtgccaacactactaggagcttttgtgatctgacagatgaatggcgatccacccacgaagcctacgtgaccgtgttggaaggttttagcggaaacacgactctcttttcatgttcccacaatttttggctggcaatcgatatgtccttcgagcctccagagttcgagattgtggggttcacgaaccacatcaacgttatggtgaaattcccatcaattgtcgaagaagagctccagtttgacctgagtttggtaatagaggaacagtcagagggtattgtgaagaagcacaagccagagattaagggaaatatgtccggcaatttcacctacattatagacaagctgatccctaatactaactactgcgtgtctgtttacttggaacactcagacgaacaggcggttatcaagtcccccctgaagtgtacactgctcccaccagggcaggaatcggagagcgccgaatcagcgaaaattgggggcataattacggtgttcttgatcgccttggtcctcacctctacgatcgtcaccctgaagtggattggatacatctgcctgcgcaacagcctgccgaaggtgctgaatttccataattttctcgcttggcctttcccaaatctgcctcccctcgaggccatggacatggtcgaggtgatttatatcaatagaaagaagaaggtgtgggactacaattacgatgatgagtctgattccgataccgaggcagccccaagaacatctggcggtggctacactatgcacggactcaccgtacgccctcttgggcaggccagcgctacatctaccgaaagtcagctgatcgatcccgagagcgaggaggagcccgatctgccagaggtggacgtggagctgcccacaatgcccaaggatagtccacagcagctcgaactgctctccggtccttgtgaacgacgaaagagtccactccaggatcctttcccggaggaggattattccagcacagaaggatccgggggcagaatcactttcaatgtcgatctgaattcagtgttcctgagagtccttgacgacgaggattctgatgatctggaggcaccactgatgctgagctcacatctggaagaaatggtggatccagaagatcctgacaacgtccagagcaatcatcttctggcatctggtgagggtacccagccgactttcccttcaccttcctcggaaggcttgtggtctgaggatgccccgtccgatcagtcagacacatccgaatcagacgtggatctcggggacggatacataatgagatag

SEQ ID NO: 120833 - DNA, 996 bp, synthetic construct
  misc_feature 1..996: note = Description of Artificial Sequence: Synthetic coding sequence
  source 1..996: mol_type = other DNA
atgctgctgtcacagaacgcctttatcttccggtcgctcaacctcgtgctgatggtctacattagtttggtgttcggcatctcctacgatagccctgactacacagatgaatcttgtacattcaaaatttctcttcggaacttccggagtattctttcatgggagctcaaaaaccatagcatcgtgcccacacactacacactgctgtatactatcatgtccaaaccagaggatctgaaagtggtgaagaattgtgctaatacaactagatcattttgcgatcttacagacgagtggagaagcacccatgaggcatatgtgacggttctcgaaggattctccggcaatactaccctcttttcatgctcccacaatttctggctggcaatagatatgtccttcgagccacccgagtttgagatcgtaggctttacgaatcatattaacgtgatggtgaaatttccttcaattgttgaagaggaactgcaattcgatctgagcctagtgattgaggagcagtctgagggcatagtaaagaaacacaagccagagataaagggcaacatgtctgggaattttacttatataattgacaagctaatccccaacactaattactgcgtctccgtatatctggagcattccgacgaacaggctgtgatcaagagccccctgaagtgtacacttctgccccccggccaggaatctgagtcggcagaatccgccaagattggcggcattatcacggtatttctcattgcactggtccttactagcacaatcgttacgttaaagtggattggatatatttgtcttcgaaactccttgcccaaagtcctcagacagggcctcgcaaaagggtggaatgccgtcgctatccacaggtgctctcacaacgctctccagagcgagacccccgagctgaaacaatcttcatgtttatcattcccatcatcctgggactacaagcgagcctcgctctgcccaagcgactag

SEQ ID NO: 120834 - DNA, 996 bp, synthetic construct
  misc_feature 1..996: note = Description of Artificial Sequence: Synthetic coding sequence
  source 1..996: mol_type = other DNA
atgttgctgagccaaaacgctttcatcttcagaagcctgaacctcgtgctgatggtttatatttctcttgtctttggcatctcttacgattcccccgattacacagatgagtcttgtacatttaaaatatccttaagaaacttccggtctatccttagctgggaactcaagaatcactcaatcgttccaacccactataccctactgtacactattatgagtaagccagaggatctgaaagttgtgaagaactgcgctaacaccacccggtccttctgcgacctgaccgacgagtggcgctctacccacgaagcttatgtcaccgtgttagaaggattctcaggcaacacaaccttgttctcttgttcacataacttctggcttgcgattgacatgagctttgagcctccagagtttgaaattgtaggctttacaaaccatatcaatgtgatggtgaaattcccttcaatcgttgaagaagagctgcagttcgacttaagcctcgtgatcgaggagcagagtgagggcatagttaaaaagcacaagcctgaaatcaaaggcaatatgtccggtaatttcacatacatcatagataagctgattccgaacaccaactattgcgtgagtgtttacctggagcatagtgatgaacaagccgtgatcaagtcacccctgaagtgtaccctgctgccaccaggccaggaatctgagagcgccgaaagcgctaagatcggaggcatcatcaccgttttccttattgcccttgtgctgacctccacgatcgtaaccctaaaatggatcggatatatttgcctgcgtaattcattaccaaaagtcttaaggcagggacttgcgaagggctggaatgcggttgccatacacaggtgcagccacaacgccttgcagtccgaaacccccgagctgaaacagagctcgtgtctttcttttcccagctcttgggattacaaaagggcctctctgtgcccaagcgattag

SEQ ID NO: 120835 - DNA, 561 bp, synthetic construct
  misc_feature 1..561: note = Description of Artificial Sequence: Synthetic coding sequence
  source 1..561: mol_type = other DNA
atgctcctgaagtcacccgaaaacagtcttctgcagtttcagttcaaatatggcgtcccaactcctactaacgtgacaattgaatcctataatatgaatcctatcgtgtattgggagtaccagatcatgccacaggtccccgtatttacggtcgaagtcaagaattatggtgtgaagaactcagaatggatcgacgcgtgcataaacattagccatcactattgtaatattagtgaccacgtgggagatccttcaaacagcttgtgggtgagggtgaaggctagggtcgggcagaaagaatcagcatatgccaaatcggaggaattcgccgtgtgtagggatggcaagataggcccccccaaactggatatccgcaaagaagaaaagcagatcatgatcgacatcttccatccctctgtgttcgtgaacggtgacgagcaggaagttgattacgatccagaaacaacatgctacataagagtgtacaacgtgtatgtgcggatgaatggatcggagatcaagagatcttgcgcgttcagcctgtttagctttttcatctag

SEQ ID NO: 120836 - DNA, 1470 bp, synthetic construct
  misc_feature 1..1470: note = Description of Artificial Sequence: Synthetic coding sequence
  source 1..1470: mol_type = other DNA
atggccctgttattcctacttccccttgtcatgcagggcgtctcccgagccgaaatgggcactgcagatctcgggccttctagtgtgcccacgcctactaacgtgaccatcgagtcctacaatatgaaccccatcgtgtattgggagtaccaaatcatgccccaggtcccggtctttaccgtcgaggtcaagaactatggcgtcaaaaattcagaatggatcgacgcatgtatcaacatttcccaccactactgcaacataagtgaccatgtcggcgacccgtcaaatagtctgtgggttagagtcaaagcccgcgttggacaaaaagaatctgcatatgcgaagtcggaagagttcgccgtgtgtagagacgggaaaatagggccccccaaactggacatacgtaaggaggaaaagcagatcatgatcgatatatttcatcccagcgtttttgtcaacggcgacgaacaggaggtagattacgaccccgagaccacctgttatattcgcgtgtataacgtgtatgtgaggatgaatggctctgagatacagtataaaatcttaactcagaaggaggatgattgtgacgagattcagtgtcaattagctattcccgtcagttctctcaacagtcagtactgcgtgtcagccgaaggcgtgctgcatgtttggggtgtcactactgagaagtcgaaagaggtatgcatcacgatcttcaactcatctatcaagggaagtttatggatccctgtcgtggccgccctcttactgtttttggtgctgtcactcgtgtttatctgcttctacatcaagaagatcaatccgttaaaggaaaaatcaattatactgcctaaatccttgatctctgtggtgcgctctgctaccctggaaacaaagcccgagagtaaatacgtgtcgttgattacctcttaccagcccttttccctggagaaagaggtggtctgcgaagaacctttgtcacccgctaccgttcccgggatgcacactgaggataacccaggtaaggtggaacacacggaagagctctcctcgattacagaagtcgtcacgaccgaagaaaatatcccagatgtggttcccggatcccaccttactccgatcgaaagggagagcagtagtccactgtcgtctaaccagagcgagcccgggagtatcgcgcttaattcctatcatagtagaaactgctccgaaagtgatcattcacgtaacggctttgacactgactcctcttgtcttgaaagtcacagtagcctgtccgacagcgaattcccaccaaacaacaaaggcgaaataaagacagagggtcaggagctgatcaccgtgataaaggctccaacttcttttggatatgataagccacacgtactggtggatctacttgtggatgattctggtaaagaatcgctcatcggctaccgccccacagaagactcaaaggagttttcgtag

SEQ ID NO: 120837 - DNA, 486 bp, synthetic construct
  misc_feature 1..486: note = Description of Artificial Sequence: Synthetic coding sequence
  source 1..486: mol_type = other DNA
atgctgctcaagtcccctgagaattctctccttcagttccagttcaagtacggtgtgccaactcccacaaacgtgaccatcgagtcctataatatgaatcctattgtgtactgggagtaccagataatgccccaggttccggtgtttacagtggaagtgaagaactatggggtgaagaatagtgaatggattgatgcttgcataaacatctcacaccactattgtaatatcagtgaccacgtgggagatccctctaactctttgtgggtgagagtgaaggcacgggtaggtcaaaaagagagcgcttatgccaagtcagaagaattcgcagtttgccgggatgggaaaatcggtccccctaagttagatatccgcaaggaagagaagcagatcatgatcgatattttccacccaagtgtgttcgtgaacggggacgagcaagaagtggattatgaccccgaaacgacatgctatatacgggtctag

SEQ ID NO: 120838 - DNA, 825 bp, synthetic construct
  misc_feature 1..825: note = Description of Artificial Sequence: Synthetic coding sequence
  source 1..825: mol_type = other DNA
atggcccttctttttctccttcccctcgtgatgcaaggagtgtcccgggcagaaatgggtaccgccgatctaggaccctccagcgtgccaactcctacaaacgtgactattgagtcatataacatgaatccaattgtgtattgggaataccagattatgccacaggtgccggtgtttaccgtggaggtaaaaaattacggcgtgaagaactctgagtggatcgacgcatgtatcaatatcagtcaccattactgcaacatcagcgatcacgtgggggatcctagtaactcactttgggtgagggtaaaagcccgagtgggacagaaggagtctgcatacgcgaaaagcgaggaattcgccgtgtgcagagatggaaaaataggtccaccgaaactcgacattcggaaagaagaaaagcagatcatgattgatattttccacccatccgtctttgtaaacggagatgagcaggaggtagactatgacccagaaactacctgctacatacgtgtgtacaatgtgtatgtgcgaatgaatggcagcgagatccaatacaaaattctgactcagaaagaggacgactgcgacgaaatacagtgccagttggctattcccgtgtcgtcattgaattctcagtactgtgtgagcgccgaaggcgtgcttcacgtgtggggggttactactgagaagtccaaagaagtctgcatcactatctttaattccagcataaaaggctccctgtggataccagtggtggctgccctcctgctcttctgcttggcctggtactccagtgtttttattctgcggaaactgatccattag

SEQ ID NO: 120839 - DNA, 633 bp, synthetic construct
  misc_feature 1..633: note = Description of Artificial Sequence: Synthetic coding sequence
  source 1..633: mol_type = other DNA
atggctcttctttttctgctccctctggtgatgcagggggtgtcgcgcgccgaaatggggaccgctgatcttggaccatcttctgtccctacgccgacaaacgttaccatagaaagttacaacatgaaccctatcgtttactgggagtaccagattatgcctcaggttcctgtgttcaccgtggaggtcaagaactatggcgttaaggcccgcgttggccagaaggaaagcgcgtacgccaagagcgaagagttcgcggtgtgcagagatgggaagattggaccccccaagctggatattaggaaggaagagaagcaaatcatgattgacatcttccatccatcagttttcgtgaacggtgacgaacaagaagtggattacgaccccgaaacaacatgttatatccgggtatacaatgtgtacgtgaggatgaatggcagtgaaatccaatacaagattctgacgcaaaaagaggatgactgtgacgagattcagtgccaattagcaatcccggtctctagcttgaattcgcagtattgtgtttccgcggagggagtgcttcacgtgtggggggtgactacagaaaaaagtaaagaggtgtgcattacaatattcaactcaagcatcaaatag

SEQ ID NO: 120840 - DNA, 1386 bp, synthetic construct
  misc_feature 1..1386: note = Description of Artificial Sequence: Synthetic coding sequence
  source 1..1386: mol_type = other DNA
atgcctacacctaccaatgtgactatcgaatcctataatatgaacccgatagtgtattgggaataccagattatgcctcaggtgcccgtttttacagttgaggtgaagaattacggcgtgaaaaactccgaatggattgacgcttgtataaacatttcccaccactactgcaatatcagcgatcatgtgggagacccgtcgaactccctttgggttcgagtgaaagcccgtgtcggccagaaggaatcagcatacgcaaagtccgaggagtttgcagtgtgccgcgacggcaagattggtccacctaaacttgacataagaaaggaggagaaacagattatgatcgacatttttcaccctagcgtgttcgtcaacggagacgagcaggaggtcgactacgaccctgagaccacgtgttacatccgcgtttacaatgtctacgtaaggatgaatggatccgaaatacagtataagatcctgacccagaaggaagatgattgtgatgagattcaatgccagctcgccattcctgtgtcctcgctgaattcacaatattgtgtctctgctgagggtgttctccatgtttggggagttaccactgaaaaatctaaagaagtttgtataaccatctttaatagctccattaaggggtccctgtggatacccgtggtggccgccctgctacttttcttggtgctgagtcttgtctttatttgcttttacatcaaaaaaattaatcccttgaaggagaagagtataattctacctaaatccctgatcagcgtggtgcgctccgccactctggaaacaaagcccgaatctaagtatgtttccctgattacatcctatcagcctttctctttagaaaaggaagtcgtctgtgaagaacctttatcccccgctacagtgccaggcatgcatacagaagataatccagggaaagtcgagcatactgaggagctttcctctatcacggaagtcgtcacgaccgaagagaatatccctgatgtagtgccgggttcccacctaacccccattgagcgcgagagctccagcccactcagcagcaaccaatcggaacctgggagcatagcccttaattcttaccatagccgcaattgttccgaatccgatcactctcgtaatgggttcgataccgactcttcgtgcctggaaagtcacagtagcttgtccgactctgagttcccacctaacaataagggagagatcaagactgagggtcaggaactaatcacggtgatcaaagcacccacaagctttggttatgataaaccacatgtactggtagatctccttgtggatgactcaggcaaagagagccttattggctaccgacccacggaagatagtaaggagttcagctag

SEQ ID NO: 120841 - DNA, 1014 bp, synthetic construct
  misc_feature 1..1014: note = Description of Artificial Sequence: Synthetic coding sequence
  source 1..1014: mol_type = other DNA
atgcgccccactctgttgtggtctttattgctgctgctcggtgtttttgcagccgcggccgcggccccgccggaccctctgtcacagcttccagccccccaacacccgaagatccgtctttacaatgccgagcaagttttgagttgggagccggttgccttgtccaatagcacccggcccgtggtgtatcaagtgcaatttaagtatactgattctaaatggtttacagcggacattatgtcaattggcgttaactgtacgcagattaccgctactgaatgcgattttacagctgcctcgcctagcgcaggtttcccgatggacttcaacgtgacacttcgcctgagagctgaactgggcgcactgcacagcgcttgggttacaatgccgtggtttcagcattaccgcaacgtcaccgtaggacctccagaaaacattgaggtaacgccaggggaaggaagcttaattatcaggttctcatcacccttcgatattgcagacaccagtacggcttttttttgttactacgtccactactgggagaagggcggtatccagcaggtgaagggcccattccggtccaattctatctcgctggataatctgaagccctctagggtttattgtcttcaagtgcaggcacagctcctatggaacaaatccaacatatttcgtgtgggacatctttctaatatttcatgttacgaaacaatggccgatgctagtactgaattgcagcaggttatcttgatctccgtcggaacattcagcctgttgtccgtcctggccggcgcctgcttctttctcgtacttaagtatcgaggacttattaagtattggtttcatactcctccttccatccctctgcagattgaggagtatctgaaagaccccacacagcccatcctggaggctcttgataaggattccagcccaaaggatgacgtatgggactctgtgtcaattatatcatttcccgaaaaggaacaggaggatgtgttacagactctgtag

SEQ ID NO: 120842 - DNA, 378 bp, synthetic construct
  misc_feature 1..378: note = Description of Artificial Sequence: Synthetic coding sequence
  source 1..378: mol_type = other DNA
atgcacaaagaagaacacgaggtagcagtcttaggccccccccccagtaccatcctgccccgaagcactgtgatcaacatacactccgagactagcgtgcctgaccacgtcgtttggtcactttttaacactctatttctgaactggtgttgcctggggttcattgcatttgcttacagcgtgaagtcgcgcgaccggaaaatggtcggagacgttacgggagcccaggcctacgcttccaccgcaaagtgtctcaacatatgggctctcattctgggtatcttaatgacaatcggattcattttgctgctggtcttcggttctgtgacagtgtatcacattatgctgcaaatcatccaagagaaacgcggttactag

SEQ ID NO: 120843 - DNA, 378 bp, synthetic construct
  misc_feature 1..378: note = Description of Artificial Sequence: Synthetic coding sequence
  source 1..378: mol_type = other DNA
atgcataaggaagagcatgaagtcgcagtgcttggacctccaccttcgactattctcccccgctcaaccgtgatcaacattcactctgaaactagcgtcccagatcacgtggtgtggagtctgtttaatactctttttctgaattggtgctgcctaggttttatcgccttcgcatactccgtgaaaagcagagaccgcaagatggtaggcgacgtgactggcgcgcaggcatacgcaagcactgccaagtgtttaaacatatgggccctgatcctggggatactcatgactattggattcatactgctgctcgtgttcggttccgtgacagtttatcatattatgctgcagattattcaagagaagagagggtactag

SEQ ID NO: 120844 - DNA, 300 bp, synthetic construct
  misc_feature 1..300: note = Description of Artificial Sequence: Synthetic coding sequence
  source 1..300: mol_type = other DNA
ccccagtctcagaaaatgcacaaggaagagcacgaagtcgcggttctgggcccacctccttctacaatactgcctcggagcacggtgatcaatatccactccgaaacctctgtcccggaccatgttgtagtgccagttcaacaccctcttctcgaatgctgcctcggatttatcgcctttgcctactccgtcaagtctcgggacagaaagatggtcggtgacgtcacaggggcccaggccctccatcgccaggtgccggagcacttagggccagactctggccatccccatgaccactag

SEQ ID NO: 120845 - DNA, 378 bp, synthetic construct
  misc_feature 1..378: note = Description of Artificial Sequence: Synthetic coding sequence
  source 1..378: mol_type = other DNA
atgcacaaagaagagcacgaagtggcagtactcgggccgccaccctctactattctcccacgatctacggtgattaatattcattccgagaccagcgtgcccgaccacgtggtgtggtcactgttcaacacgcttttcctgaactggtgctgtctaggcttcatagcatttgcatactctgtgaaatctcgagaccgaaaaatggtgggtgatgtgacaggagctcaggcttatgcttccactgccaagtgtctgaacatatgggcacttattctcggcattctgatgacgattggatttatattacttctagtatttggatccgtgaccgtttatcacatcatgctacagatcatccaagagaagcggggatattag

SEQ ID NO: 120846 - DNA, 495 bp, synthetic construct
  misc_feature 1..495: note = Description of Artificial Sequence: Synthetic coding sequence
  source 1..495: mol_type = other DNA
atgaatcacattgtgcagacgttttcacctgtgaattccgggcagccacccaactacgaaatgctcaaggaagagcaggaggttgccatgttaggggtcccacacaatcctgctccacccatgagtactgtgatccacattcggtccgaaacttccgtccctgatcatgtagtggtgccagtgcagcacccacttcacgagtgctgcttaggctttatcgcctttgcttactccgtgaaatcacgggacagaaagatggttggcgacgttacaggagcacaggcattgcacaggcaagtgcccgaacatctgggaccagactttggacatctacacgaccattctgctcaccaccacccctctgttggacgacctggacctgcaatcgaccaggaggctagcctgcggcctggcgccttacccgtgacatgcattcctcgcactctcagctccattccaagacccgctccccggggccaggagctgtgtccatag

SEQ ID NO: 120847 - DNA, 399 bp, synthetic construct
  misc_feature 1..399: note = Description of Artificial Sequence: Synthetic coding sequence
  source 1..399: mol_type = other DNA
atgaaccacatcgttcagaccttctccccagtgaactcagggcagccaccgaactacgagatgctaaaggaggaacaagaagtggcaatgttaggggtgccccacaatccagctcctcccatgtctaccgtgattcatatccggtccgaaacctctgtgcccgatcacgtggtgtggtcactgtttaacactctgtttatgaacacgtgttgcctgggatttatcgcatttgcctacagcgtcaagagtcgtgaccggaagatggtcggcgacgtgacaggggctcaggcatacgcatctacagcgaagtgcctcaatatttgggctttaatattaggcatcttcatgacaattctgctgatcattatcccagttctggtcgttcaagcccaaaggtag

SEQ ID NO: 120848 - DNA, 447 bp, synthetic construct
  misc_feature 1..447: note = Description of Artificial Sequence: Synthetic coding sequence
  source 1..447: mol_type = other DNA
ccccctaattatgagatgttaaaggaagagcatgaagttgcagtgttgggcgctccacacaatccagccccccctacatccactgtaatccacatccggtctgagacaagtgttcctgaccatgtcgttgtgccggtccagcatccacttcatgaatgctgccttggctttattgcgttcgcctactcggtgaaaagccgagaccgcaaaatggtaggggacgtgactggggctcaggccctccaccgccaggtgcccgagcacctcggtccagatagcggtcatcctcacgatcactccgcccaccggcatccttccgccgacttgccgggcctgtggattgatcaggaagccagcctgagaccgggggccttgcccatgacctgtattcctcgcacacctacaagtataccaagacctgcaccaggtgctgagtcatgcatttag

SEQ ID NO: 120849 - DNA, 402 bp, synthetic construct
  misc_feature 1..402: note = Description of Artificial Sequence: Synthetic coding sequence
  source 1..402: mol_type = other DNA
atgaatcatacggtgcagacttttttctcgcccgtgaactccggtcaacctcctaattacgagatgctcaaagaagagcacgaggtagccgtgttaggggcacctcataaccctgctcctccaacttccacggtgattcacattcggagcgaaacctctgtccctgaccacgtggtctggtctctctttaatactctttttatgaacccttgctgcctgggtttcattgcttttgcctattctgtcaagagcagggatcgcaagatggtgggggatgtcaccggagcccaagcctatgcctccaccgctaaatgcctaaatatatgggccctcattctcggtattctgatgacgatcctccttattgttatcccagtcctgattttccaggcctatggctag

SEQ ID NO: 120850 - DNA, 3078 bp, synthetic construct
  misc_feature 1..3078: note = Description of Artificial Sequence: Synthetic coding sequence
  source 1..3078: mol_type = other DNA
atgtcaaatggatactctaccgacgagaattttcgctatctcataagctgctttagagcccgcgtgaagatgtacattcaagttgagcctgtcctggactatctcacctttctgcccgctgaagtcaaggagcagatccagagaaccgtggctactagtgggaacatgcaggcagttgagctcctgttatctacactcgagaaaggggtgtggcatctgggttggacacgggaattcgtggaggccctgaggcggacgggatctcccttggctgcacggtatatgaatccagagctgacagacctgccaagtccgtcgtttgagaatgcacacgatgaatatctgcagcttctgaacttgctacagcccacactggtggataagctgctggtgagagacgtgctggataaatgtatggaggaagagttgctgaccatcgaagatcggaatcgcatcgccgcagccgaaaataatggaaacgagtcgggcgttcgcgagttgctgaagcgtatagtacagaaggaaaattggtttagtgccttcctgaacgttctgcgccaaacgggaaacaatgaactggttcaagagcttacggggtccgattgtagcgagagtaatgctgagatagagaatctgtcccaagtcgacggtccccaggtcgaggagcagcttctgtctaccacggtgcagccaaaccttgagaaagaagtatggggcatggaaaataatagctctgagtcttcattcgcagatagtagcgtcgtttccgagtcggataccagccttgccgagggttcagtatcttgtcttgatgagtccttaggccataactcaaatatggggagtgacagcggcaccatgggaagcgactctgacgaggagaatgtggctgctagagcctctccagagccagagctgcagctcagaccttaccagatggaagtggcacagcccgccctagagggcaagaacatcattatctgcttgccaacaggctccggcaagacgagagtggccgtttacatagctaaggatcacctggataaaaaaaaaaaggcatctgaacctggcaaagtgattgtccttgtcaacaaggtactcctggtggaacagttattccggaaggaattccagcccttccttaaaaaatggtatcgggtcattgggttaagtggcgacactcagctcaaaatcagcttccctgaagtggtgaagagctgtgatatcattattagcaccgcacagattctggaaaattctctgttgaacctagagaacggagaagacgccggcgtgcagctgtccgatttcagcctcattatcattgacgagtgtcaccacaccaacaaggaagccgtctataataacattatgagacactatctgatgcaaaagctgaaaaacaatcgcctcaaaaaggagaacaagccagtgatacctctgccgcagatcctcggtctcaccgctagccccggcgtagggggagcgaccaaacaggctaaggcagaggagcatatcttaaaactgtgcgcaaatctggacgcctttacgatcaaaactgtgaaggagaatctggatcagttgaagaaccagatccaggaaccctgcaagaagttcgctatcgccgatgccacgcgggaagacccttttaaggaaaaactgttagagattatgaccaggatccagacctattgtcagatgagccccatgagcgactttgggacccagccatacgagcaatgggccatccagatggaaaagaaggcagctaaggagggcaaccgaaaggagcgggtgtgcgcagagcacctgcgtaagtataatgaagccctccagatcaatgatacgatccgcatgatcgatgcatacactcacctcgagacgttttataacgaagagaaggacaaaaagtttgccgtgatagaagatgattcagacgagggcggagacgacgagtattgcgacggagacgaggacgaggatgatctgaagaagcctttgaagttagacgaaacagacaggtttcttatgactctgttttttgagaataacaagatgctcaagcggctcgccgagaatcctgagtacgaaaacgaaaagcttacaaagctgcggaacactataatggagcaatacactaggaccgaggagagcgctcggggaattatttttaccaagacccgtcagtctgcctatgcactctcccagtggattactgagaatgagaaattcgccgaggtgggagtgaaagcccatcatctaattggagccggtcattcctccgaatttaagccaatgacacagaacgaacaaaaggaggtcatttcgaaattcaggactggtaaaattaacttactgatcgcaaccactgtggcagaagagggcctcgatattaaggaatgtaatatcgtgatccgttacggactcgttactaatgaaatagcaatggtgcaggctaggggccgggcaagagctgacgagagcacgtacgttctcgttgcacacagtggaagcggagtaattgaacacgagacggtcaatgacttccgggaaaaaatgatgtataaggccatccactgcgttcagaacatgaaaccagaagagtatgcgcacaagatattggaacttcagatgcagagcattatggaaaagaaaatgaagactaaacggaatatcgcaaaacattacaaaaataacccgagcctgattaccttcctgtgcaagaattgcagcgtgttggcctgctctggcgaagatatacatgtgatcgagaaaatgcatcatgttaatatgacaccagagtttaaagagttgtatatcgtgagggagaacaaggccttacagaagaagtgcgcggactaccagattaacggagaaattatttgcaaatgcgggcaggcctggggaacgatgatggtgcacaaggggctggatctgccatgcctgaagatcagaaattttgttgtggtgtttaaaaacaacagcacaaagaagcagtataagaagtgggtggagctaccgatcacatttcccaatttggactactccgaatgctgtctcttcagcgacgaggattag

SEQ ID NO: 120851 - DNA, 666 bp, synthetic construct
  misc_feature 1..666: note = Description of Artificial Sequence: Synthetic coding sequence
  source 1..666: mol_type = other DNA
atgtccaatggttactctactgatgagaatttcaggtacctgatctcctgctttcgtgccagggtaaagatgtacatccaggttgagccagttctggattatctcacttttctgccggctgaggttaaggaacagatccaaagaactgtggctacatcagggaacatgcaggctgtagagctgcttctcagcaccctcgagaaaggagtttggcacctgggctggacacgggaattcgttgaggccctgagacgaactggctccccactcgctgcccgctacatgaaccctgaattaacggatctgccatccccgtcatttgaaaatgcccatgatgaatatcttcagctgctgaacctcttgcagccgaccctggtggataaacttctggttagggacgtccttgataagtgtatggaggaagaattgctcactatcgaagaccgtaaccggatcgcagctgctgagaataacggaaatgaaagcggcgttagagagctcctgaagaggatcgtgcagaaggagaactggttctccgctttcctcaatgtcttaagacagacagggaacaatgagctggtgcaggaattgaccggaagtgattgctctgagtcgaacgcaggcatatgcaacttcacagaagaggactcttcaaactcagcgtag

SEQ ID NO: 120852 - DNA, 3078 bp, synthetic construct
  misc_feature 1..3078: note = Description of Artificial Sequence: Synthetic coding sequence
  source 1..3078: mol_type = other DNA
atgtcaaatggatactccacggatgaaaacttccgatatctgatctcttgtttccgcgcacgagtgaaaatgtacattcaggtggaacctgtactggattatctgaccttcctcccagctgaggtaaaagagcagattcagaggactgttgcaacttccgggaatatgcaggctgtagagctgctgttgtctacactggagaaaggtgtctggcatttaggctggacacgagaattcgtggaagcgttgcgcagaaccggctctccactcgcggctcgctacatgaatcctgagctaactgacctcccctcgccctccttcgaaaacgcccacgatgagtacctccaactattaaacctcttgcagcccacgctcgtggacaagctcttagtccgcgacgtgctagataaatgcatggaggaagagctgctcaccatcgaggaccgtaaccggatcgcagctgcagagaacaatggcaacgaaagcggcgtacgggagttgctgaaacgcattgttcagaaagagaattggttcagtgcttttctcaacgtactgcgtcaaaccggtaataatgagttggtgcaggagctgaccgggtctgactgttctgaatctaacgccgagattgaaaacctgtcacaggttgacggtccacaggtcgaagagcaactcctcagcaccacagttcaaccaaatctggaaaaggaagtgtggggcatggaaaacaacagttccgagagcagcttcgccgactcaagtgttgtcagtgagtctgacacttcccttgcggaaggatcggtttcttgcttagatgaaagtctcggccacaatagtaatatgggctcagattccgggaccatggggagcgacagcgacgaagagaacgttgccgcaagagccagccctgagcccgagcttcagttgcgcccttatcagatggaggtcgcgcagccagcccttgagggaaagaatatcataatctgtctgccaaccggctcagggaagacgcgcgtcgcagtgtacatcgccaaggaccacctggacaaaaaaaaaaaggccagcgaacccggaaaagtgatcgtgcttgtaaacaaagtcctgctagttgagcaactgtttcgtaaagaatttcaaccgtttttgaagaagtggtatcgcgtgattggcttgtctggggacacacaactgaagatttccttccctgaggtcgtcaaaagctgcgatatcatcatatcgaccgctcagatacttgaaaactctctgctgaatcttgagaacggggaggatgcgggcgtccagctcagtgacttctccctgatcatcatcgatgagtgtcaccatacaaataaggaggccgtctacaacaatattatgcggcattacttgatgcagaagcttaaaaacaatcgactaaaaaaggagaataaacccgtgatcccactaccacaaatcctcggtttgacagcttcccctggagtggggggcgcgactaagcaagctaaggccgaggagcacatcctgaaactgtgcgcaaacctggatgctttcacaatcaagactgttaaagagaacctcgaccagctgaaaaaccagatccaagagccatgcaagaaatttgctattgcagacgctactagggaagaccccttcaaggaaaagttactggaaattatgacccgaatacaaacgtactgtcagatgagccccatgtctgattttgggacgcagccttacgaacagtgggctattcaaatggaaaaaaaagcggccaaggaaggcaatcggaaagaaagggtgtgcgccgagcacctgagaaagtacaatgaagccctgcagatcaatgacacaatccgaatgattgacgcatatacccaccttgagaccttctataacgaggaaaaggataaaaagtttgccgttatcgaagacgacagcgacgaagggggagatgacgaatactgcgacggtgacgaggacgaagatgacctgaaaaagcccctcaagcttgatgagaccgatcgatttttgatgaccctatttttcgaaaacaacaaaatgttaaagcgcctagcagagaatcctgagtatgaaaacgaaaaactgaccaagctccgcaataccattatggaacagtacacccgaactgaggaatccgctcgcggaattatttttactaaaacgaggcagtctgcatatgcactgtcccaatggatcactgaaaatgaaaagttcgctgaagtgggcgtgaaggcccatcacctaatcggcgcagggcatagctctgaattcaaacccatgacccagaatgagcagaaggaggtaatctcaaaattcagaacaggtaagatcaaccttctcatcgccactaccgtggccgaggaaggcctggacattaaggagtgcaacatcgtcatcagatacggactggttaccaatgagatcgcaatggtccaggcgaggggacgcgccagagcagatgagtccacatatgtgctggtggcacactccgggagcggcgtcatcgaacacgagactgtgaatgactttagagagaagatgatgtacaaggccatacactgcgtccagaacatgaagcccgaggaatatgcacacaagattctggaactgcagatgcaatctatcatggagaaaaagatgaaaactaaacgaaatatagctaaacactacaagaataacccatcgttaattacctttctgtgcaaaaattgttccgttctcgcgtgctcgggagaggacattcatgttattgagaaaatgcatcatgtaaacatgaccccagagttcaaggaactctatattgttcgggagaataaggcgcttcagaaaaagtgcgcagactatcagataaacggtgaaattatatgtaagtgtggccaggcttgggggaccatgatggtgcataaaggcctcgatctcccttgtctgaagattcggaactttgttgtggtctttaaaaacaattccaccaaaaagcaatacaaaaagtgggtggagttgcccattacatttccaaatttagattactctgagtgttgtctgtttagtgacgaggactag

SEQ ID NO: 120853 - DNA, 1050 bp, synthetic construct
  misc_feature 1..1050: note = Description of Artificial Sequence: Synthetic coding sequence
  source 1..1050: mol_type = other DNA
atgccagtagagcgtatgaggatgcggccctggttagaggaacagattaatagcaacaccatccccgggctcaagtggctgaacaaagaaaaaaaaatctttcagatcccttggatgcacgccgctcgccacggatgggacgttgagaaggatgcacccttgttccgaaactgggctatccacacaggtaagcaccagcccggtgtggacaagccagatcccaagacatggaaggcaaactttcggtgtgcaatgaatagcctccccgacatagaggaggtcaaggataaaagcataaagaaagggaataacgcttttagggtctaccgtatgctgcccctttctgaacgtccaagcaagaaggggaaaaagcccaaaaccgaaaaagaggacaaggtcaaacacattaagcaagaacccgtggagtcctctctcggcctgtccaacggcgtctctgatctcagccctgaatatgccgtgctcaccagtacaatcaaaaacgaagtggactcaacggtgaatatcattgtcgtcggccagagtcacttggactcaaatattgagaaccaggaaattgtgaccaacccaccggacatttgccaagtggtagaagtcactacggagtctgacgagcagccagtctccatgtctgaactatatccattgcagatctctccggtgtctagctacgcagaatctgaaacaaccgattcagtccccagcgacgaggagtcagctgagggccgtccccactggcgaaagaggaacattgagggaaagcagtacctctccaatatgggaactcggggctcatacttgttgcccggcatggcctcatttgttacatctaataaaccggacctccaggtgactattaaggaggagagtaatccagtgccatacaattcctcatggccacctttccaggatttaccgctgtcctcttctatgactcccgcaagctccagctctaggcccgacagagagactagagccagtgttattaaaaagacgtccgatataactcaagctcgcgtgaaaagctgttag

SEQ ID NO: 120854 - DNA, 414 bp, synthetic construct
  misc_feature 1..414: note = Description of Artificial Sequence: Synthetic coding sequence
  source 1..414: mol_type = other DNA
atgcccgttgaaagaatgcgcatgcgcccttggttggaggagcagatcaattcaaataccattcccggcctaaagtggttgaacaaggaaaagaagatttttcagattccctggatgcatgccgcccgacatggatgggacgtcgagaaagatgcccctctatttcggaactgggccattcacacaggaaagcaccagcctggggtagacaagcccgatccaaaaacctggaaggccaattttagatgtgcaatgaatagtctaccagatattgaggaggtcaaggacaagtccattaagaaaggcaacaatgccttcagggtgtatcggatgctgccactgtccgagagacccagtaagaaaggtaaaaaaccaaaaactgaaaaggaagataaggtgaagcacattaagtag

SEQ ID NO: 120855 - DNA, 414 bp, synthetic construct
  misc_feature 1..414: note = Description of Artificial Sequence: Synthetic coding sequence
  source 1..414: mol_type = other DNA
atgcccgtggagagaatgcggatgaggccctggttggaagaacagattaatagcaacacaatccccggcctgaagtggctgaacaaagaaaaaaagatatttcagatcccgtggatgcatgccgcgaggcatggctgggacgtcgagaaagatgcccccctgttcagaaattgggccatccacaccgggaagcaccagcccggagtggataagcctgacccaaaaacttggaaggccaattttcgctgcgccatgaacagtttgcccgacatcgaagaggtgaaggataaatctattaagaaaggtaataacgcctttcgtgtctatagaatgctgcctctctcagaaagaccctccaaaaagggtaaaaaacctaagactgagaaggaggataaggtgaaacatattaaatag

SEQ ID NO: 120856 - DNA, 531 bp, synthetic construct
  misc_feature 1..531: note = Description of Artificial Sequence: Synthetic coding sequence
  source 1..531: mol_type = other DNA
atgccggtagagcgtatgcggatgcgcccctggctcgaggagcagatcaatagtaacactattcccggcctgaagtggctgaataaggagaaaaagatctttcagatcccctggatgcacgcggcgaggcacggttgggacgttgagaaagacgcaccccttttcagaaactgggcaatccacacagggaaacatcagcccggggtcgacaagcctgaccctaagacatggaaggctaacttccgatgtgcgatgaactcacttcccgacattgaggaagtgaaagataagagtattaagaaaggaaataatgctttccgggtctacagaatgctgcccctctctgagcgtccttcaaagaagggcaaaaagccaaaaacagaaaaggaagacaaggtcaagcacattaaacaggagcccgtggagagctctttaggcttaagtaacggggtgtctgatctgtcccctgagtacgccgtcttaacctctaccatcaaaaacgaagtggacagcaccgtgaatatcatctag

SEQ ID NO: 120857 - DNA, 486 bp, synthetic construct
  misc_feature 1..486: note = Description of Artificial Sequence: Synthetic coding sequence
  source 1..486: mol_type = other DNA
atgcccgtggaacggatgagaatgcggccgtggctcgaggagcagatcaactctaatacaataccaggcctgaagtggcttaacaaagaaaagaagatcttccagataccttggatgcatgcagctcggcatgggtgggacgttgaaaaggacgcacctcttttcagaaattgggctattcacacaggaaagcatcagccgggcgttgacaagccagaccccaaaacatggaaagccaacttccgctgcgccatgaacagcttgccagatatcgaggaagtgaaggacaaatcaatcaaaaaaggcaataatgcttttagggtgtaccgcatgctccccctgagcgaaaggccatcgaaaaaagggaagaaacctaagacagaaaaagaggacaaggtaaaacacatcaaacaagaaccagtggaaagttctctaggactgagtaacggcgtttctgacctttcacccgagtacgctgtcctgtag

SEQ ID NO: 120858 - DNA, 1284 bp, synthetic construct
  misc_feature 1..1284: note = Description of Artificial Sequence: Synthetic coding sequence
  source 1..1284: mol_type = other DNA
atgggcactcccaaacctcgcatattaccttggctggtgagccaactagacctgggacagcttgagggagtggcatgggtgaacaaaagtagaactagattcaggattccatggaaacacggcttaagacaggacgcacagcaagaggattttggaatttttcaggcatgggccgaagctactggagcttatgttccaggaagagataagccagaccttcctacatggaagaggaacttcaggagcgccctgaaccgtaaagagggtttgcgcctggctgaagacaggagcaaagacccgcacgatccacacaagatctacgagtttgtcaatagcggcgttggtgacttttcgcagcccgacacgagtccagacactaacggtggcggcagtacctccgacactcaggaagatatcctggacgagctgctcggtaatatggtgctggcccctttgcccgatcccgggcctccatcccttgctgtggcgcctgaaccatgcccccagcctctgcgcagcccaagcctggacaacccgacaccgttccctaacttgggaccaagcgagaatcctctgaaaagattgctagtgccaggagaagagtgggaattcgaggtgacggctttctaccgcggccgtcaggtttttcagcagactatctcttgtcctgaagggcttcgattagtcggctcagaggtgggcgatcgaaccctgccaggttggcctgtaaccctgcccgaccccggcatgagcttgaccgaccgaggtgtgatgtcctacgtgcgacacgtgctatcttgcctgggcggcggacttgcgctctggcgcgcaggccaatggctctgggcacagcggctgggacactgccacacctattgggccgtttctgaggaacttttgcctaatagtggtcacgggcctgatggtgaggtcccgaaggacaaggaaggcggtgtgttcgaccttggtccctttattgtcgatctaattacattcacagaagggagcggcagatccccccgatatgccctgtggttttgtgtgggcgaaagctggccccaggaccaaccctggacaaagcggctcgtaatggtgaaagtggtgccgacttgcctgagggctttggtggaaatggcgcgggttggtggagcgtctagccttgagaatacggttgatttgcacataagcaattcacatcctctctccctgacctctgaccagtataaagcctacctccaggacctagtcgaagggatggactttcaagggcccggcgaatcttag

SEQ ID NO: 120859 - DNA, 903 bp, synthetic construct
  misc_feature 1..903: note = Description of Artificial Sequence: Synthetic coding sequence
  source 1..903: mol_type = other DNA
atgggaacaccaaagccacgcatcttaccatggctcgttagtcagctagatctcgggcagctcgagggggtggcatgggtgaataagtctaggacacgctttagaatcccgtggaagcacgggctgcgccaggacgctcaacaagaggattttggcatttttcaggcttgggccgaggccacaggggcgtacgtgcctggtagagataaaccagacctcccgacttggaagagaaattttaggtctgccctgaaccgaaaagagggcctgaggctcgcagaggacagatcgaaggatccgcatgatccccacaagatctatgaattcgtcaacagcggtgtcggtgatttttcacaaccagacacctcccctgatacgaacggaggtggcagtacatctgatactcaggaggacattctggatgagctcttgggcaacatggtcttggctccactgccggatccgggccccccgagtctggcagtggctcccgaaccttgtccgcagcctctacgcagcccctctttagataacccaactccttttcccaatctgggcccctctgagaaccccctgaagaggctgttagtgcccggcgaggatctaataactttcactgaaggatccgggaggtccccacgatacgctttgtggttctgcgttggagagtcgtggccgcaggatcaaccctggaccaaacgcctggtcatggtcaaagtggtgcccacctgtctgagagccttggtagagatggccagggtgggcggggcgtctagtcttgaaaacacagtggacttgcacatatccaacagccatccactgtccttgactagtgaccagtacaaagcttatctgcaggacctggtggagggcatggactttcagggacctggagaaagttag

SEQ ID NO: 120860 - DNA, 1284 bp, synthetic construct
  misc_feature 1..1284: note = Description of Artificial Sequence: Synthetic coding sequence
  source 1..1284: mol_type = other DNA
atggggacacccaagccgagaattctgccctggctcgttagtcaactggacctggggcagttggagggcgtggcttgggttaacaagtccagaacccggtttaggatcccatggaaacacggacttagacaggacgctcagcaggaggactttggcatttttcaggcatgggcggaagccacaggagcttacgttcctggaagggataagccagatttgcccacatggaagaggaatttcagatcggcgctgaaccggaaggaggggctgcgcctggccgaagatagatccaaggatcctcacgacccacataagatatatgaattcgtgaattctggcgtcggtgatttcagccagccggacacatcccccgatactaacgggggaggcagcaccagcgacacccaggaggacatactcgacgaactacttggcaatatggtgctcgctcccctgcccgatccagggcccccaagcctcgctgtggccccggaaccttgtccacagcctctacgtagcccttccctggacaacccaacgccctttcctaatctgggcccttccgaaaaccccttaaagaggctgctcgtccctggcgaggaatgggagttcgaggtgaccgctttctataggggccgccaggtattccagcaaacaatctcgtgcccggaaggtcttcggctcgtgggctcagaggtgggcgatagaacactgccggggtggcccgtgactcttcctgacccaggaatgagcttaaccgacaggggggtcatgagctacgtgaggcatgttttgtcctgtcttggaggcgggctggctctgtggagagcaggccagtggttatgggcccagcggctcggccactgtcacacatattgggcggtctccgaggaactgctgcccaattccgggcatggtcctgatggcgaagtccccaaggacaaggagggcggggtgtttgacctgggcccgttcattgtggacctgattacatttaccgaaggatcagggaggtcaccccggtatgccctttggttctgtgtgggcgaaagctggccccaagaccaaccgtggacaaaacggctggtgatggttaaagtggtaccgacgtgcctccgagccctcgtggagatggccagggtagggggggccagctcactggagaatacagttgacctccacatctcaaacagccaccctctgagtctgacctcggatcagtacaaggcttatctccaggatctcgtagaaggaatggactttcagggacctggggaatcctag

SEQ ID NO: 120861 - DNA, 315 bp, synthetic construct
  misc_feature 1..315: note = Description of Artificial Sequence: Synthetic coding sequence
  source 1..315: mol_type = other DNA
atgggaacacccaaaccccgtatactcccttggctagttagccagctggatcttggacagttagaaggcgttgcatgggtgaacaagtcaagaaccagattcagaatcccatggaagcacggactccggcaggacgcacagcaggaggatttcgggatttttcaggaacttggcacattcccgagtcagaccccactgaggaccccgatggtcgaagcagtgttgttgatccccaggaaaactttttggatgtcctactgggtgacttggtgttggccacatagccagattcgagaccctcaggcttggctttag

SEQ ID NO: 120862 - DNA, 846 bp, synthetic construct
  misc_feature 1..846: note = Description of Artificial Sequence: Synthetic coding sequence
  source 1..846: mol_type = other DNA
atggtactggcgcccctgcctgatccaggcccgccttctctggctgtggccccagaaccttgcccccaacccctgcgaagtccttctctggataatcctacgccattcccaaatctcggcccaagcgaaaacccactcaagagattactggtgcctggagaagaatgggaattcgaggtgaccgctttttaccgcggtaggcaggtgtttcagcagaccatctcctgccccgagggacttagactggtcggttctgaggtgggcgacagaaccctgccaggctggcccgtgacattgcctgaccccggcatgagcctgaccgaccgcggtgttatgtcctacgtgcggcacgtgctgtcatgtctgggcggaggtctggcactgtggcgggccggtcagtggttatgggcccaacgacttggccattgccacacttactgggcggtttccgaagagttacttcctaattcagggcatggcccagatggagaagttcctaaagataaggagggcggcgtgttcgatttgggcccgttcattgtggacctgatcacgtttacagagggatccggcagatcccctagatatgctctatggttctgtgtgggcgagtcctggccgcaagatcagccctggactaagcgcctggttatggtgaaagttgtgccgacctgtctgagggcacttgtcgagatggcaagggtgggcggagcctccagccttgaaaatactgttgacctccacatttctaatagccaccctctgtctctcacatcagatcagtacaaagcctatcttcaggacctcgtggagggtatggacttccaaggacctggcgagtcttag

SEQ ID NO: 120863 - DNA, 465 bp, synthetic construct
  misc_feature 1..465: note = Description of Artificial Sequence: Synthetic coding sequence
  source 1..465: mol_type = other DNA
atggtcctagccccactacctgatcctggacccccctcgctcgccgttgccccagaaccgtgccctcagcccctgagaagtccctctcttgacaaccctacaccatttcctaacctcggcccctctgaaaacccccttaagcgactcttggtgcctggggaggacctaatcacgttcactgaaggtagcgggcgaagtccccggtacgcgctgtggttctgtgtgggcgaaagctggcctcaggatcagccgtggaccaagcggctggttatggtgaaggtcgtgcccacatgcctgcgggcactggtggagatggctcgagttggtggcgcttcctctcttgagaatacggtggatctccatatttccaacagtcacccgctaagcctcactagtgaccagtacaaggcttatttacaggacctcgtggagggtatggacttccagggaccgggtgagagctag

SEQ ID NO: 120864 - DNA, 846 bp, synthetic construct
  misc_feature 1..846: note = Description of Artificial Sequence: Synthetic coding sequence
  source 1..846: mol_type = other DNA
atggtgctcgcccctcttcccgaccctggccccccatccctggccgtggcccctgagccatgtccccagcccctccgatcacctagtctggataatccaacccccttcccaaatttgggccccagcgagaaccctttgaaacgcctgctggtgcctggagaggaatgggagttcgaggttactgcgttctacagagggaggcaggtatttcagcaaacaatctcgtgtcctgaagggcttagactggtaggaagcgaagtaggagatcgcacgctcccagggtggcccgtcactcttccggatccaggcatgagcctgaccgataggggagttatgagctacgttaggcacgtgcttagttgcctggggggaggcctcgccctgtggcgcgcggggcagtggttatgggcgcagcgacttggccattgtcatacctactgggctgtctccgaagaactccttcctaacagtggccacggtcctgacggagaagttccaaaggataaggagggtggcgtattcgacttgggcccattcattgttgacctgattacttttactgagggctctggacgctcaccgcgttatgctttgtggttctgcgtcggggaaagctggccccaagatcagccgtggacgaagagacttgttatggtcaaggtcgtgcccacttgtctgcgagctttggtcgagatggcgagagtgggtggagcctcatcactggagaacaccgtcgacttgcacatatctaactcccatccactgtcactgacgagcgatcaatacaaagcttatctccaggacctagtggagggcatggactttcaaggacccggggaatcttag

SEQ ID NO: 120865 - DNA, 903 bp, synthetic construct
  misc_feature 1..903: note = Description of Artificial Sequence: Synthetic coding sequence
  source 1..903: mol_type = other DNA
atgggcacaccaaaaccaaggatcttgccatggctcgtttcccagctggatctgggccagcttgaaggagtagcctgggttaacaagtcaagaactaggtttaggattccttggaaacatggactccggcaggacgcacagcaggaagacttcggtatatttcaggcctgggcagaagctaccggagcctacgttcctggcagagataagccagacttgcccacctggaagagaaacttccgctctgccctgaatcgcaaggagggactgagactggctgaggaccgctccaaggaccctcacgacccccacaagatctacgagtttgtaaactccggtgtgggcgacttcagtcagccagatacttctccggatacaaatgggggggggtctacctctgatactcaggaggatatcctggacgaactcctaggcaatatggttctggcccctctgccagatccagggcctccaagcctagccgtcgcacccgaaccttgcccacagccactgcggagcccttccctcgacaacccaaccccttttcctaatctggggccaagtgagaacccactgaagcgcctcctcgttccaggcgaggacttgatcactttcacagaaggatcagggagaagccctcggtatgctctgtggttctgcgtgggcgagagttggcctcaggatcagccttggacaaaaagactggtcatggtgaaagtggtgcctacatgtctgcgggcacttgtagaaatggccagagtcgggggcgcaagcagccttgaaaacacggtggaccttcatattagtaactctcacccattgtctctaacctctgaccagtacaaggcctacctccaggaccttgtggagggcatggattttcagggccccggggagtcatag

SEQ ID NO: 120866 - DNA, 465 bp, synthetic construct
  misc_feature 1..465: note = Description of Artificial Sequence: Synthetic coding sequence
  source 1..465: mol_type = other DNA
atggtgttagccccgctgccagaccccgggcctccgtctctcgccgtggctccagagccttgcccccagccactgcggagtccgtcgcttgataatccaactcccttcccgaatctgggaccgtccgagaatcccctgaagcggctcctggtgccgggcgaggacctcatcactttcactgagggttcgggtagaagcccccgatacgctttgtggttctgtgtcggggaatcttggccccaggatcagccttggacgaagcgtttggtgatggtcaaagtcgtgccaacctgtctgcgggcacttgtagagatggcccgcgtgggtggggcctcatcgttagagaatacagtggatttacatatttccaactcacaccccctcagtctcacctctgaccagtacaaagcatacttgcaagatttggtagaggggatggacttccagggtcccggggagtcctag

SEQ ID NO: 120867 - DNA, 1404 bp, synthetic construct
  misc_feature 1..1404: note = Description of Artificial Sequence: Synthetic coding sequence
  source 1..1404: mol_type = other DNA
atggcactgcaccccagaagagtccggctgaagccctggttggtggcgcaggttgattccggcctctatcccgggctgatctggctgcaccgggactctaaacgcttccagatcccatggaagcatgctacccggcacagcccacagcaggaggaagagaacacgatctttaaagcatgggcagtggaaaccggtaaataccaagagggagtagacgatcctgatcctgccaaatggaaagcacagctgagatgcgctctgaacaagtcgcgagagttcaaccttatgtacgatgggactaaagaagtgcctatgaaccctgtaaagatctaccaggtatgcgacataccccagccccagggcagtattatcaatcccgggtctacggggagcgcaccttgggacgagaaggacaatgacgtcgacgaagaggacgaggaggatgagctcgaccagtcacagcaccacgttcccattcaggacacgttccccttccttaacatcaatggtagccccatggccccggcctctgtgggaaattgcagcgtaggaaactgtagtcctgaggctgtgtggcccaagaccgaacccctggagatggaagtgccccaggcgccaatccagccgttttattccagtcctgagctgtggatcagttctctgcctatgaccgacctcgacatcaaatttcaatacagaggcaaagagtacggccagactatgactgtgagtaatccccagggttgccggttgttttacggcgatctaggccccatgccggatcaggaagaacttttcggtccggtctctctagagcaggtgaagtttcctggaccagagcatataacaaacgaaaagcaaaaattgttcacaagtaaacttctggatgtaatggatcgcggtctgatattagaagtgtcaggccacgctatatacgccatccggctctgccagtgcaaagtctattggtccgggccctgcgccccttctttagtagctcccaatctgattgagcgacagaagaaggtcaaactcttctgtttagagacctttctgagtgacctaatagcccatcagaagggccagatcgagaagcagcctccatttgagatctacttgtgttttggagaagaatggcccgacggaaaaccactggaacgaaaactgatacttgttcaggtaatccccgtggtggcccgtatgatctacgaaatgttcagtggtgacttcacccgctcatttgactcaggatctgtacgactacaaataagcacacccgatatcaaggataacattgtggcccaacttaaacagttgtatcgcattcttcaaacgcaggaatcatggcaaccgatgcagcccacaccatcaatgcagctgcctcctgctttacccccccagtag

SEQ ID NO: 120868 - DNA, 831 bp, synthetic construct
  misc_feature 1..831: note = Description of Artificial Sequence: Synthetic coding sequence
  source 1..831: mol_type = other DNA
atggctctccacccgcggagggtgagactgaagccttggttggtcgctcaggtcgactcgggattatatcctggtctaatctggctccaccgggacagtaaacgatttcagataccctggaaacacgccactcgccactctccacagcaggaggaggagaataccatttttaaagcatgggccgtggaaacaggtaagtaccaggaaggtgtggatgatccagacccggcaaaatggaaagctcaactgcgttgcgcgctgaacaaatcgagggaattcaacctcatgtatgacggcaccaaggaggtgcccatgaaccctgtgaagatttatcaggtgtgcgatatcccgcagccccaaggcagcattatcaacccgggctctacgggaagcgctccctgggacgaaaaggacaatgacgtggacgaggaggatgaggaagatgaacttgatcagagtcagcaccacgtgcctatccaggacacattcccatttctcaatattaacggctctcccatggcccctgcttccgttggaaactgctccgtcggtaactgcagccccgaggctgtgtggcccaaaaccgagcccctggagatggaagttcctcaggcaccgatccagcctttctactcctcgcccgagttgtggatctcatctctccccatgaccgatcttgacattaaattccagtataggggcaaggagtacggccaaacaatgactgtttcaaacccacaaggatgccggctgttctacggcgaccttgggcccatgcccgatcaggaggagctgttcggcccagtgagtctggagcaggtgaagttttag

SEQ ID NO: 120869 - DNA, 1119 bp, synthetic construct
  misc_feature 1..1119: note = Description of Artificial Sequence: Synthetic coding sequence
  source 1..1119: mol_type = other DNA
atgtacgacgggaccaaggaagtccccatgaatcccgtcaaaatttaccaggtgtgcgacattcctcaaccccaggggtcaatcatcaatccagggagcaccggttcagctccctgggatgaaaaggataacgatgtggatgaagaagacgaggaagatgaactggatcaatcgcagcaccatgtgcctatccaggataccttcccgttcctcaacattaacggttccccgatggcaccggcatctgtgggtaattgttccgtgggcaattgctccccagaagccgtttggcccaagaccgaaccactggagatggaagtccctcaggcgcccattcagccattctatagtagcccagaactgtggataagctcactacccatgactgacttggatatcaaattccagtatcgtggaaaagagtacgggcagaccatgaccgtctcaaatcctcagggctgccggctgttctacggagacctcggtcctatgcctgatcaggaagaactgtttggaccagtttccttagaacaggtgaaattccctggacctgagcacatcacaaatgaaaagcagaagctctttaccagtaagctcctggacgtcatggatagaggtctcattttggaagtctccgggcatgccatttatgctattaggctgtgtcagtgcaaagtttattggtctggcccctgtgcgccaagccttgtcgctccaaacctaattgaacgccagaaaaaggttaaactattttgtcttgagacttttctgtcagatctgattgctcaccaaaaggggcaaatcgaaaagcagccccccttcgagatttacctatgtttcggggaggaatggccggacggtaagccactggagcgtaaactcatcttagtgcaggttataccagtggtcgctcgtatgatctatgagatgttctctggagatttcacaaggtcctttgattctggaagcgttcggctgcaaatctccacacctgatattaaagataacattgtcgcacaactcaagcagctttacaggatcctacaaacccaggaaagctggcagccgatgcagcctactccttccatgcagctgccccccgcgctcccacctcagtag

SEQ ID NO: 120870 - DNA, 1281 bp, synthetic construct
  misc_feature 1..1281: note = Description of Artificial Sequence: Synthetic coding sequence
  source 1..1281: mol_type = other DNA
atgtgtgataggaatggcggtaggagactgcgccagtggttgattgaacaaatcgacagctcaatgtatcccggactgatctgggagaatgaggagaagtccatgttcagaataccctggaagcatgcaggcaagcaggattataatcaagaggtggatgcttcaattttcaaggcttgggccgtcttcaaaggaaaattcaaagaaggggataaggctgaacccgcaacctggaagacccgcctgaggtgtgcgctgaacaaatcccccgattttgaggaggtgactgacaggtctcagctggacataagcgaaccttacaaagtgtatcggatcgtccctgaagaggagcagaagtgtaagttaggagtggcaactgcaggttgcgtgaatgaggtcacagagatggagtgcgggagaagtgagatagacgaacttatcaaggagccaagcgtagatgactatatgggcatgatcaaaagatccccgtctccacctgaggcgtgccggtcccagcttttgcctgactggtgggcacagcagccctcaaccggcgtccctctggtgacagggtacacgacttacgacgcgcaccattccgccttttcccaaatggtcatcagcttctactatgggggtaagctggtgggtcaggcaaccaccacctgcccagaaggctgccgcttgtccctgtcccagccaggtctccctgggaccaaactgtacgggcccgagggcctcgaactggtgagattcccgcccgctgacgcaattccaagcgagcgacaaaggcaggtaactcggaaactgttcggacacttagagcgcggagtgctcctccattcatccagacaaggtgtgtttgtaaaacgcctttgtcagggccgagtcttctgtagcggcaacgccgttgtctgcaaaggcaggcccaataagctagagagagatgaagtcgtgcaagtctttgatacctcacagtttttccgcgagctgcagcagttttataattctcagggacgcctgcctgacggccgagtggtcttatgcttcggtgaagaatttccagatatggccccactgaggagcaaactgatcttggtgcagatcgagcagctgtatgtgcggcaactggctgaggaggcaggaaagagctgtggagcagggagcgtgatgcaggccccagaagaacccccaccagatcaagtttttcgtatgtttcccgacatttgcgccagtcatcagagaagtttttttcgcgaaaaccaacagattacagtatag

SEQ ID NO: 120871 - DNA, 546 bp, synthetic construct
  misc_feature 1..546: note = Description of Artificial Sequence: Synthetic coding sequence
  source 1..546: mol_type = other DNA
atggctggttctagagaagttgttgctatggactgcgagatggtagggctcgggccccatcgggagtccgggctcgcgcgttgctcactcgttaacgtccatggggctgtgctctacgataaattcatacggccagagggcgaaatcactgactaccggacacgggtttcgggcgtgacacctcagcacatggtcggagctaccccgtttgcggtggcacgcctggaaatcttacagttattgaaggggaaactggtggtgggtcacgacttaaaacacgacttccaggcactgaaggaggatatgagtgggtatacaatttatgacacatcaaccgacaggctgctctggcgagaagctaaattagaccactgtaggcgggtctcattgagagttctcagtgaacggcttctccataaaagtatacagaatagtctgctgggacactcctctgtggaagacgcccgagccactatggagctgtaccagatttcccaacggatcagggctcgtcggggactaccacgtctcgcggtgagcgattag

SEQ ID NO: 120872 - DNA, 546 bp, synthetic construct
  misc_feature 1..546: note = Description of Artificial Sequence: Synthetic coding sequence
  source 1..546: mol_type = other DNA
atggcgggctctagggaagtggtggccatggactgcgagatggtgggcctggggccccaccgcgagtccggacttgcccggtgcagcctggtcaatgtgcatggcgccgtgctgtatgataagtttatcagacctgagggcgaaattaccgattatagaactcgagtgtccggcgtgaccccacaacacatggtcggagccacccctttcgctgtagcccgcctggaaatccttcagctcctgaagggcaaacttgtcgtgggtcatgaccttaaacacgactttcaagctctgaaggaagacatgtctggttacacgatttacgacacgtcaacagatcgccttttatggcgcgaagctaagctggatcactgtaggagggtttccttgagagtgttaagtgaaagattgttacacaaatccattcagaatagcctgctgggtcactctagcgtcgaagacgcacgggccacgatggagttgtatcagatatctcagagaattagggcacgccgagggctgccacgacttgccgtttcagattag

SEQ ID NO: 120873 - DNA, 1062 bp, synthetic construct
  misc_feature 1..1062: note = Description of Artificial Sequence: Synthetic coding sequence
  source 1..1062: mol_type = other DNA
atgagcaccctgctcttgaatctggattttggggaaccccctccaaaaaaggcgcttgaaggaaatgccaagcatcgaaattttgtcaagaaacggagattgctggagcgtagaggctttttaagcaaaaagaatcaacccccatcaaaggcaccaaagcttcactcagaacctagcaagaaaggcgaaaccccgacagtggacggcacatggaaaactccatcattcccgaagaaaaaaaccgctgcatctagcaacgggtctgggcagccccttgacaagaaagccgccgtttcgtggctcactcctgctccctctaagaaggccgacagtgtcgcagccaaggtggacttgcttggcgaattccagtctgctctgcctaagataaattcccatcccactcggagccagaaaaaaagcagccagaagaaaagcagcaaaaaaaatcatcctcagaagaacgctccgcaaaattctacacaagcgcactccgaaaacaaatgtagcggagcctcacaaaagttgcccagaaaaatggtcgctattgattgtgagatggtgggcactggcccaaaggggcatgtgtcaagccttgctagatgttccattgtgaactacaatggcgacgtcctatacgatgagtacattctacccccatgccacattgttgactatcggacacggtggtctggcatccgaaagcaacatatggttaacgctacaccttttaagatcgccaggggccaaatactgaaaattctgactggcaagatcgtggtagggcatgctattcacaatgattttaaggccttacaatacttccatccaaaatcactgacccgcgatacatctcatattccccccttgaatcgcaaggccgactgcccagagaatgcaactatgtcccttaagcacttaacgaagaaattgctgaaccgcgacattcaagtgggcaaatctggacattcctccgtggaggacgcgcaggcgactatggagctctataaacttgtggaggttgagtgggaggagcacctcgctcggaatcctccaacagattag

SEQ ID NO: 120874 - DNA, 1062 bp, synthetic construct
  misc_feature 1..1062: note = Description of Artificial Sequence: Synthetic coding sequence
  source 1..1062: mol_type = other DNA
atgtctactctcctgttgaacctggacttcggagagcccccacccaagaaggcattggagggaaatgcgaagcacaggaacttcgtgaagaagcggagactgctggagcggcggggtttcctgagtaagaagaaccaacctccttccaaagcacctaagcttcattcagagccgagcaaaaagggtgagacaccaacggttgatggcacatggaagactccaagcttccccaagaagaaaacagcagcgagcagcaatgggtctgggcagccactcgataagaaagccgccgtgtcatggttaaccccagcgccgtcgaaaaaggcagactcagtggcagcgaaagtggaccttttgggggaattccaatcagccctgccaaagatcaacagccatccaactagaagtcagaagaaaagctcccaaaagaagtcctcgaagaagaaccatccacagaaaaatgccccgcagaacagcacccaagcccattctgagaacaaatgctccggtgcaagtcaaaagctccctaggaagatggtggccatagactgtgaaatggtcggcaccgggccaaaaggccatgtgtcctcactcgcaagatgtagcatcgttaattacaacggcgatgtcctgtatgatgagtacatccttccaccctgccacatcgttgattacaggaccaggtggtccggcatcagaaagcagcatatggtaaatgccactccgttcaagatagcaagaggccagatcttgaagattctgaccgggaaaattgtagtgggtcatgctatccataatgacttcaaggccttgcagtactttcaccctaagagcctgactcgagacacctctcatatcccgccattaaacagaaaggccgattgtccagaaaacgctactatgagtttgaaacatctcacaaaaaaactgctaaaccgggatatccaggtgggcaaaagcggtcactccagcgtcgaggacgcccaggcaaccatggaactgtacaagctggtggaggtggaatgggaagaacatttagctagaaacccccctaccgactag

SEQ ID NO: 120875 - DNA, 360 bp, synthetic construct
  misc_feature 1..360: note = Description of Artificial Sequence: Synthetic coding sequence
  source 1..360: mol_type = other DNA
atggaggcttctgcccttacctcaagcgcggtaacgtccgtagccaaagtggtgcgtgtagcctccgggagcgcagtggtcctcccactggcgcgtattgcaactgttgtcatcggtggagtggtcgcggtgcccatggtcctgtccgcgatgggtttcactgctgctggcattgcttctagttctatcgccgccaagatgatgagtgccgctgctattgctaacggagggggtgtggccagcggatccctggttgccacactgcagtcgttgggggcaaccggactctccggacttaccaagtttattctcggaagtattggtagtgctatcgctgcagtgatcgcaagattttactag

SEQ ID NO: 120876 - DNA, 369 bp, synthetic construct
  misc_feature 1..369: note = Description of Artificial Sequence: Synthetic coding sequence
  source 1..369: mol_type = other DNA
atggaagcttcggccctgaccagctcagctgttacttccgttgcgaaggtggtgcgtgtggcatccggctcggctgtcgtattaccgcttgctagaatcgcaaccgtggttattggcggcggcgagtcagttgtggctgtcccaatggtgctatcagccatgggatttacggcagccgggatcgccagttccagtatcgctgccaaaatgatgtccgcagccgccatcgccaatggtggcggtgttgcatccggctccttggttgccacactgcagagtctcggagcaactggattgagcggcctgacaaaattcatacttggttcaatcggctctgcaatcgccgccgtgatagctagattttactag

SEQ ID NO: 120877 - DNA, 369 bp, synthetic construct
  misc_feature 1..369: note = Description of Artificial Sequence: Synthetic coding sequence
  source 1..369: mol_type = other DNA
atggaagcgtccgccctcacatctagcgccgtcacctctgtggcgaaagtggtccgggtcgctagcggctctgccgtggtgctacctctggctcgaattgccaccgtggtaatcggaggggtggctagcattgtggccgtgccaatggtgctctcagcaatgggcttcacagcagcaggcatagcaagttcctcgatcgccgccaaaatgatgtcggctgccgccattgccaacggtggcggggtggcttcgggctctctggtggctacacttcagagcctcggagctactgggctgagcggcctgactaaatttattctgggttccataggctccgccattgctgcagtcatagcaagattttactag

SEQ ID NO: 120878 - DNA, 189 bp, synthetic construct
  misc_feature 1..189: note = Description of Artificial Sequence: Synthetic coding sequence
  source 1..189: mol_type = other DNA
atggaagcatctgccttgacgagctccgcagtcacctccgtcgcgaaggttgtaagggtggcttcagggtctgccgttgttcttccactggccaggatcgcgacggtggtaatcggcggggtggtggccgtccctatggtcctgagtgccatgggttttacggcagccggcattgcatcctcctcatag

SEQ ID NO: 120879 - DNA, 174 bp, synthetic construct
  misc_feature 1..174: note = Description of Artificial Sequence: Synthetic coding sequence
  source 1..174: mol_type = other DNA
atggaagcctcagccctgacctcttccgcggtgacgagcgtggccaaagtggttcgcgttgcctctggttccgcagtagtgttaccgctggcgcgcatcgccacagtcgtcatcggtggcgtggtggccgtgcccatggtcctgtccgccatgggttttacggccgctggctag

SEQ ID NO: 120880 - DNA, 360 bp, synthetic construct
  misc_feature 1..360: note = Description of Artificial Sequence: Synthetic coding sequence
  source 1..360: mol_type = other DNA
atggaggcttccgctctgaccagcagcgctgtcacatctgtggccaaggtggttcgggtggcttctggtagtgccgtggttcttcctctcgcacggatcgccacggttgtaatcggcggcgtcgtggctgtccctatggtcttgagcgctatgggttttactgcagccggcatcgccagcagttccatagccgcgaaaatgatgtccgctgcggctatagccaatgggggaggcgtggcctcgggcagtttagtcgctacactgcaaagcctgggcgccacggggctgtctggcctgaccaagttcatcctcgggtccatcggatctgctatagctgcagtaatagcacggttttactag

SEQ ID NO: 120881 - DNA, 123 bp, synthetic construct
  misc_feature 1..123: note = Description of Artificial Sequence: Synthetic coding sequence
  source 1..123: mol_type = other DNA
atggaggcctctgcacttacttcatccgcagtgacttcggtcgccaaggtagtccgagtggcctccggcagcgcagtggtccttcctctagctaggatcgctacggtcgttattgggggatag

SEQ ID NO: 120882 - DNA, 282 bp, synthetic construct
  misc_feature 1..282: note = Description of Artificial Sequence: Synthetic coding sequence
  source 1..282: mol_type = other DNA
atggaggcatctgccttaactagctccgcggttacctcagttgccaaagtcgtgcgggtcgcctcaggatcggcagtcgtgctccccctggctcgtatcgccactgttgtcattggaggtgtggtggccgtgcctatggtcctgtccgcgatgggtttcactgccgcaggcatcgcctcctcatcgatcgctgctaaaatgatgtccgcagcagccattgctaatggaggcggcgttgcctccggctctctcgttgctactttacaatcgctgggggcctag

SEQ ID NO: 120883 - DNA, 2358 bp, synthetic construct
  misc_feature 1..2358: note = Description of Artificial Sequence: Synthetic coding sequence
  source 1..2358: mol_type = other DNA
atggggaagaagtataagaacattgtactgttgaagggactggaagtcatcaacgattatcatttccggatggtgaagtccctgctctccaacgatcttaagctgaatctcaagatgcgcgaggaatacgacaaaatacagatcgccgacttgatggaagaaaaattccgtggcgatgcggggctgggtaagcttatcaagatatttgaagatatcccgaccctcgaagatctcgcagagactcttaaaaaagagaagctgaaagtcaaagggcccgctctcagtagaaagagaaagaaagaggtggatgctacgtcacccgcaccaagcactagttccactgtgaaaacagaaggagctgaggccacaccaggagcacaaaaaagaaagaaatccactaaggaaaaagccggacctaaagggagtaaagtgtcagaggaacagacccagccccccagtcccgccggggcagggatgagcactgccatgggccgctcgcccagcccaaaaaccagcctgagcgctccccccaatagcagctcgacagagaatcctaagacagtggcaaagtgccaggttactccccggaggaacgttctccagaagcgcccagtgattgtgaaggtgctgtccacgaccaaaccatttgaatatgaaacaccggagatggaaaaaaaaatcatgttccacgccactgtcgccactcagactcagtttttccacgtgaaggtgctcaacacaagtctgaaggagaagttcaatggtaagaagataataataataagcgattatttggagtatgacagcctcctggaggtgaacgaagaaagtacagtttccgaggctgggccaaaccagacatttgaagtgcccaacaagattataaatagggctaaggagacacttaaaattgatattctacacaaacaagcgtcagggaatattgtgtatggagtattcatgctccataagaaaacggttaatcagaaaactactatttatgaaattcaggacgacaggggcaagatggatgtagtcggtactggacaatgccacaatataccgtgcgaggagggcgataagttgcagcttttctgcttcagactaaggaagaaaaatcagatgagcaagctcatcagtgaaatgcattcttttatacaaataaaaaaaaaaaccaatccaagaaacaacgatccaaagtctatgaagctccctcaggaacagaggcagctcccctacccctcggaggcgagtaccacatttcctgaaagccacctgaggactccacaaatgccacccaccacgccttctagctccttttttaccaagaagagtgaggacacaatttctaagatgaatgatttcatgcggatgcaaatcctgaaggaggggagtcatttcccaggaccatttatgaccagcattgggcccgcggaaagtcatccacacactccccagatgccaccctccactccttcctcgtctttcctgaccacaaaaagcgaggatacaatttctaaaatgaatgatttcatgcgcatgcaaatcttgaaagagggttcacactttcccgggcctttcatgacctccattggcccagcagagtcccatcctcatactccccagatgccaccctcaacacccagttcttctttccttacgactctgaaaccccgcttgaagacggaaccggaggaggtgagcatcgaggattctgcgcagagcgacctcaaggaagtgatggtcctgaacgcaacagaaagctttgtctatgaacctaaagagcagaagaagatgtttcacgccacagttgctacagagaatgaagtgttccgggtgaaggtgtttaatattgacctgaaagagaagtttacacctaaaaaaatcatcgccatcgcaaactatgtgtgtaggaatgggttccttgaagtgtatccatttaccttggtcgcggacgtgaacgcggaccggaacatggaaatccccaaaggtctcatcaggtctgcgtccgtgactcctaagattaaccagttgtgcagccagactaagggatccttcgtcaacggagtgtttgaggtacataaaaagaacgtgaggggcgaattcacctactacgaaatccaggacaacactggaaaaatggaagtggttgtgcatggtcgcctcaccacaataaactgtgaggagggcgacaagttaaaattgacttgctttgagttggccccaaaatctgggaatacaggtgagcttcggtccgtgatacattcccacattaaggtgatcaagacacgcaaaaataagaaggatatattaaatcccgactctagtatggagacttctcccgacttttttttttag

SEQ ID NO: 120884 - DNA, 2022 bp, synthetic construct
  misc_feature 1..2022: note = Description of Artificial Sequence: Synthetic coding sequence
  source 1..2022: mol_type = other DNA
atgggaaaaaagtacaagaacatcgtcctgctaaaagggctggaggttatcaacgattaccactttagaatggtgaaatctttactttcgaacgacctgaagttaaatctaaagatgagggaggagtacgacaaaatacagattgccgatctgatggaggaaaaattccgaggcgatgccgggctgggaaaattgatcaagatttttgaggacatccccacccttgaggatcttgcagaaacattaaagaaggaaaaactaaaagtgaaaggtcctgcccttagtcggaagcggaagaaagaggtcgacgccacaagccccgctccatcgacgtcttccacagtgaaaacagagggggccgaggctactcctggcgctcaaaaacgtaaaaaatccacaaaggaaaaagccggtcctaaggggtccaaggtgagcgaggagcagacacagcctccaagcccggctggggcgggaatgagtaccgctatgggccgcagcccttcacccaaaacttctttgtccgccccacccaattcctcttcgacggagaatcctaaaaccgtagcaaagtgtcaggttactccaaggaggaatgtgctgcagaaacgcccggtcatcgttaaggtgctgagcactaccaaaccatttgagtacgagacacctgagatggagaagaagataatgttccacgccacagttgccactcagacacagttctttcacgtcaaagtgctaaatacaagccttaaggagaagtttaatggcaagaagatcatcattatctccgactatctggaatatgactccctgctcgaggtcaatgaagagagtaccgtttctgaggctggacccaaccagacttttgaagtgcccaataaaattatcaatagggcgaaagaaacattaaagatcgatatccttcacaaacaggcctctggaaatattgtgtacggagtgtttatgctgcacaagaagactgttaaccagaaaaccactatttacgagatccaggatgaccgggggaagatggatgtcgtgggaacaggccagtgtcacaacattccttgtgaggaaggagataagctgcagctgttctgctttaggcttcgcaaaaaaaaccagatgtccaagctgatttccgaaatgcacagctttattcaaataaaaaagaagaccaacccaaggaacaatgacccaaagagcatgaagttgccacaggagcagcgacagctcccttaccctagcgaagcctccacaactttccctgagagccacctgagaactccacagatgcccccgaccacacccagctctagtttcttcacgaagttgaaaccccgactaaaaactgaaccagaagaagtgagtatcgaagatagtgctcagtcagacctgaaggaggtgatggtcctgaatgccaccgagagctttgtttatgagccaaaagaacagaaaaaaatgtttcatgccaccgtggctaccgaaaacgaagtttttcgggttaaagtgtttaacattgacctaaaagaaaagtttactccaaaaaagatcattgcaattgccaactacgtgtgcagaaatgggtttctcgaggtatatccgttcaccctggttgcagacgtcaatgccgaccggaatatggaaattcctaaagggctgattcggagcgcatccgtaacacctaaaattaatcaactctgtagtcaaaccaagggttcttttgtcaacggtgtgttcgaggttcataagaaaaacgtgaggggagaattcacgtactacgagatccaagacaataccgggaagatggaagtagtggtgcatgggaggttgacgacaataaactgcgaggaaggcgacaaacttaagcttacatgctttgagctcgccccgaaatctggaaataccggtgagctgaggtccgtgatacattctcacataaaggtgattaagacccgtaaaaacaaaaaggacatcctcaatcctgactcctcaatggaaacctccccagatttctttttttag

SEQ ID NO: 120885 - DNA, 1245 bp, synthetic construct
  misc_feature 1..1245: note = Description of Artificial Sequence: Synthetic coding sequence
  source 1..1245: mol_type = other DNA
atggggaagaaatacaagaacatcgtcctattaaagggcttggaagtcattaacgactatcacttcaggatggtgaaaagcctgctgtctaatgacttgaagctgaacctaaaaatgcgggaggaatacgacaagattcagattgcagatctgatggaggagaaattccgcggcgacgccggcctggggaaactcataaaaattttcgaggacattccgactctggaggacctggctgagactttgaaaaaggagaaactgaaggtcaaaggccctgccctgagcagaaaaaggaaaaaggaagttgacgctacatctccagccccttcgactagttcaaccgtgaagactgagggagccgaggccactccgggagcgcagaagagaaagaagagcaccaaggagaaagccgggccaaagggaagtaaagtgtcagaagaacagactcagcccccgagccctgcaggagctggtatgtctaccgccatggggaggtcacccagccctaaaacaagcttgagcgccccccctaactcaagttctaccgaaaatccaaagacggtggcaaagtgccaggtgactccacgtaggaacgtgctacagaagcgaccggtgatcgtaaaggtgctcagcacgacaaagccattcgaatatgaaacccctgagatggagaagaagatcatgttccatgcaaccgtggccacccagacccagtttttccacgtgaaggtcctgaacaccagtctgaaggagaaattcacacccaagaagatcatcgcgattgctaattacgtgtgcaggaatggctttctggaggtgtaccccttcaccctggttgccgacgtgaacgcggacagaaatatggagatccctaagggcctgattagatctgcgtcagtgactcctaagattaaccagctatgcagtcagaccaaaggatccttcgtcaacggggtgttcgaagtgcacaagaagaatgtacggggagagtttacttattacgagattcaagataacaccgggaagatggaggtggtagtccacgggcgcctgacaactatcaattgtgaggagggggacaagctgaagctcacttgcttcgaactcgcaccaaagagcggaaacaccggggaactccgatccgtgatccattcacatataaaggtgatcaaaaccagaaaaaataagaaagatatcttaaatcccgattctagtatggagacaagcccagatttcttcttttag

SEQ ID NO: 120886 - DNA, 2190 bp, synthetic construct
  misc_feature 1..2190: note = Description of Artificial Sequence: Synthetic coding sequence
  source 1..2190: mol_type = other DNA
atgggcaagaagtataaaaatattgtcctcctcaaggggctcgaggttataaatgactatcatttcaggatggtgaaatctctgctgtcgaacgacctgaaactgaacctgaagatgagagaggagtatgacaagatacagattgcagaccttatggaggaaaagttcaggggtgacgcaggattaggtaaactcattaaaatctttgaggatattcccacacttgaggatctggccgaaaccctcaaaaaggagaagttgaaggtcaagggtccagcgttatctcggaagcgcaagaaagaagttgatgccacttccccagctccgtctacctccagcacagtgaagacggagggcgctgaagctacaccaggtgcccagaaacgaaaaaagtctacaaaggagaaagcaggtccaaaaggctctaaagtttcagaagagcagacgcaacctcctagcccagccggcgctgggatgtccaccgcaatgggtcgatctccaagccctaaaactagtctctccgctcctcctaacagctcctccaccgagaaccctaagactgtggctaaatgtcaggtcaccccacgccgtaacgtgttacagaaacgccctgtaatcgtcaaagttttgagtactacaaaacctttcgagtacgagacacctgaaatggagaagaaaataatgtttcacgccactgtagctacacagactcagttctttcacgtgaaggtgctgaatacctccctgaaggaaaagttcaacggtaaaaaaataatcatcattagtgactatttggagtacgactctctcctcgaagttaacgaggagtctacagtcagtgaagccggtccaaaccaaacctttgaagtcccaaataagataatcaaccgcgccaaggagacgttgaaaatagatatcctgcataagcaggcaagcgggaacatcgtgtatggcgtgttcatgcttcacaaaaagaccgtcaaccagaagaccaccatttatgaaattcaggacgaccggggtaaaatggacgtggtagggacaggtcaatgtcataatattccctgcgaggagggagacaaactgcagctcttctgcttcaggctgaggaaaaaaaatcagatgtcaaaactaattagcgaaatgcacagttttattcagattaaaaaaaagactaatccccgaaataacgatccgaaaagcatgaaactgcctcaggaacaacgccagcttccctacccatccgaggcctctactacatttccggagtctcaccttaggacacctcagatgcctcctaccacgcccagttcttctttcttcaccaaaaagtcagaagacacaattagtaagatgaacgacttcatgcgaatgcagatactgaaggagggttcccacttcccagggccatttatgacaagcatcggccctgcagaatctcacccccacacgccccagatgcccccttccacaccttcctccagctttttgaccaccctgaagccgaggctgaaaaccgagcccgaggaggtgtcaattgaagattccgcccagtcggacttaaaggaagtcatggtgttgaacgccaccgaatccttcgtctacgagccaaaagagcagaaaaaaatgttccacgcaactgttgcaactgagaatgaggtcttcagggtaaaagtctttaatattgacctcaaggagaagttcacgcctaagaagattatcgcgatagccaattacgtgtgccgtaacggctttttggaggtatatccttttacattggtggccgacgtgaacgccgatcgtaacatggagatccccaaaggcctgatacggtcagcatctgttacacctaaaatcaaccagctatgctcacagactaaaggaagcttcgtgaacggagtgttcgaggtgcataagaaaaatgtccgcggcgaatttacttactatgaaatccaagacaacaccgggaaaatggaggtggtcgtgcacggacggctgaccaccattaattgcgaggaaggcgacaaactcaagctgacatgttttgagcttgctccaaaatcgggaaacaccggagaactaagaagcgtaatacatagccatattaaggtgatcaaaactagaaaaaataaaaaggatattctgaacccggacagcagtatggaaacctcacctgattttttcttctag

SEQ ID NO: 120887 - DNA, 2190 bp, synthetic construct
  misc_feature 1..2190: note = Description of Artificial Sequence: Synthetic coding sequence
  source 1..2190: mol_type = other DNA
atgggtaaaaagtacaagaacattgtgctgttgaaggggctggaggtcatcaacgactatcatttcagaatggttaagagtctgttgtctaatgatctgaagctgaacctgaagatgcgagaagagtatgacaagatccagatagctgaccttatggaggagaagttccggggagatgccggcttaggtaagttaatcaaaatattcgaagatattcctacgttggaagatctggcagaaacccttaagaaggaaaagctcaaagtgaaaggccctgccctgtcacgcaagcggaaaaaagaggtggatgccactagcccagctcctagcacctcttccactgtgaaaacggaaggtgctgaggcgacacccggcgcccagaaacgcaagaaatctaccaaagaaaaagcagggcccaaagggtccaaggtttccgaggagcaaacacagcctccaagccccgcaggagcaggtatgtccactgccatggggcggagtccatctcccaaaacgagcctgagcgccccccccaattcttcgagtactgaaaatcctaagaccgtggccaaatgccaggtcacacctaggagaaacgtgctgcagaagcgccctgtcatcgtcaaagtcctgagtactactaaaccatttgagtatgaaacacccgaaatggaaaagaaaattatgtttcatgctactgtggctacacagacccagtttttccacgtgaaagttctgaacacctcattgaaggagaaatttaatgggaaaaaaattatcatcatctctgattatcttgagtacgattccctgctggaggttaacgaagagtctaccgtctcagaggccggtccaaatcagacctttgaggtgccaaataagatcattaaccgggcaaaggagactcttaagatcgatatcctgcacaaacaggcatccggtaacatagtgtacggcgttttcatgctccacaaaaagacggtcaatcagaagaccacaatctacgaaattcaggatgaccggggcaagatggatgtggtgggaacgggccagtgccataatatcccctgtgaggagggggataagctgcagctgttctgctttcgccttaggaagaaaaatcagatgagtaaactgatctctgaaatgcatagtttcattcagataaaaaagaaaaccaatccacggaacaacgatcccaaatctatgaagctgcctcaggagcagcggcaactcccttatcctagtgaggcttccacaactttccctgagtcccacttacgcacgccacagatgccacccaccactccatcttcttccttctttacgaaaaaatccgaagatacaatttcaaagatgaatgacttcatgaggatgcagattctgaaagaaggaagccatttccccggccctttcatgacgtctattggaccagccgaaagtcatcctcatacgcctcagatgcctccttctactcccagctcatcattcctgaccaccctcaagcccaggctgaagacagagccagaagaggtgagcatcgaggactccgcccaaagcgatctcaaggaggtgatggtcctgaatgcaacagagtcttttgtgtacgaaccgaaagaacaaaaaaagatgttccacgctacggtggctaccgaaaacgaggttttccgcgtgaaggtgttcaacattgatcttaaggaaaaatttaccccaaagaagatcattgctattgccaattatgtatgccgtaatgggtttttagaggtttatcctttcactctggtggcagatgtgaatgccgatcgtaacatggagatccctaaggggttaatccggtccgccagcgtgaccccaaaaattaaccaattgtgttctcagacaaagggctccttcgtgaatggcgtgtttgaagtacacaagaagaatgtacggggggaatttacatattatgagatccaggacaacacgggaaagatggaagtggtagtgcacggaaggcttactaccatcaattgtgaggagggagataaactgaaacttacctgctttgagctggcacccaagtctggcaacacaggagagcttcgatctgtgatccatagccatatcaaagtgatcaagacacgtaaaaataagaaggacattctgaatccagactcatccatggagacatctcccgacttctttttttag

SEQ ID NO: 120888 - DNA, 384 bp, synthetic construct
  misc_feature 1..384: note = Description of Artificial Sequence: Synthetic coding sequence
  source 1..384: mol_type = other DNA
atggggaaaaagtataagaatattgtactgttgaaaggtctggaggtaattaatgattaccattttagaatggttaagagtctcctatctaatgatctgaagctcaacctaaagatgagggaagagtatgataaaattcagatcgccgacctgatggaagaaaaatttaggggagacgctgggctcggtaaattaatcaaaattttcgaagatattcctacactggaggatctcgctgagacactcaaaaaagagaaacttaaagttaagggacccgccctgagccgtaagcgcaagaaggaggtcgatgccacatcccctgcacccagcaccagttctacagtcaagactgagggggctgaggccacacctggtgcacagtag

SEQ ID NO: 120889 - DNA, 2202 bp, synthetic construct
  misc_feature 1..2202: note = Description of Artificial Sequence: Synthetic coding sequence
  source 1..2202: mol_type = other DNA
atgagcgtgaaaatggggaaaaaatataagaacattgtgctcctcaagggactagaggttattaatgattaccactttagaatggtcaagagtctgttatctaatgacttgaagctgaacctaaagatgagggaagagtatgataagattcaaatagctgaccttatggaggaaaaattccgaggcgacgctggactgggcaagctgatcaagatttttgaggatatcccaacacttgaggacttggcagaaacccttaagaaggaaaagttgaaagtgaaagggcctgccctatcacggaaacgcaaaaaggaggtcgacgcaaccagccccgcccccagcacctcctctacagtgaaaacagaaggcgctgaagcaacaccaggggcgcagaaccctaagaccgttgcaaaatgtcaggtgacacctcgccgcaatgttctgcagaaacggcccgtgattgtgaaagtgctctccacgaccaagcctttcgagtacgaaacgccagagatggaaaaaaaaattatgtttcatgctacagtggctacacaaactcaatttttccacgtgaaagttctaaacaccagtcttaaggagaagttcaatggaaagaagatcattattatcagcgactatctggaatatgactctctcttggaagtgaacgaggagtcaaccgtatccgaagcgggcccaaatcagactttcgaggtgcctaacaagataatcaaccgggcaaaggagaccctgaaaatcgatattctgcataaacaggcttcgggtaacatcgtctatggagtgttcatgctgcataaaaagacagttaatcagaagacaacaatttatgagatacaggatgacaggggtaaaatggatgttgtgggaactggccaatgccacaacataccatgtgaggagggcgataaactgcagttgttctgctttaggctgcgaaagaaaaaccaaatgtctaagcttatctccgagatgcatagcttcatccagatcaaaaaaaaaacaaatcctcgcaataatgacccaaagtcaatgaagcttccccaggaacagaggcaattgccctatcccagcgaagctagcaccaccttcccggaatcacacctgcgcaccccccagatgccccctaccacacctagttcaagcttcttcactaaaaagagtgaagacaccatctccaaaatgaacgactttatgaggatgcagatcttaaaagaagggtcccactttccgggaccgtttatgacctcaattggcccagccgagtcccaccctcacacaccacaaatgccgccgtccacccctagctcaagttttttaaccaccaagtcagaagacacaatttccaaaatgaacgactttatgcgcatgcagatcctcaaagaaggcagccatttccctgggccattcatgactagcatcggccccgccgagagccatccccacactcctcagatgcctccatccacaccgagctcatcgtttctcaccactttaaagccaagactgaagaccgaacctgaggaagtttccatagaagattccgctcagtcagatctaaaggaggtgatggtgttgaacgctactgagtcttttgtgtacgagcccaaggaacaaaagaagatgtttcatgccacagtggcaaccgaaaacgaggtttttagagtgaaagtgttcaacatcgacttgaaggaaaagtttacacctaagaagatcatcgccatcgctaactacgtatgcagaaatgggtttttggaagtgtacccttttactctggtggctgacgttaacgcagacagaaacatggagatcccaaaaggcctcattagatctgcgtctgtaactccaaagatcaatcagctgtgtagccagacaaaagggtcgttcgtcaatggtgtattcgaagttcacaaaaaaaatgtgaggggcgagttcacatactacgagattcaggataacacaggcaaaatggaggttgtggttcacggacgtttaactactataaactgcgaggagggtgataaattgaaattgacctgctttgagctagcacccaagagcgggaacacaggagaattgcgaagcgtgatacactcccacatcaaagtcattaagactcgcaagaataagaaggacattctcaacccggatagctccatggagacgagtcccgattttttcttttag

SEQ ID NO: 120890 - DNA, 543 bp, synthetic construct
  misc_feature 1..543: note = Description of Artificial Sequence: Synthetic coding sequence
  source 1..543: mol_type = other DNA
atgggcaagaagtacaagaacattgtcctcctgaagggtctggaggtcataaacgactatcattttcgaatggtcaagtctcttctgtcaaacgacctcaaactcaatttaaaaatgcgcgaagagtacgataagattcagattgcagacttaatggaagagaaatttcgcggcgatgcaggtctggggaaactgataaagatatttgaggatatacccactctggaagacttggccgagacccttaaaaaagagaaattgaaggtgaagggccccgccctttccaggaagcgcaaaaaagaggtcgacgcaacgtcaccggcaccttctacctcctctacagttaaaaccgagggggccgaagctacccccggcgcccagaaacggaagaaaagcacgaaagagaaagctggtcccaagggctcaaaagtaagcgaagaacaaacccagcccccgtcacctgccggggctggcatgtctacagccatggggaggtctcccagcccaaagaccagcctgtccgctcctcctaatagtagctag

SEQ ID NO: 120891 - DNA, 1485 bp, synthetic construct
  misc_feature 1..1485: note = Description of Artificial Sequence: Synthetic coding sequence
  source 1..1485: mol_type = other DNA
taatccacggagaaccctaaaacagtggcaaaatgtcaagtgacccctagaagaaatgtgttacaaaaaaggccagtgatcgtaaaagttctgtcaacaaccaaaccgtttgagtatgagacccctgagatggaaaaaaaaattatgtttcatgctactgtggcaacacagacccagttctttcatgttaaggttcttaacactagcttgaaggaaaaatttaatggcaaaaagatcatcatcatttccgactacctcgagtacgatagtctcctcgaggttaacgaggagtccacagtcagcgaagcgggaccaaaccagacgttcgaggttccaaacaaaatcatcaaccgggcgaaggaaacactaaaaatcgatattctgcacaagcaggccagcggcaatatcgtgtacggcgtgttcatgcttcataagaagaccgttaaccagaaaacgaccatttacgaaattcaagatgatagaggtaaaatggatgttgtgggcactggccaatgtcacaacattccatgcgaggaaggcgacaagctgcaactattttgcttccgcctgaggaaaaagaaccagatgtcaaaactgataagtgagatgcacagtttcattcagattaagaaaaaaacaaaccccagaaacaatgatccaaagtccatgaaacttcctcaggagcagcgtcagctgccatacccctctgaagccagcacgacatttccggagtcacacctgcgaaccccgcagatgccacctacaaccccctcctccagcttttttacaaagctgaagcctcgcctgaaaactgagccagaagaggtgtcaatcgaagacagtgcacagagcgacctgaaggaggtcatggtcctgaacgccactgaaagcttcgtatatgagcctaaagaacagaaaaaaatgttccatgctactgtggccacagagaatgaggtcttcagagtgaaggttttcaacatcgaccttaaggagaagttcacaccaaaaaaaattatcgccattgcaaactacgtctgcaggaacggattcctggaggtttatcctttcacactggtggccgacgtgaatgccgataggaacatggaaatccctaaggggcttatccggtcagccagtgtgacacccaaaatcaaccagctctgtagccaaaccaaggggagttttgttaacggggtcttcgaggtgcacaagaagaatgttcggggggaatttacttattacgaaatccaagacaataccggaaagatggaggtcgtggttcatgggcggctcaccaccatcaattgtgaagaaggggataaactcaaactgacatgctttgaacttgcccccaagtcagggaataccggagagctgagatctgtgatccattcccatatcaaggttatcaaaaccagaaaaaataaaaaagacatactgaacccggatagcagcatggagacttcccctgacttcttcttctag

SEQ ID NO: 120892 - DNA, 753 bp, synthetic construct
  misc_feature 1..753: note = Description of Artificial Sequence: Synthetic coding sequence
  source 1..753: mol_type = other DNA
atgaccctctccccgttgctgttgttcttgccaccgctcctgctgttgttggacgtccccactgcagccgtacaagctagccccctgcaagcattagacttcttcggaaatggcccccccgtgaactacaaaactgggaacttatacctgcgcggacctctgaagaaatccaacgctccacttgtaaacgtcaccctgtattacgaagctctgtgtggtggctgtagggcatttctgatccgagaactgtttccaacttggctgctcgttatggagattcttaatgtcaccctcgtgccatacggcaacgcccaggaacagaatgtgtccggtagatgggaattcaaatgtcagcatggggaggaggaatgcaagttcaacaaagtagaagcctgcgtcctcgatgaactcgatatggagttggcttttctgacaatagtgtgtatggaggagtttgaagatatggaacgttccttacccctgtgtctccagttatacgcccccgggctaagtcccgacactattatggagtgtgctatgggggatcggggcatgcagctgatgcacgccaatgcgcagcgcaccgacgccctgcagccaccacacgagtacgtgccatgggtgaccgttaacggcaaacctctggaggaccagacccagctgctgacgctcgtgtgccaactgtatcagggtaagaaaccagacgtgtgcccctcctctacttcaagcttgaggagcgtttgctttaaatag

SEQ ID NO: 120893 - DNA, 588 bp, synthetic construct
  misc_feature 1..588: note = Description of Artificial Sequence: Synthetic coding sequence
  source 1..588: mol_type = other DNA
atggcactgctgtttccactactggctgccctcgttatgacctcatactctcctgtggggtcactagggtgtgatctgccgcagaatcacggactgctgtcccggaacaccctggtgctgctgcaccagatgagaaggatcagccccttcctgtgtttgaaggacagacgtgacttccgatttccacaggagatggtcaagggatcccaactccagaaggcccacgttatgtctgtactacacgagatgttgcagcagattttctccctgttccacaccgaacgctcctctgccgcatggaacatgacacttctggaccagctgcacacgggcctgcaccagcagctacagcacctggagacttgcttgctgcaggtggttggtgaaggggaatctgccggcgccatttccagtccggctcttactttgagacgatatttccaggggatccgcgtgtatttaaaagagaagaaatatagcgattgtgcatgggaggtcgtgcgcatggagatcatgaaatctttgtttctgtctactaatatgcaggaacgcttgaggtccaaggatcgcgacctgggttcttcatag

SEQ ID NO: 120894 - DNA, 861 bp, synthetic construct
  misc_feature 1..861: note = Description of Artificial Sequence: Synthetic coding sequence
  source 1..861: mol_type = other DNA
atgagcgcccctttggacgcagctctgcacgctctacaggaggaacaggcacgactgaagatgagactgtgggatctgcagcagctgcgaaaagaactcggtgactcccctaaggataaggtgcccttttccgttcccaaaatccctttggtgtttcgtggccacacgcaacaggacccagaggtcccgaaatcactggttagcaatctgagaattcattgccctcttctggctggctcagccctgatcaccttcgatgacccaaaggttgctgagcaggtactccagcagaaagagcacactataaatatggaggaatgccgactgcgggtgcaggttcagccgctggagcttcctatggtaaccactatccaaatgagtagccagctttccggccggagagtgctagtgaccggctttccagcatcgcttcgcttgagcgaggaagaactgctggacaaactggagatcttcttcggcaaaacgcgcaatggtgggggcgacgttgatgtgcgcgagctgctcccagggtcagtcatgctgggtttcgctagggacggtgtggcccagcgtctgtgccagatcgggcagtttacagtacctctagggggacagcaggtcccccttagagtctcgccctacgtgaacggagagatccagaaagccgagatcagatcccagcccgtgcctcgtagcgtgttagtactgaacatccccgatatcctcgatggacctgagctccatgatgtcctggagatccattttcagaagcccacgagaggtggaggcgaagtggaagcacttacagtggtgccccagggacagcaaggactggccgtctttacttctgagtctgggtag

SEQ ID NO: 120895 - DNA, 867 bp, synthetic construct
  misc_feature 1..867: note = Description of Artificial Sequence: Synthetic coding sequence
  source 1..867: mol_type = other DNA
atgagtgcaccgctggatgctgccctccacgccctccaagaagagcaagccagactcaagatgagactctgggatttgcagcaactaagaaaggagctcggcgacagtcctaaggacaaagtgccgttttccgttcctaagattcctctagtttttaggggacacactcagcaggaccctgaggtcccgaaatcccttgtgtctaacttaagaattcactgccccctgttggctgggtccgctctgattaccttcgatgacccaaaggtcgctgagcaagttctccagcagaaagagcatacaatcaacatggaagagtgcagattgcgagtccaagtgcagccactggaactccctatggtgacaactatccaggttatgatgtctagccagttgtccggtcggagagtcttagttaccggatttcccgcgagtctacggctgagcgaggaggagctcctggacaaattagagatcttcttcggaaagacaagaaacggaggtggcgatgtggatgtgcgggagctcctgcctgggagcgttatgctgggatttgcgagagatggggtggcgcagcggttgtgccagatcggtcaattcacagtcccactcggtgggcagcaagtgcctctgcgagtctcgccatacgtaaatggggagattcagaaagcagagatcagatcccagcctgtcccacgctccgtgctagtcctgaatattccagatatcctcgatggtccagagctgcacgacgtgttggaaatccacttccaaaaacctactagaggcggcggggaggtggaggcactgacagtagtcccccaaggtcaacagggcctggccgtgttcacctctgagagtggatag

SEQ ID NO: 120896 - DNA, 1335 bp, synthetic construct
  misc_feature 1..1335: note = Description of Artificial Sequence: Synthetic coding sequence
  source 1..1335: mol_type = other DNA
atggctgtcactacccgccttacatggctgcatgagaagatccttcaaaatcatttcgggggaaagagactgtctcttctctacaaagggtctgtacatggcttccgcaacggagtgttgcttgataggtgctgtaatcagggccctaccctgacggtgatctatagcgaagaccatattatcggggcttatgccgaagaatcgtatcaggaaggtaaatatgcctcaattatcttgtttgctctgcaggacacaaagatttctgagtggaagttagggctgtgcactcctgaaaccttattttgctgtgacgtcaccaaatataactcccccacaaacttccaaatagatgggcggaatcggaaggtaatcatggatttaaaaacgatggaaaaccttggattggcccagaattgtactatttcgattcaggattacgaggtgtttaggtgtgaggactccctggacgaaaggaaaattaagggcgtaattgagttgaggaagagcctgctttccgctttgcgcacatatgaaccctatggctctttagtccagcagattagaatcctgctgttaggcccgattggagctggtaagtccagtttttttaactccgtcaggagcgtgtttcaggggcacgtcactcatcaagctctcgttggaactaacacaaccggcatcagcgagaagtatagaacatacagcatccgcgacggcaaagacggaaaatatctgccattcatcttatgcgacagtctcggcctgtctgagaaggaaggtggcctgtgccgggatgatatcttttatattctgaacggcaacatccgagacagataccagttcaaccctatggagtcaattaagttgaatcatcatgactatattgacagcccaagcctcaaggaccgcatacattgcgtcgcattcgtcttcgacgcttcgagtatccagtatttttcttctcagatgatcgttaaaatcaaacggatcagacgggagctcgtcaacgccggagtcgtacacgtggcgctgttaacgcacgtggattcaatggacttaatcaccaagggggatctgatcgagatcgaaagatgcgaacctgtgcgctcaaaactcgaagaggtccagaggaagctaggctttgctctgagcgatatatcagtggtctccaactactcctccgagtgggagttagaccctgtaaaggatgtgcttatcttgagcgccctgagacgcatgctttgggcggcagatgatttcctggaggatctcccattcgaacagattggtaacctcagggaggagatcatcaactgcgcacagggcaagaaatag

SEQ ID NO: 120897 - DNA, 588 bp, synthetic construct
  misc_feature 1..588: note = Description of Artificial Sequence: Synthetic coding sequence
  source 1..588: mol_type = other DNA
atggatctgaagaccatggagaacttaggcctggcccagaactgcacaatttctatccaggactacgaagtgtttcggtgtgaggacagccttgatgaacgcaagatcaaaggtgtgatcgagctccgcaagagcttactgtcagcactgagaacgtatgagccatatgggagcctggttcagcaaatcaggatactcctactgggacccataggggcgggcaaaagcagcttctttaactcagtgcgcagcgtattccagggacatgtgacccaccaggcgctggtgggcacaaatacgacagggatctccgagaaatatcgcacatactccatcagagacggcaaggatggcaaatatctgcccttcatcctctgcgacagtctgggtctgtctgagaaggaaggaggactctgccgggacgatatcttttacatcctgaacggaaacatcagggaccgctatcagtttaaccctatggaatccattaagctgaatcatcacgactatattgattcgcccagtttgaaggaccgcattcactgcgtggcctttgtatttgatgcttcctccattcaatacttctag

SEQ ID NO: 120898 - DNA, 231 bp, synthetic construct
  misc_feature 1..231: note = Description of Artificial Sequence: Synthetic coding sequence
  source 1..231: mol_type = other DNA
tgactatccgatatttcggtggtttccaattattcctctgagtgggagttggatcccgtcaaggacgtgttgatcctttccgccctaagaaggatgttgtgggccgccgacgatttcctggaagacctccctttcgagcagattggacgttggtttggcggggttgaagcgtggaagcgtagcggcaaccttagggaagaaatcattaattgcgcgcagggaaagaaatag

SEQ ID NO: 120899 - DNA, 390 bp, synthetic construct
  misc_feature 1..390: note = Description of Artificial Sequence: Synthetic coding sequence
  source 1..390: mol_type = other DNA
atggagtcaatcaaacttaatcatcacgactacatcgactctccttctctcaaggaccgtattcactgtgtggcatttgtgtttgacgcttctagtatccaatatttttcgtctcagatgattgtcaagataaagagaatccgaagggagcttgtgaacgctggcgttgtacatgttgctctactgacccatgtggacagtatggacctgatcacgaaaggagacctgattgaaattgagaggtgcgagccagtgcgatctaaggtgatgaacgacgctctgcgtaagcacatcttctggggtatgctgctccagtcacacactagcgtctacaaaaataaaaacaaacaactgctggggctccgacgcattacaaaactgttaaagtag

SEQ ID NO: 120900 - DNA, 585 bp, synthetic construct
  misc_feature 1..585: note = Description of Artificial Sequence: Synthetic coding sequence
  source 1..585: mol_type = other DNA
atgctgtgcgataccatgggccttgacggcgcagaaggcgctggcctgtgcatggatgatatcccccatattcttaagggctgcatgcctgaccgatatcaattcaactcgaggaaaccgataactccagagcactcaacctttatcacctcgccttcactgaaggatcgaatccactgcgtggcctacgtgcttgacatcaattcaatcgacaacttatactctaagatgctagccaaagtcaagcaagtgcacaaagaggtgttgaactgtgggattgcctacgtcgcactactgaccaaggtggatgactgttcggaggtgctgcaggacaacttcctgaatatgtctagaagcatgacatcccagagcagagtaatgaacgtacataagatgctcgggatccctatttctaacattctgatggtcggaaactatgcgagtgacctggagttggaccccatgaaggacattctgattctaagtgcccttagacagatgctccgggccgccgatgacttcttagaggacctgccactggaggagaccggtgctatagaaagagctcttcagccttgcatatag

SEQ ID NO: 120901 - DNA, 1359 bp, synthetic construct
  misc_feature 1..1359: note = Description of Artificial Sequence: Synthetic coding sequence
  source 1..1359: mol_type = other DNA
atggaggtgactacccgcctgacttggaacgatgaaaatcacctgcggaagctgcttggcaacgtctccctttccctactatacaagagctcggtacatggagggtctatcgaagacatggtagagcggtgcagtcgccaggggtgcaccatcaccatggcatacatcgactacaacatgattgtcgcttttatgctgggcaattacataaatctgcatgagtctagcactgagcctaatgatagcctttggttttctctgcagaagaaaaatgatactaccgagattgaaacgctcctcctcaacactgcccccaagattatagatgagcaactcgtgtgccgactttccaagactgacatttttatcatttgtcgagacaacaaaatttaccttgacaagatgatcacgcgcaaccttaagctgcgtttctatgggcaccgacaataccttgaatgcgaagtatttcgagtagagggaatcaaggataatctcgacgacattaaacgcatcataaaggcacgggaacacaggaaccgacttcttgcagatatcagagattataggccatacgccgacctggtgagcgaaattaggatcctacttgtaggcccggtcggctctggcaaatcctccttttttaatagtgtcaaaagcatttttcacggacacgttactgggcaagcagtggtgggctccgacattaccagcatcaccgagagatacaggatctattcggtgaaagatggaaagaacggcaagtccctcccttttatgttgtgtgacacgatgggactggacggcgctgagggagcaggtctctgtatggatgacattccacacatcctgaaaggatgcatgcctgaccgataccagtttaactcgcgcaaaccaattacccctgagcattctacatttatcacaagtccgtccttaaaagataggattcactgcgtggcatatgtgctggatattaattctattgataacctgtactccaagatgctggccaaagtgaaacaggtgcataaggaagtgctgaattgcggtatcgcctatgtcgctctcctgactaaggtagacgactgctccgaggtgctgcaggataattttcttaatatgtctcggtccatgacctcccagagccgcgtgatgaacgtgcataagatgctcggtatccctatcagcaacattctcatggtaggaaactatgccagcgacttggaattagatccgatgaaggacattttaatcctcagcgccctgaggcagatgttaagagcggcagacgacttcctagaggacttgccgctggaggaaaccggcgcaatcgaaagggcattgcaaccgtgtatttag

SEQ ID NO: 120902 - DNA, 294 bp, synthetic construct
  misc_feature 1..294: note = Description of Artificial Sequence: Synthetic coding sequence
  source 1..294: mol_type = other DNA
atggaggtgaccacaagactcacatggaacgatgagaaccacttgcgaaaactactaggaaatgtctccctgagcttgctttataaatcttctgtgcacggcgggtccattgaggatatggtagaaaggtgttcccggcagggctgcactattacaatggcctacattgactacaatatgattgttgctttcatgctaggaaactacataaatctgcatgagagctctacggagccaaacgattccctgtggttcagtttgcagaagaagaacgataccaccgaaatcgaatag

SEQ ID NO: 120903 - DNA, 1437 bp, synthetic construct
  misc_feature 1..1437: note = Description of Artificial Sequence: Synthetic coding sequence
  source 1..1437: mol_type = other DNA
atgagcactaacggggatgatcatcaagtcaaggatagcctggagcagctccgttgccacttcacatgggaactttcgatcgatgacgacgaaatgcctgaccttgagaatagagtactagatcagatcgagtttctcgataccaagtacagcgtggggatacacaatctcctcgcatatgtgaaacacctcaagggtcaaaatgaagaggctctgaaatccctcaaagaagcagagaatctcatgcaggaggagcacgacaaccaagcgaatgttagatcattggttacatggggcaacttcgcctggatgtactaccacatgggccgattagcagaagcccagacttatttggataaagtcgagaatatctgtaagaaactctctaacccattcaggtaccgaatggagtgccccgagatcgattgtgaggaagggtgggccttgcttaagtgcggcggtaagaattacgaacgagccaaggcttgctttgagaaagtactggaagtcgaccctgagaatccagagtcctcggcagggtatgcaatttctgcttataggcttgacggattcaagcttgccactaaaaatcacaagccgttttcactattgccccttaggcaggcagttcgtctcaatcctgataacggatacataaaggtgttgctggcccttaagttgcaggacgagggccaggaagcagagggagagaaatacatcgaagaggctctggctaatatgagctcgcagacgtacgtgttccgctacgctgccaaattctatagacggaagggcagcgtggataaagctctcgaactgctgaagaaggccctgcaggagacaccaacatctgtcctgctgcatcaccagatcggcctatgctataaggcacaaatgattcagatcaaggaagccacaaagggccagccacgagggcaaaatagagaaaaactcgacaagatgatcagaagtgccatttttcattttgagtccgcagtcgaaaagaagccaacttttgaggtcgcccacctggatctcgccagaatgtacattgaagcggggaaccacaggaaggcggaagaaaatttccaaaagctgttgtgtatgaaaccggtggtggaagagactatgcaggatatccacttccattatggccggtttcaggaatttcagaagaaaagcgacgtgaacgctatcatccattatctcaaagcaattaaaatcgagcaggccagcctcactagagacaagtcaattaactcactcaagaagctggtgctcaggaaactgcgtcgcaaggccctcgatctagagtcgctttcactgctcggctttgtctataagctggaagggaacatgaatgaggcccttgagtattatgaaagagcgttaaggctggccgcagattttgaaaattcagtgagacaggggccatag

SEQ ID NO: 120904 - DNA, 1344 bp, synthetic construct
  misc_feature 1..1344: note = Description of Artificial Sequence: Synthetic coding sequence
  source 1..1344: mol_type = other DNA
atgccggacctggagaaccgcgtgctggatcaaatcgaattcttagatacaaagtacagcgttggtatccataatctgctggcctacgttaaacacctgaagggacagaacgaggaggcgttgaaaagcctaaaagaggcagagaatctgatgcaggaggaacacgataatcaggcaaatgtgaggagcctggtgacatggggcaatttcgcttggatgtattaccatatgggacgcctggccgaagctcagacatatctcgataaagtcgagaatatttgcaaaaaactctcgaaccccttcaggtatcgaatggagtgtcccgagatcgactgcgaagaagggtgggcactactgaagtgtggcggcaaaaattacgagcgcgctaaggcttgttttgagaaggttcttgaagtcgatccagagaaccccgagtcctctgctggatatgcaatctcggcctatcgtttagacgggttcaagctcgctacgaagaatcacaagcctttttcgcttctgcccctgaggcaggctgttagactcaacccagacaacggctacatcaaggttctcttagcactcaagctgcaggacgaaggtcaagaggctgagggtgagaagtacatcgaggaggccctggccaatatgtcctctcagacatacgtctttcgttacgccgccaaattctataggcgcaagggctctgtggacaaggcactcgaacttcttaagaaagcactgcaggagacaccaacctccgtgctgctgcatcaccagattggcctttgctataaggcccagatgatccagattaaggaagcgacgaaagggcagcctaggggccaaaaccgcgaaaaactggataagatgatccgctcagccatctttcacttcgaaagtgctgtcgagaaaaagcccactttcgaagtagcacacctggatctggctaggatgtatatcgaggccggcaaccatcgcaaggcagaggagaattttcagaaactcttgtgtatgaagccggtcgttgaggagactatgcaggatatccattttcactatgggagatttcaggagttccaaaaaaagtcggacgtgaacgccattatccactacttgaaagcaattaagatagaacaggctagtctgactagagacaagagcatcaattcactgaaaaagcttgtgttgaggaagctgaggagaaaagccctagatctggagtcactttcattattgggctttgtctacaagcttgagggtaatatgaatgaagcactggaatactacgagcgagcgctgcgcctcgctgccgacttcgaaaacagcgtgaggcaggggccttag

SEQ ID NO: 120905 - DNA, 1419 bp, synthetic construct
  misc_feature 1..1419: note = Description of Artificial Sequence: Synthetic coding sequence
  source 1..1419: mol_type = other DNA
atgtctgagaacaacaaaaatagcttagaatcgagtctgcggcagctgaaatgccatttcacatggaaccttatggaaggagagaactcactcgacgatttcgaggacaaagtgttctacagaacggaatttcagaaccgggaattcaaagctacaatgtgcaaccttttggcttatctgaaacacttaaagggccagaacgaggctgcgctggagtgcctgagaaaagccgaagagttgatccaacaggaacacgctgatcaggccgagatcaggtctctcgtgacttggggtaactatgcctgggtgtattaccatatggggcgtctttctgatgtgcagatctatgtggacaaagtgaagcatgtctgtgaaaagttctctagcccctacaggatagagagtcccgaactcgattgcgaggaaggctggacccggctgaagtgcggcgggaatcaaaatgaacgggctaaagtatgctttgagaaggccctggagaaaaagcccaaaaaccccgagttcacttcagggctcgctatcgcaagttatcgcttagacaattggccaccgtcccaaaatgcgattgaccccctgagacaagcgattcgccttaaccctgataatcagtatctgaaagtgcttttggccttgaagcttcacaagatgagagaggaaggagaagaggagggggagggagagaagttagtggaggaggctttggagaaagccccgggcgtgactgacgtattgaggtctgccgctaaattctacaggagaaaggacgagcccgataaagctatcgaacttttaaagaaagctctagagtatatccccaacaatgcttatttacattgtcagattggatgctgctaccgcgctaaagttttccaggtgatgaaccttagggagaatggcatgtacgggaaaagaaagctgctggagctgatcggacacgccgtagctcacttaaaaaaggccgacgaagccaatgataatctgttccgggtatgctccattctggcttcactccacgctttagctgatcagtatgaggatgcggagtattacttccagaaagagttcagcaaggaacttacccctgtcgccaagcaacttttacatttgcgctatgggaattttcagctgtatcagatgaagtgcgaggataaagcaatccaccattttatcgaaggggttaaaatcaaccagaaaagccgggagaaggaaaaaatgaaagacaaactccagaaaattgcgaaaatgcgactgtcaaagaacggcgctgactcagaggccctccatgtgcttgcctttcttcaggagctgaacgagaagatgcaacaggccgacgaggactccgagcgcggtctggagagcgggagcctcattccctccgcctcatcctggaatggggagtag

SEQ ID NO: 120906 - DNA, 1356 bp, synthetic construct
  misc_feature 1..1356: note = Description of Artificial Sequence: Synthetic coding sequence
  source 1..1356: mol_type = other DNA
atgcccaagaacaaaaagcgcaatacccctcatcgcggatcatccgctggcggcggaggaagcggtgctgctgcagccacagcggcaactgcgggaggacagcatcgaaacgtccaacccttttctgacgaggatgcctcgatcgaaacaatgtcacactgcagcgggtacagcgatcctagttcattcgcagaagacggacccgaggtactcgacgaggaaggtacacaggaggatttagagtacaaactgaagggacttatcgatctcactttggacaagagcgccaagactcgtcaggctgctttggaaggtatcaaaaatgccctggcgtccaagatgctctatgaattcattctggagcggcgaatgacactcacagacagtattgaacgatgcctcaaaaaaggtaagtcagacgaacagcgcgctgcagcggcactagcctccgtactgtgcattcagctgggtcccgggatcgaatcagaggaaatcctgaagacactgggtcccatcctaaaaaaaataatttgcgacgggtccgccagtatgcaggctagacagacatgtgccacttgtttcggagtgtgctgtttcattgcaaccgacgacattacggaactgtatagtactctggagtgtctggagaatattttcaccaaatcatatttaaaggagaaggatacaacggtcatttgctccaccccaaatactgtattgcatatctcaagtcttttggcctggactctcctcctgacaatttgtcctattaatgaggtgaagaagaagctggagatgcactttcataaactgccgagcttgctgagttgtgacgatgttaatatgaggatcgcagctggcgagtccctcgctctcctcttcgagttggcacggggcatcgaatcagacttcttctatgaagacatggaatctttgactcagatgttgcgcgctctcgccactgatgggaataagcacagagctaaggtggacaaaaggaagcaaagaagcgtttttagggacgttctccgagccgtggaggagcgcgatttccctaccgaaactattaagttcgggcccgaacgcatgtacatcgactgctgggttaaaaaacatacctatgacacttttaaggaagtgctcggtagcggaatgcagtatcacctccagtccaatgagtttctccgaaacgtctttgagttgggccccccggtgatgctcgatgctgcaacactcaagaccatgaagatttcccggtttgaaaggcacctctataacagtgctgcctttaaggctcgcacgaaagcgcgcagcaaatgccgtgataaaagggctgacgtgggtgaatttttttag

SEQ ID NO: 120907 - DNA, 1356 bp, synthetic construct
  misc_feature 1..1356: note = Description of Artificial Sequence: Synthetic coding sequence
  source 1..1356: mol_type = other DNA
atgccaaaaaataaaaagaggaataccccacacagagggagttctgccgggggtggcggatcaggcgccgcagccgctaccgccgcaaccgcgggcggccagcatcgcaatgtgcagccgttctccgacgaggacgccagtatcgagactatgtcccactgtagcggttactctgaccctagctctttcgccgaagatggcccagaggtgctcgatgaggagggaacgcaggaagatctggagtataagctgaagggccttattgacctaaccttagataaatctgccaaaacacgccaggccgctcttgaaggcatcaagaatgccctagcctctaagatgttgtacgagtttattctagagagaagaatgacactgaccgatagcattgagagatgtctgaaaaagggtaagtcagatgaacagagagccgccgccgcactggcatccgttctctgcattcagcttgggcccggaatcgaaagcgaagagatactgaagacattggggcccatactaaaaaagattatctgcgatggatcagcgagcatgcaggctaggcaaacctgtgccacatgctttggagtttgttgctttatcgcgaccgacgatataaccgaactgtattcaactctcgaatgcctagaaaacatcttcacaaaaagttatttaaaggaaaaggatactactgttatctgttcaacccccaacacagtgctgcatatcagtagtctcctcgcgtggactctcctactgacgatttgccccattaacgaggtgaaaaagaagctggaaatgcattttcacaaattaccctcattactctcctgtgatgatgtcaacatgcggattgccgccggagagtcacttgcactgttgttcgagcttgcccgcggaattgagagtgatttcttctatgaggacatggagtctctgactcaaatgctaagggccttggccacagacggcaacaaacatagagcgaaagttgataagcggaaacagcgctccgtgtttcgggacgtcctcagagccgttgaggaaagagacttcccaacggagacaatcaagttcggaccggaacggatgtacattgactgttgggtaaagaagcacacctacgatacattcaaagaagttctggggtctggcatgcagtaccatctgcaatccaatgaattcttaagaaatgtgtttgaactgggccctcctgtcatgctcgacgcagcaaccctgaaaactatgaaaatcagccggttcgagcggcacctgtacaacagtgctgccttcaaagcccggacaaaggcgcgctccaagtgtcgcgataagcgggctgatgttggcgagtttttttag

SEQ ID NO: 120908 - DNA, 57 bp, synthetic construct
  misc_feature 1..57: note = Description of Artificial Sequence: Synthetic coding sequence
  source 1..57: mol_type = other DNA
atgcccaagaataagaaaagaaataccccacatcgagggagctctgctgggggttag

SEQ ID NO: 120909 - DNA, 96 bp, synthetic construct
  misc_feature 1..96: note = Description of Artificial Sequence: Synthetic coding sequence
  source 1..96: mol_type = other DNA
atgcccaagaacaagaagaggaacaccccacacagaggcagttcagccggcgggggcggttctggagcagctgcagcgacagccgcaaccgcctag

SEQ ID NO: 120910 - DNA, 189 bp, synthetic construct
  misc_feature 1..189: note = Description of Artificial Sequence: Synthetic coding sequence
  source 1..189: mol_type = other DNA
atgcctaaaaacaagaaaagaaatacgccacaccgagggtctagtgcgggcggcggcggtagcggagcggcagccgccactgcggccaccgccggtgggcagcacagaaacgtgcagccattcagtgacgaagatgcttcgatcgagactatgagtcactgcagtggctattccgaccccagttcctag

SEQ ID NO: 120911 - DNA, 1206 bp, synthetic construct
  misc_feature 1..1206: note = Description of Artificial Sequence: Synthetic coding sequence
  source 1..1206: mol_type = other DNA
atgagccattgttccggctattcggatccatctagtttcgcagaagatgggccggaggttctggacgaggagggaactcaagaggatttagagtataagctgaagggactaatcgatttaacgctcgacaagagcgccaaaaccaggcaggctgccctggaggggattaaaaacgcccttgcatctaagatgctctacgagtttatcctcgagaggcgcatgactctaaccgatagtatcgaacgatgtttgaagaagggcaagtcagacgagcagcgcgctgcagcggcgctcgcatctgtgctgtgcattcagttaggccccggcatcgagagtgaggagatactgaaaaccttagggcctatcctgaaaaagatcatctgtgatggatccgcatccatgcaggcaagacagacctgcgccacatgtttcggcgtgtgctgcttcatcgcaactgacgacataaccgaactctactccacacttgagtgtctggagaatatattcacaaaaagctatctgaaggagaaggacaccacagtaatctgctccacccctaacaccgtattacacattagcagcctgctcgcgtggaccctgttgttgacaatctgtccaataaatgaggtgaaaaagaaactggagatgcattttcataaacttcctagcctgctgtcttgcgacgacgtgaatatgcggatcgctgcaggcgagtctcttgccctgttgttcgaactagcacgtgggattgagagtgatttcttctacgaggacatggaaagtcttacacagatgctgagggccctcgccacggatggaaataagcatcgcgctaaggtggacaaaagaaagcaacggtccgttttcagagacgtgcttcgtgcggtcgaggagagagactttcccactgaaaccatcaagttcggcccggaaagaatgtatatcgactgctgggtcaaaaagcatacctacgatacatttaaggaggtgctgggctccggcatgcaatatcatctgcagagcaacgagttcctgcgtaatgttttcgagctgggccctcctgtgatgctggatgcagcaacattgaaaaccatgaaaatctctaggtttgagaggcacctgtacaattcagcagcttttaaggcccggacaaaagcacgatcaaagtgtcgtgacaagcgtgcagacgtcggagagtttttttag

SEQ ID NO: 120912 - DNA, 474 bp, synthetic construct
  misc_feature 1..474: note = Description of Artificial Sequence: Synthetic coding sequence
  source 1..474: mol_type = other DNA
atgcacttccataaacttccgagccttttgtcatgtgatgatgtaaacatgcgaattgcagcaggcgagagtctggcccttctcttcgagttggcccgaggaatcgagtcagacttcttctatgaagatatggaaagcctgactcaaatgcttagagcactggcaaccgacggtaacaaacacagagccaaggtcgacaaacgcaagcagagatcagtgttccgagatgtgctcagagccgtggaggagcgagattttcccacagagactatcaaatttggcccagagagaatgtacatcgactgctgggtgaagaagcatacatacgacacatttaaagaggtgctaggaagcggtatgcagtaccacctgcaatctaatgagttcttgaggaacgtgttcgagctcggcccacctgtgatgctggacgcagcaacactgaaaacgatgaagatctcacggttcgagcgctag

SEQ ID NO: 120913 - DNA, 1827 bp, synthetic construct
  misc_feature 1..1827: note = Description of Artificial Sequence: Synthetic coding sequence
  source 1..1827: mol_type = other DNA
atgggtcccaaaaagtcttggcggtcccacttcttcccgttaccagaagtctggctactactcctgctcagccaggccctgtcacccagtcacggaccccagacccaggctggggtgggcctagtttggagcgtgccacttcctagtgcactgcgcagccaaagttgtctcggcgcccccctgcgcgatgctagtgaactgaccacagtgcacctcttccccaccaggggatggggtgcacgacgggcgctgtgggttcatagttccgccagcgccagttctgccgcctctcgccgaagattgcgcgctcaagcgtcaggcatctcctcgttcagcctggtcgatggaggagccccccgggaagatggaggtgccagaggcgtctggcttccctcgagtggacaggtgagcgcccaaagaacgggccgcaggctcgtggggctcgagccgacaccgacggggtcattgacaccccgtcccccccgccccgtgcctggcatgcctcgcgccagaaaaggcaacaccctcagaaaaggcggtcagcgacgaggaggtggcgctagatctagtgcccaggccgattccgggagcagcgatgacgaagccgccagtgaggcaaggtccacagccagcgaatgcccttcgctcctgtcaacaactgcagaagactctctgggcggcgatgtggtggacgagcagggtcaacaggaggaccttgaggagaaattgaaagaatacgtcgactgcttaacggacaaaagtgcaaaaacccgccagggagccttggaaagcctgaggctcgcattggcttcgagactgcttccggacttcttactagagcgcaggctgaccttagctgatgcattggagaaatgccttaaaaaggggaagggtgaagagcaggcccttgccgctgcagtgctggggttattatgcgtgcaactgggacccggacctaagggcgaggaactctttcactcacttcagcctctgctcgtgagtgtactaagcgactctaccgcctctccagcagcccgacttcattgtgcatccgctctcggacttggctgctacgtggctgcagccgatatccaagacttggtcagctgcctcgcctgcctcgaatcggtctttagccgcttttacgggctgggcggaagttcaacaagccctgttgtccccgccagtctgcacggcctcctgagcgctgctctacaggcttgggccttacttttgaccatttgtccatctactcagattagccacatcctggaccgacagcttccgcgtcttccgcagctccttagcagtgagagcgtgaacctgagaatcgccgcaggcgagactatcgcgctgcttttcgaactggcccgagatctagaagaagaatttgtgtatgaggacatggaagctctttgctctgtgctgcgaacactggctaccgactccaataagtatcgggccaaggcggatagaaggcgtcagcgctccaccttcagagccgttctgcacagcgtcgaaggcggagagtgtgaggaagagatcgttagattcggctttgaggtgctgtatatggattcatgggcgagacataggatctacgccgcattcaaggaggtcctgggaagtggaatgcaccaccacctgcagaataatgagctgctacgcgatatcttcggactcgggcccgttctgctgcttgacgccaccgccctgaaggcttgcaaagtgccgcggtttgaaaagcacttgtacaacgcagccgccttcaaggcacgcacaaaggcccggagcagggtaagggacaaaagagctgatattctgtag

SEQ ID NO: 120914 - DNA, 1329 bp, synthetic construct
  misc_feature 1..1329: note = Description of Artificial Sequence: Synthetic coding sequence
  source 1..1329: mol_type = other DNA
atgccacgcgcaaggaaagggaacacgcttaggaaaggaggacaaaggagaggcggtggagcccggtcatccgcacaagcagacagcgggagcagtgatgatgaagcggcttcggaggcacgcagcaccgcctctgagtgccctagcctgctgagtacaacggccgaggactcattaggtggcgatgtcgtcgatgaacaaggccaacaggaagatctcgaggagaagttaaaagaatacgtggattgccttactgacaagagcgcaaagacaaggcaaggtgctctcgaaagcttgaggctggctttagcatcgcgtctcctgcccgactttctccttgagagacggctaactctggccgatgctctggagaagtgtctgaaaaaaggtaaaggcgaggagcaggcgctggcagccgcggtactcggcctgctttgcgttcaacttggccctggccccaagggagaagaactgttccacagtctgcaacccctcctggtgtccgtgctttcagactccacagcgagccccgctgccagactgcactgtgcttccgctcttgggttaggatgctacgtcgcggccgcagacatccaagatttggtgtcttgcctggcatgcctggaaagcgtttttagccgcttttacggtctagggggatctagtacctcgccagttgtgcctgccagtttacacggcctgctgagcgcagctcttcaggcttgggctttactcctgactatctgccctagtactcaaattagccacatactcgaccggcagctgcctaggctcccccagctcctgtcatcggagagtgtgaacctccgcatcgctgctggggagacgattgctctgctctttgaactggcccgcgatctcgaagaggagttcgtctacgaggatatggaggctctgtgttcggtccttcgaacgctggctaccgacagtaacaaataccgggctaaagccgatcgcaggcggcagcggtctacgttccgggctgttcttcacagcgtcgaggggggggaatgtgaggaggaaatagtgaggttcggatttgaggtgttatacatggactcctgggcccgacatcgcatctatgccgcttttaaggaagtactgggaagcggaatgcatcaccacctgcagaacaacgaactgttgcgagacatattcggcctggggcccgtcctgctgctagatgccaccgctctgaaggcttgcaaggtacccagattcgagaaacacctgtataatgccgccgcgttcaaggcccggaccaaagcccgctccagggtgagagataaaagggctgatatactatag

SEQ ID NO: 120915 - DNA, 1521 bp, synthetic construct
  misc_feature 1..1521: note = Description of Artificial Sequence: Synthetic coding sequence
  source 1..1521: mol_type = other DNA
atggcttggaactctccttcccgccgtccggtgtggcaaggcggcgccccacgcgaggatggcggggctcgcggggtttggctgcctagttccgggcaggtgagtgcgcagagaacaggcaggagattagtgggactggagcccacgcctactggcagcctcactcctcgccccccacggcctgtgccgggtatgcccagggcacggaaagggaacactttgcgcaagggaggtcagcggcgaggtggcggtgcccgttcaagcgcccaggcagatagcggcagctctgacgatgaggccgccagcgaagctagatctacggcatccgaatgccctagccttctgagtaccaccgccgaggatagcttgggcggcgatgttgtcgacgagcaaggccaacaggaagacctggaggagaagttgaaagaatacgtcgattgcttgactgacaaaagcgctaagacacggcagggcgctctcgaatccctccgactggctcttgcaagcaggctgctgcctgacttcctccttgagaggcggctgacccttgccgacgcactcgagaagtgcctgaagaagggcaaaggtgaagaacaggccctcgctgccgccgttcttggtcttctctgtgtacagttgggcccggggccgaagggtgaggagttattccatagcctccagccacttctcgtgtctgtcctgtctgactccaccgcatcgcccgctgcgagactgcattgcgcatccgctcttggattaggatgttacgttgctgcagcggacattcaggatcttgtcagctgcctggcttgtcttgaaagtgtcttttctcggttttatggactgggaggctcttcaacgagcccagtggtcccagcctcccttcacggccttctcagcgccgcccttcaggcctgggccttattgttgaccatttgcccttcaacgcagattagccatatcctggacagacaactcccgcggctgcctcaactcctgtcctctgaatctgtgaacctccgtatagctgccggagagaccatcgcattgctgttcgaactggcccgagacctggaagaagagttcgtatacgaagatatggaggccctgtgctcagtactgcgcaccttggccacagacagtaataaatatcgagcaaaggcagatcgccggcgtcagcgaagcacttttagggcggtgctgcactcggtggagggtggtgagtgcgaggaggagattgtgcggtttgggttcgaagtactctacatggatagctgggcccgacaccgcatctatgccgccttcaaggaagtcttgggatcaggcatgcaccaccaccttcagaataacgaactgctgcgggatattttcggcctgggccccgtgctgctccttgatgcgaccgcacttaaggcctgtaaagtgcctagattcgaaaagcacctgtataacgccgccgcttttaaagctcgaaccaaggcccggagccgcgtccgcgataaaagagccgacattctatag

SEQ ID NO: 120916 - DNA, 1329 bp, synthetic construct
  misc_feature 1..1329: note = Description of Artificial Sequence: Synthetic coding sequence
  source 1..1329: mol_type = other DNA
atgcctcgggccagaaagggcaacaccctcagaaaaggcggccagcgacggggaggcggtgccagaagctcggcacaagcggattctggtagttcggacgacgaagccgcctcggaagcccggagtacagcttctgagtgccccagtctgctgtctactactgccgaggattctttgggaggcgacgtcgtggacgaacaggggcagcaggaggacctcgaagagaaactcaaggaatacgtggactgtctgaccgacaaaagcgccaagacgcgccagggagcgctggaatctctgaggctggccctggcaagccgactactccccgacttcctccttgaaaggcggttgaccctcgccgacgccctcgagaagtgtctgaaaaaagggaagggagaggagcaggcactcgctgctgctgttctgggccttctgtgtgtgcagttagggccaggccccaagggggaggagttgtttcacagccttcagccattgctcgtgtccgttctaagcgactctactgcttcccccgcagcaagactccattgtgcctctgccttggggttaggctgttatgtcgctgccgcagacatccaggaccttgtgagctgtcttgcttgtctcgagagcgtgtttagcaggttttatggactgggtggctcctctacgagccccgtggtaccagcctctctgcacggactgctctccgcagccctgcaggcctgggcattgctcctaactatttgtccgtcgactcagatcagccacatcctcgaccgccaactgcccaggctgccacagcttctgtccagcgaaagcgtcaacctgagaatcgctgcaggagagacaattgctttactcttcgaactggctagagacctggaagaagagttcgtgtatgaggatatggaggccctctgtagcgtgctcagaaccctcgccactgacagcaataagtatcgcgctaaggcggatcggcgtcgacagcgctccaccttccgcgccgtgctccacagtgtggagggaggcgagtgcgaagaggagatagttagatttgggtttgaagtattatatatggatagctgggcccgccatcggatttatgcagcctttaaagaggtcttggggtctgggatgcatcaccacttgcagaacaacgagctgctccgagatatttttggtttgggccccgttttgctcctcgacgccaccgctctgaaagcatgcaaggtgccacgatttgagaaacatctatacaatgcggcagcttttaaagcacggacgaaagcccggagcagggtgcgcgacaagagggctgacattctctag

SEQ ID NO: 120917 - DNA, 1713 bp, synthetic construct
  misc_feature 1..1713: note = Description of Artificial Sequence: Synthetic coding sequence
  source 1..1713: mol_type = other DNA
atgacgctgctctggtgtgtggtatcactgtacttctatggcatcctgcagtcagatgcctctgaacggtgcgacgactgggggttagacacaatgagacaaatccaggtcttcgaagacgagccggcccggatcaagtgccctctcttcgaacattttttaaagtttaactatagcacagcccatagtgccgggttaaccttgatctggtattggaccaggcaggaccgcgacttggaagagcccatcaatttccggctacctgagaataggatttccaaggaaaaagacgtcttatggtttagacccacgcttctgaacgatacaggtaactatacctgtatgctgaggaacaccacctattgctctaaggtcgcttttcccttggaggtcgtacagaaggacagctgcttcaattctcctatgaaattgccagtgcataaactctatatcgaatatggtattcaaagaatcacatgtcctaacgtcgatggatactttccatcttcggtaaagcctaccattacctggtacatgggttgttacaagattcagaattttaataatgtcattcctgaaggcatgaatttgagtttcctgattgcactgatttcaaacaacggcaattacacatgcgtagttacataccccgaaaacggaagaacctttcaccttacgcggacactgaccgtgaaagtcgtgggcagccctaaaaatgccgtgcccccagtgatccacagtcccaacgatcatgttgtgtacgagaaggagcctggggaagaactgctgattccgtgcacggtatacttcagctttctgatggacagcagaaatgaggtgtggtggaccatcgacggaaaaaagccagatgatattacaattgatgtaaccatcaatgaaagcatctcccactctcggactgaggacgagactagaactcagattctgtcaattaaaaaagtaactagcgaagaccttaagagatcgtacgtgtgtcacgcacggagtgctaagggggaagtggccaaagcagcaaaggtgaaacagaaagtgcccgcccctagatacactgttgagctagcctgcggctttggggctaccgtcttgctggtcgtgatactcatcgtggtttaccatgtgtactggctggaaatggtgctcttctatcgcgcacattttggaaccgacgaaacaattttggatggaaaagaatacgatatatacgtaagctatgccaggaatgccgaagaagaagaatttgtgctcctgacacttcggggggtgctggagaacgagttcggctacaaactgtgcatatttgatcgcgacagcttgcctggaggcatcgttacggatgagaccctgagttttatccagaagtctagacggctcctcgtagtgctcagcccaaactatgtgctgcagggcacacaggcacttctggaactaaaagctggtctggaaaatatggcttcacgtggcaacattaatgtgatattggtgcagtacaaggccgtgaaagaaaccaaagtgaaggagctgaagcgggccaagaccgtccttaccgtgattaagtggaaaggtgagaagtccaaatatccgcagggacgcttttggaagcaactccaggtggctatgccagtcaaaaagtctccaaggcggtccagcagtgatgagcagggccttagctattcaagccttaagaacgtttag

SEQ ID NO: 120918 - DNA, 2064 bp, synthetic construct
  misc_feature 1..2064: note = Description of Artificial Sequence: Synthetic coding sequence
  source 1..2064: mol_type = other DNA
atgacgctcctatggtgcgtggtctctttgtacttctacggaatccttcaatccgacgctagcgaaaggtgcgacgactggggcctggacacaatgcgccagatccaggttttcgaggatgagcctgctcgaattaagtgtccactatttgagcactttttgaagtttaactacagcacagcccacagcgccggcctgaccttgatttggtactggactaggcaagatcgtgatctcgaggagccgatcaactttcgattgcctgagaacagaataagcaaagagaaagatgtgctctggttcaggcctactctccttaacgacactggaaactatacctgcatgttgcgcaacaccacctattgctctaaggtcgcgtttcccctggaggttgttcaaaaagatagctgtttcaatagcccaatgaaactccccgtgcataaactttacatagagtacgggattcagcggatcacttgtccaaatgtcgatgggtactttccatcctcagtaaagccaaccatcacctggtacatgggatgttacaagattcagaatttcaacaatgtgatacctgagggtatgaacctgagcttcctgattgcattaatcagcaataatgggaactatacatgtgtggttacatatcctgagaatggcagaaccttccacctaaccagaactctgactgttaaggtggtgggtagcccaaaaaacgctgtgccgcctgttatacacagccccaacgaccatgtggtttatgagaaagaacccggagaagagctgctgatcccatgcacagtctacttttcttttctgatggacagcagaaatgaggtatggtggaccattgatgggaagaaaccggacgatattaccattgatgtcaccataaacgagtctatctcccacagtagaactgaagacgagacaaggacgcagattctgtccattaaaaaggtgaccagcgaggacttgaaaaggtcttatgtatgccatgcccgttcagccaagggcgaagtcgccaaagctgccaaggttaagcagaaggttcccgccccgcgatacacagtcgaactagcctgcggcttcggagccaccgtacttctggtggtgattttgatcgtggtgtatcatgtttattggctcgaaatggtgctgttttaccgggctcattttggaacagatgaaacaattctcgatggtaaggaatacgatatttacgtatcttacgctaggaatgcagaagaggaagagtttgtgctcctcaccctgcgaggggtcctggaaaacgaattcggctacaaactgtgcatcttcgaccgggattccttgcccgggggaaatactgttgaggcggtgttcgactttatccagcgctcacggagaatgatagtagtgttgagtcccgactacgttacagaaaaatccatatctatgctggagttcaagctgggagtaatgtgccagaatagcatagccacaaaacttatcgtggtggagtacagaccactcgaacacccccacccggggatcctccaattgaaagaatctgtctcatttgtttcctggaagggcgagaaaagcaaacacagcggcagcaaattctggaaggcccttcgcttagcccttcctctccgctctctctctgccagctccggatggaatgaaagttgctcaagtcagagcgatattagtttggaccacgtccagcgacgaaggtccagactcaaggagcctcctgagctacagtcctctgagagggctgctggttctcctcccgctccgggcaccatgtcaaagcacaggggcaagtcgtcagctacgtgtcgctgttgcgtgacctactgcgaaggtgaaaatcaccttagaaataaaagtagggccgagatccacaaccaaccccaatgggagacgcatctatgcaaacctgtcccacaggagtcagagactcagtggatccaaaatgggactagacttgaaccgcccgctccccagattagcgccttagccttgcaccatttcactgacctgagcaataacaacgacttctacatcctttag

SEQ ID NO: 120919 - DNA, 1713 bp, synthetic construct
  misc_feature 1..1713: note = Description of Artificial Sequence: Synthetic coding sequence
  source 1..1713: mol_type = other DNA
atgacactgttatggtgcgttgtgtccctgtacttttatggaattctgcagtccgacgccagtgagcgatgtgatgattggggcctggacactatgcgccagattcaggtgtttgaggatgaacccgcaaggattaagtgtcctctgtttgagcattttctgaagtttaattacagcaccgcccactccgccggtctgactctgatttggtactggactagacaggatagggacctagaggaaccaattaacttccggcttccagagaaccgtatctctaaggagaaggatgtcttgtggtttcgtcccacgctgctgaacgacaccggtaactacacgtgtatgctgagaaacaccacctactgcagcaaagtcgccttcccactggaagtggtacagaaggactcatgctttaacagtcctatgaagttgccagtgcacaagctgtacatcgaatacgggattcagaggattacttgtcccaacgtggatggctatttcccctcatccgtgaaaccaacgattacatggtatatgggctgctacaagatccaaaattttaacaatgtaattcccgagggtatgaacctgtctttccttatcgcactgatctccaataacgggaattatacatgcgtcgtgacataccctgagaatggcaggacttttcatttaacaagaactctgaccgtcaaggtggtagggtctccaaagaatgccgtgccccccgtgatccactcacctaatgaccacgtagtgtacgagaaggagcctggcgaagaactgttgattccatgcactgtgtatttctcttttttaatggattccaggaatgaggtatggtggaccatcgacgggaaaaagccagacgacataacgatcgatgtcacaatcaatgagagcatctctcacagcagaaccgaggatgagacaaggactcagatcctgagcatcaaaaaggtgacgtccgaagatctgaaaagatcatacgtgtgccatgccagatccgcgaagggagaggtcgccaaagccgccaaagtgaagcaaaaagtgcccgccccccggtacactgtagagctggcttgcggcttcggagctactgtgctgttagtcgtcattttgatcgtggtatatcacgtatactggctcgaaatggtcttgttttacagagcacattttgggacagacgaaacgatcctcgacggaaaggagtacgacatctatgttagttacgctaggaacgctgaagaggaggagtttgtcttgctgaccctaaggggtgtactggagaacgaattcggctacaagttatgtatattcgatcgcgactcactccccggcggtatcgttaccgacgagaccttatctttcatccagaagagtagaagactcttggtcgtactctccccaaattacgtgctgcagggaacacaggcccttttagaattaaaggccggccttgagaacatggccagcaggggaaacataaacgtgatactggtgcaatacaaggcagtgaaggagactaaggtcaaagaactgaagcgcgcgaagacagtgcttactgttatcaaatggaaaggcgaaaagtccaaatatcctcaagggagattttggaaacagctccaagtggcaatgcctgttaagaaatcaccacgtagaagcagttctgacgagcaagggttgagttattcatccctgaaaaacgtgtag

SEQ ID NO: 120920 - DNA, 1071 bp, synthetic construct
  misc_feature 1..1071: note = Description of Artificial Sequence: Synthetic coding sequence
  source 1..1071: mol_type = other DNA
atgactctgctgtggtgcgtggttagcctgtacttttacggcattcttcagtcagatgcctctgagagatgtgacgactggggccttgacaccatgcggcagattcaagtgtttgaagatgaacctgcaaggattaaatgcccactatttgagcatttcctgaagttcaactactctacagcccatagcgctggcctaacactaatctggtactggacccgccaagacagagacctggaggaaccaattaacttccggctgcctgagaaccggattagtaaggaaaaagatgtgctttggttccgccctacactcctcaacgatactgggaattacacttgcatgctcagaaatactacctattgctctaaagtcgcttttccactagaggtggtgcaaaaagatagctgctttaattcacctatgaagctacccgtccataagctgtatattgaatacggaatccagaggatcacttgcccaaacgtggatggatatttcccatcttcggttaagccaaccatcacctggtatatgggctgctataaaattcaaaacttcaataacgtcatacccgagggaatgaatctgagctttctcatcgccctcatctcaaacaatggcaactacacttgcgtcgtgacctaccctgagaacggccggacgttccacctcacacgcacgctgacagtgaaggtagttggttctcctaagaacgcggtgcccccagtgatccattctccgaatgaccatgtggtgtacgagaaggaaccgggagaagaactgctaatcccctgtactgtctactttagcttccttatggactcacgcaacgaagtgtggtggactattgatggtaagaagcctgatgacataaccatcgatgtcaccattaatgaatccatatctcacagcagaaccgaggacgagacgcgcactcaaatcctttctatcaagaaagtgacttcagaggacctgaaacggtcttatgtgtgtcatgccagatccgcaaagggtgaggtggcaaaggcagccaaggtgaagcagaaggggaataggtgtggtcagtag

SEQ ID NO: 120921 - DNA, 342 bp, synthetic construct
  misc_feature 1..342: note = Description of Artificial Sequence: Synthetic coding sequence
  source 1..342: mol_type = other DNA
atgaccctgctgtggtgcgtggtttctctgtatttttatgggattcttcagtcggacgctagtgagagatgcgacgattggggtttggacactatgcggcagattcaggtgtttgaagatgagccagcaaggatcaagtgccccctttttgaacacttcctcaagtttaactactctacagctcactccgcagggctgactttaatctggtattggacaaggcaagaccgtgacctggaagagcccatcaatttccgtctgccggaaaatcgcatctcaaaagaaaaagatgtcttatggttccggccaaccttgttgaacgacactgggaactatacttag

SEQ ID NO: 120922 - DNA, 1071 bp, synthetic construct
  misc_feature 1..1071: note = Description of Artificial Sequence: Synthetic coding sequence
  source 1..1071: mol_type = other DNA
atgacgctgctttggtgtgtggtgagtctctacttctatgggatactacaatcagatgcctccgaaaggtgcgatgattggggcctcgacacaatgcggcagatccaggttttcgaggacgaacccgccaggataaaatgccctctttttgaacacttcttaaagtttaactatagcacggcccacagtgccggtctgaccctgatatggtactggacccggcaagatcgcgatcttgaagagcccatcaacttcaggctccccgaaaatcgcatcagcaaggaaaaggacgtgctttggtttaggcccacgctgctgaatgatacagggaattacacttgcatgcttcggaatacaacctattgcagtaaggtagcctttcctttagaggtcgttcagaaagatagctgcttcaatagccctatgaaactccctgtgcacaagctttatattgagtatggtatacagcggatcacctgtcctaatgtagatggttacttcccttcctctgtcaagcccactatcacctggtatatgggctgttacaagatccagaattttaacaatgttatcccggaaggcatgaatctatcatttctgattgctctcatctccaacaatggcaactatacttgcgtcgttacctacccggagaacggcaggacatttcaccttacacgtaccctgaccgtgaaggttgtcggcagcccaaaaaatgccgtcccacctgtcattcattcacccaatgaccatgtcgtatatgaaaaggagcccggtgaagagttacttattccttgcactgtgtacttctcgttcctcatggattcacgcaatgaggtttggtggactattgatggtaaaaaaccagatgatattactattgacgtcacgatcaatgagagcatttctcactctcgaactgaagatgaaacacgaactcagattctttctattaagaaggtgacctcagaagacctcaagcggagctacgtttgtcacgcgcgcagcgcaaaaggcgaggtagccaaggccgccaaggtaaagcagaaggggaaccgctgtgggcagtag

SEQ ID NO: 120923 - DNA, 1713 bp, synthetic construct
  misc_feature 1..1713: note = Description of Artificial Sequence: Synthetic coding sequence
  source 1..1713: mol_type = other DNA
atgaccttgctttggtgcgtcgtatccctgtacttttatgggattcttcagagtgacgctagcgaacgttgcgacgactggggtcttgacacaatgagacagattcaggtctttgaagatgagcctgcacgaataaaatgcccactgtttgagcactttctgaaattcaattattctacagcccacagtgccgggctcaccctgatttggtactggacccgccaggatagagacctagaagaacccatcaacttcagattgcccgagaaccgtatcagcaaggaaaaggacgttttatggttccgtcctacacttctgaacgatactgggaactacacctgtatgttacggaataccacttattgctctaaagtggcgttccctcttgaggtggtgcaaaaagactcatgctttaacagtccaatgaaactgccagtccataaactgtatatagagtatggaatccagagaataacgtgtcccaacgttgacggctactttccaagctcggtaaagccaaccattacatggtatatggggtgctacaagattcagaactttaacaacgtgattccagagggcatgaatctgagcttcctgatcgcactgatcagtaacaacggaaattatacctgtgtggtgacctatcctgagaacggaagaacgttccatctgactagaactttgacagtgaaagtcgttggtagccctaagaatgctgttcctcccgtcatccatagtcctaacgaccatgtggtctacgagaaggagcctggcgaagaactcctcattccgtgtaccgtttattttagtttcctgatggatagtcggaatgaggtgtggtggacaattgatggcaaaaaacctgacgacattacaattgatgtgacaatcaacgagtccatcagccatagccgaactgaggacgagacaaggacgcagatactgtctattaagaaagtgacttcagaggatctgaaaaggtcttatgtgtgccacgcccggtcagcaaaaggtgaggtggcaaaggctgccaaggttaagcagaaagtccctgcgcctaggtatactgtcgagctagcctgtgggtttggcgcgacagtgttgcttgtggtcattctaattgtagtgtatcatgtgtactggctggagatggtgctcttttatcgggcccattttggtactgatgaaacaattctggacggaaaggaatatgatatctacgttagttatgcccggaacgccgaggaggaggaatttgtactccttacccttcggggagtcctggaaaacgagttcggctacaagctgtgtattttcgatcgtgactctctaccaggtggaatcgtaactgatgagacgctatctttcattcaaaagtccaggagactgctggttgtactgagtccaaattacgtcctccaggggactcaagccctgctggagcttaaggcaggtctggaaaatatggcctctagaggtaatatcaacgtgattctggtccaatataaagccgttaaggaaacgaaagtcaaggaactgaagagagccaagactgtgctgacagttatcaaatggaagggagaaaagtcgaagtatccccagggccgcttctggaagcagttacaggtggcaatgcctgtgaaaaagtcgcctcggcggtcttctagcgatgagcagggcctgtcctactcttcactgaaaaacgtatag

SEQ ID NO: 120924 - DNA, 2064 bp, synthetic construct
  misc_feature 1..2064: note = Description of Artificial Sequence: Synthetic coding sequence
  source 1..2064: mol_type = other DNA
atgacccttctctggtgcgtggtatccctgtacttctatggaattctccagtccgacgcctctgaaaggtgcgatgattggggcctggacactatgcgccagatccaagtttttgaggatgagccagcccgcatcaagtgccctctatttgagcatttcctgaaattcaactattctactgctcacagtgcaggattgacacttatctggtactggactcgccaggacagggacctcgaagaaccgatcaactttcgcctccccgaaaaccgcatcagcaaagaaaaggatgtactgtggtttcgtccaacactgttgaacgacacaggcaactacacctgtatgttaagaaacactacttactgttccaaggtcgcctttccgctcgaagtcgtccaaaaagattcttgcttcaacagtcctatgaagctgcccgtgcataagctgtacatcgagtacgggatccagagaatcacctgtccaaacgtggatgggtactttccaagtagtgtcaagcctacgatcacctggtacatgggctgttataagatccaaaacttcaataacgtgattccggaaggcatgaaccttagctttctgatcgctctgatttcgaataatggcaattacacttgtgtagtcacttaccctgaaaacgggcgtaccttccaccttacccggactttgacagtcaaggttgtcggaagcccgaagaacgcagtgccacccgtgattcacagccccaacgaccatgtcgtatacgagaaagagcctggtgaggagttgctgatcccctgtacagtttatttttccttcctaatggactcccgcaatgaggtctggtggactatcgacggaaagaagcctgatgatataaccattgatgtgacaatcaacgagtctatctcacacagccgaacggaggatgagacaaggactcaaatactgtccatcaagaaagtcaccagtgaagatcttaaacgaagctatgtctgccatgcgcggtccgcaaaaggcgaggtggccaaggcggcaaaagtaaagcagaaagttcctgcccctcgctatacggtcgagctggcttgcggcttcggggcaacggttttactggtggtgatattgatagttgtataccatgtatactggctggagatggttttgttctacagagcgcattttggaaccgacgaaaccatactcgacggaaaggagtacgacatctatgtctcctacgcaagaaatgccgaagaggaggagttcgtcctgcttactcttaggggggtcctggaaaatgaattcgggtacaaattgtgcatcttcgatcgagattctttacccggaggaaatacagttgaagcggtgttcgatttcattcagcggtctcgccggatgattgttgtcttatccccggattacgttacagaaaagagtatctctatgttggagttcaagctaggtgtgatgtgtcagaactctattgccaccaaactcattgtggtcgagtacaggcctctggaacatcctcaccccggaatcttgcagctgaaagagagcgtgtccttcgtctcatggaagggcgagaaatctaagcattcaggctccaaattttggaaagcactcagactcgccctcccccttaggtctctgtccgcttcgagcgggtggaacgagtcttgctcaagtcaatctgacattagccttgaccacgtgcagcgccggcgctctagactcaaggaaccacccgagttgcagtcgtcggagcgcgcagctggctcaccccccgccccaggaaccatgtccaagcataggggaaaaagcagtgctacatgcaggtgctgcgttacatactgcgaaggggagaaccacttgaggaataaatcacgtgcagagatacataaccagccgcagtgggaaacccacttatgtaagccggtgccccaggaatccgagactcagtggatccaaaacggcaccagactggagccaccagctccacaaatctccgctcttgcactacatcatttcacagatttaagcaataacaacgacttctacattttgtag

SEQ ID NO: 120925 - DNA, 1713 bp, synthetic construct
  misc_feature 1..1713: note = Description of Artificial Sequence: Synthetic coding sequence
  source 1..1713: mol_type = other DNA
atgaccctcctgtggtgcgtggtgagcctttacttctatggaattcttcagagtgatgcatccgagcggtgcgacgattggggactggacaccatgcgacagattcaagtcttcgaagatgagccggcacgtattaaatgccctctgtttgagcacttcctgaaattcaattactcaaccgctcattccgccggcttgacgctcatttggtactggacccgccaggaccgagatcttgaggaaccaattaactttaggctgccagagaacaggataagcaaggagaaggacgttctttggtttaggccaaccttactcaacgacacgggaaattatacttgcatgctccggaacactacgtattgcagcaaagtcgctttcccgcttgaggtcgtgcagaaagattcgtgttttaattcccccatgaaactgccagtgcataagctatacatcgaatacggaattcaacggatcacttgtcccaacgtcgacggttactttccgtcctctgtcaagcccaccataacatggtacatggggtgttataagattcagaactttaacaacgtgattcctgaaggcatgaacctttctttcctgatcgctcttatatcaaataatgggaactacacctgcgtagtcacttatcccgagaatggacgcacgtttcacctcacaaggaccctgaccgttaaagtagtcggcagtcctaaaaatgccgtgccacccgttatccactctccaaacgatcacgttgtgtacgagaaggagcctggagaagagcttctcatcccatgcaccgtgtatttttcattcctaatggattcgcgcaacgaggtatggtggactatagacggaaagaagccagacgatataaccattgacgtgacaatcaacgaatccataagccacagccgtactgaggacgaaacacgaacccagattctctcgatcaaaaaggtcacctccgaggacctcaagcggagctacgtttgccacgccaggagcgctaaaggggaggtggccaaagcagctaaggtgaaacagaaggtgcctgcgccacggtacaccgtggagcttgcgtgcggctttggagcaacagtcctcctcgtggtcattctgattgtagtttatcacgtgtattggctagagatggtgttgttctatcgggcccacttcggcactgatgagacaatcctggacggcaaagagtatgatatatacgtcagttacgcccgaaatgcggaagaagaggagtttgtgctcctgacattaagaggtgtcctggaaaacgaattcggatacaagctctgtattttcgatcgcgactcactccctggcgggattgtgactgatgagacactttccttcattcagaaaagcaggcgattactcgtggtcctgtcgcccaactatgtgctgcaaggcacacaggcactgctggagcttaaagccggtcttgagaacatggcaagtagaggcaatatcaatgttatactggtgcagtataaggccgtgaaggagaccaaagtcaaggaattgaagagagcaaagaccgtgttgactgtaataaaatggaaaggcgagaagtccaagtaccctcaaggcagattctggaagcagctccaagtcgcgatgcccgttaagaagtctccgcgcaggtcaagcagtgacgaacagggcctcagttattcatctctgaaaaatgtgtag

SEQ ID NO: 120926 - DNA, 438 bp, synthetic construct
  misc_feature 1..438: note = Description of Artificial Sequence: Synthetic coding sequence
  source 1..438: mol_type = other DNA
atgacattactctggtgtgtggtgagcctctatttctatggaattctgcagagcgacgcaagcgagcggtgcgacgactggggactggatacaatgagacagatccaagtttttgaggatgagcctgcacgtatcaagtgcccactgtttgagcatttcctgaagttcaattacagcaccgcccactctgccggactgacactcatttggtactggaccaggcaggaccgggatctggaggagccaatcaatttccgcctccctgaaaacaggatttccaaagagaaggatgtactctggtttagaccaacgctactcaatgacactggcaattatacttgcatgctgaggaatacaacctactgtagcaaggtggctttccccctcgaagtggtccaaaaggattcctgcttcaattcacccatgaaactgccatag

SEQ ID NO: 120927 - DNA, 2091 bp, synthetic construct
  misc_feature 1..2091: note = Description of Artificial Sequence: Synthetic coding sequence
  source 1..2091: mol_type = other DNA
atgaaggctcccattccacaccttattctgctgtacgcgacctttacacagtctttgaaggtagtcacgaagaggggcagcgcagacggctgtaccgactggagcattgatataaaaaagtaccaggtcctggtgggcgagccggtccggataaagtgcgccctgttttacggatacatccgaacgaactatagcctggctcagagcgccggtctgagtctcatgtggtacaagtcctcaggacccggagactttgaggaaccgatcgctttcgacggatcacgaatgtcaaaagaggaagattctatttggttcagacccacacttctccaggactccgggctgtatgcctgtgtcattcgtaattctacttattgcatgaaggtatccatctctttgactgtgggcgagaacgacacaggactttgttacaacagtaagatgaagtactttgagaaggctgaactgagcaaatccaaagagatctcgtgccgggacatcgaggactttttgctgccaacgagagaaccagaaatcctctggtacaaagaatgccgcaccaaaacttggcgtccctccatcgtattcaagcgcgatacactgttgatccgtgaggtgcgcgaggacgacataggcaactacacatgcgagcttaaatatggcggcttcgtggtacgtcggacaactgaactaacagtgaccgccccattgacagacaaaccgcccaagttgctgtaccctatggagtccaaactcacaattcaggagacccagcttggggattcagcaaatctgacttgtcgggcattctttgggtattccggagacgtcagtcctttgatctactggatgaagggagagaagttcatcgaggatctcgatgagaaccgcgtatgggaatcggatataaggatcctgaaggagcacttgggcgagcaggaggtgtccatttctctaattgtggactctgtggaggaaggtgacttagggaactattcatgttatgtcgaaaatggcaatgggcgccgccatgcctctgtcctgctccataagcgcgaattaatgtacaccgtggagttggccggcggtctgggggcaatccttctgctactagtgtgtctggtcactatttacaagtgctacaagatcgagattatgcttttttacaggaaccactttggggccgaggaacttgacggggataataaggattacgacgcctacctctcgtacaccaaggttgacccggatcagtggaatcaggagactggcgaggaagaaaggttcgcactcgagattcttcccgatatgcttgagaagcactatggatataaactgttcattcctgatagagatctcattccaactggcacatacattgaggacgtggctaggtgtgtggaccagtctaagcgactaatcattgtgatgaccccaaactacgttgtgcgcagaggttggtcaatttttgaactcgaaacacgtcttagaaacatgttggtgactggagagatcaaggtgatcctcattgaatgtagcgaattacgcgggattatgaattatcaagaagtcgaagctctaaagcacacaatcaaactcttaaccgtcatcaagtggcacggccccaagtgcaacaagttaaattctaaattctggaaaaggttacagtacgaaatgcccttcaaaaggattgagccaattacccacgaacaagctctagatgtgagcgagcaaggccccttcggagaactgcagaccgtttcagctatctcaatggccgccgcaacgtctaccgcgctggcaaccgcccatcccgacctgaggtcaactttccataatacttatcattcacagatgaggcagaagcattattaccgctcatacgagtacgatgtgccacctacgggcaccctgcccctaacatctattggcaatcagcacacgtactgcaacatacctatgacactgatcaacggccagaggcctcagacaaaatcaagcagagagcaaaaccctgatgaagctcacactaattctgctatcctgccattgctgcctagagagacatccatctcctcggtgatttggtag

SEQ ID NO: 120928 - DNA, 2091 bp, synthetic construct
  misc_feature 1..2091: note = Description of Artificial Sequence: Synthetic coding sequence
  source 1..2091: mol_type = other DNA
atgaaggctcccattccacacttgatcctgttgtacgccacattcactcagagtcttaaggtagtgaccaaacgaggcagtgcggatggatgcactgattggtccatagacatcaaaaagtaccaggtcttagtgggcgaacccgttcggattaaatgcgctttattctatggctacatccggacaaactactccctggcccagagtgctgggctgtctctgatgtggtacaaaagtagtggaccaggcgattttgaggaaccaatcgctttcgacgggtctagaatgtctaaggaggaagactctatttggtttcggccaaccctcctgcaagattcgggactttatgcctgcgtcatcaggaatagtacctactgcatgaaagtgtctatttcccttaccgtgggagagaacgatacgggcctgtgttacaactccaagatgaagtacttcgagaaagcagagttgtctaagagcaaagaaattagctgccgggacattgaggattttctgctgcccacacgggagcctgagattttgtggtacaaagaatgtaggaccaagacatggaggccatccattgtgtttaaacgcgacaccctcttgattagagaagtccgggaggacgatattggaaattatacctgcgagctcaagtacggcgggttcgtggtccgtaggactacagagctcaccgtgactgcacctctgaccgataagccacccaagctgctctacccaatggagagcaagctgactattcaggagacgcagctgggagactccgcgaatcttacttgccgcgccttttttgggtacagcggggatgtgtcgcctctaatctactggatgaaaggagagaaatttatcgaagacctggacgagaaccgcgtgtgggagagcgacattcgaattctgaaggaacacctaggagagcaagaggtgtccatcagtctgatagtagactctgttgaagagggggacctgggaaactacagctgctacgtggaaaacggcaatgggaggcgacatgctagcgttcttctccacaagcgagagctgatgtacaccgtggagttggccggtggcctgggcgccattctactgctattagtgtgtctggttaccatctacaagtgctacaaaatcgagatcatgctcttctaccggaatcactttggagctgaggagctcgacggcgacaataaagattatgatgcttatctcagctacaccaaagttgacccagaccaatggaaccaggagactggcgaagaagagaggttcgcacttgaaatccttccggacatgcttgagaagcattacggatataagctgttcattccagatcgggatcttatacccaccggcacttatattgaggacgtcgcgcgatgtgtcgatcagtctaagcggctgatcattgtgatgacacccaattatgtcgtgcgcagggggtggtctatctttgagctggagaccagattgcgcaatatgctggttacaggagagattaaggtgatcctgatagaatgctctgagcttcgcggcatcatgaactatcaggaagtggaagcccttaagcataccatcaaactgctgaccgttatcaagtggcacggcccgaaatgtaacaaattaaactcaaagttctggaagcggctccagtatgaaatgccctttaaacgtattgaacccatcacacatgagcaagctctggatgtgtcagagcagggaccctttggcgagttgcagaccgtgagcgcaatctctatggccgccgcgacaagtactgctctggccacagctcatcctgatcttcgttcaacttttcataacacctatcacagccagatgcggcagaaacactactacagatcatatgaatacgacgtgccaccgacaggcactctccccctgacctccatcggtaaccagcatacatattgtaacatccccatgactcttatcaacggacaacgcccacaaacaaaatcctcaagggaacagaacccagacgaggcgcacacaaactctgcaatcctgcccctcctgccaagagagacctcgatttcatctgtgatctggtag

SEQ ID NO: 120929 - DNA, 2061 bp, synthetic construct
  misc_feature 1..2061: note = Description of Artificial Sequence: Synthetic coding sequence
  source 1..2061: mol_type = other DNA
atgaaacctcccttcctcttggcactggtcgtctgctcagttgtgtcaactaatctgaaaatggtcagcaagagaaactcagttgacggttgtattgattggtcagtggatctcaagacctacatggctctggctggagagcccgttagggtcaagtgcgccttgttttattcatatatcaggacaaactatagcaccgcccaatcaactggcttgcgcttgatgtggtataagaacaaaggtgatctggaggaacccatcatcttcagtgaagtgcgcatgtctaaggaggaagatagtatttggtttcactccgccgaagcccaagatagcgggttctacacttgcgtgctgaggaacagtacctactgcatgaaggtgtccatgagccttacagtcgctgaaaacgaatcaggcctgtgttataacagtcggatccggtacctggaaaaatccgaagtgaccaagcgcaaagaaatatcatgtccagacatggacgactttaaaaagagcgaccaggagcccgacgttgtttggtacaaggaatgtaagcctaaaatgtggaggtccattataatccagaagggcaatgctctgctcattcaggaggtgcaggaagaggatggcggaaactatacctgtgagttgaaatatgagggcaaactcgtaaggcgaaccactgagctcaaggtcaccgccttgctgactgataaaccccccaaaccgctctttccgatggagaaccagccttcagtgatagatgtgcagctgggaaagcctctgaatattccctgcaaagccttcttcggctttagcggcgagtctggacctatgatttattggatgaaaggggagaaatttatagaggaactcgctggtcacattcgcgagggggagattagactgcttaaggaacacctgggggagaaggaagtggaattagccctgattttcgattctgtggttgaagccgatcttgccaactatacctgtcatgtggaaaatcgaaacggtcgtaagcacgcgtccgtgctgctcagaaagaaggatcttatatataaaatcgaactagccggggggctcggggccatctttttgcttctcgtactgcttgttgtgatttacaaatgttataacattgagctcatgctcttctatcgacaacatttcggtgccgatgagacaaacgacgacaacaaagagtacgacgcttacttgtcttacacaaaagttgatcaagacacactggattgcgacaatcccgaggaagagcagttcgccctggaagtgttacccgacgtacttgaaaagcactacggctataaactgttcataccagagagggacctgatacccagcggaacttatatggaggacctaactagatacgttgaacaaagccggcggctcataattgtcttgactccagattacattcttagacggggatggagtatttttgagctggagagtaggctgcacaacatgcttgtgtcaggagaaataaaagtgattctcatcgagtgtaccgagttaaaaggtaaagtgaactgccaggaagtggagtcactcaagcggagcatcaaactgctcagcctgattaaatggaaagggtcaaaaagttcaaagctgaactccaagttctggaaacaccttgtttacgagatgcccataaaaaagaaggagatgctcccacgctgtcacgtgctggacagcgctgaacagggactctttggtgaactgcaacccatcccatcaatcgcgatgaccagtacctctgccaccctcgtgtcctcacaggctgacttgcctgagttccacccttcagatagtatgcagatccgacactgctgcaggggatataagcacgaaataccagcgacgaccctgcctgtgccatctttagggaatcatcacacgtattgtaaccttcccctcaccctgttgaacggccagctgccgctgaataacaccctgaaagatacacaggagttccaccgtaactccagcctgctgccactgtccagcaaagagttgtctttcacatctgacatatggtag

SEQ ID NO: 120930 - DNA, 2061 bp, synthetic construct
  misc_feature 1..2061: note = Description of Artificial Sequence: Synthetic coding sequence
  source 1..2061: mol_type = other DNA
atgaagccaccttttctgttagcgttggtcgtgtgtagcgttgtcagcaccaacctgaagatggtatctaagcgaaattctgtggacgggtgtattgactggtctgttgacttaaagacatacatggccctggccggggagcctgtgcgtgtgaagtgtgcgctgttttattcatatattaggaccaactatagtaccgctcagtcaactggcttacggcttatgtggtataaaaataagggcgacctcgaggagccaataatattctccgaggtccgcatgtcaaaagaagaggactcaatctggtttcactctgcagaagcccaggacagtgggttttatacatgcgtgttaagaaactccacctactgtatgaaggtctccatgagtctcacagtggctgagaacgagtcagggttgtgctacaatagcaggatcaggtacctagagaagtctgaggtcacgaagcgcaaggaaatttcctgcccagatatggatgatttcaaaaagtccgatcaagagcctgacgtggtttggtacaaagagtgtaagcctaagatgtggaggtccattatcatccaaaaagggaacgccctcttgatccaggaggtacaagaggaggacggtggaaattacacttgcgaactgaaatatgagggcaaactggtacgtcgaaccaccgagctcaaagtgacagccctgctgactgacaaacccccaaagccgctattcccgatggaaaaccagccttcagtcattgacgtgcagttgggtaaaccattaaacattccctgcaaggcattctttggattttcaggggagtcagggcccatgatttattggatgaagggcgaaaaattcattgaagagctggccggccacattagagagggagagatacgtcttttaaaagaacatctgggggaaaaggaggttgaactggcattaatcttcgattctgtggtcgaagcagacctcgccaattacacgtgccatgtggagaacaggaatggccgcaagcacgcatcagtcttgctgagaaagaaggacctgatttacaagattgaactggctggcgggctgggagcaattttcctgcttctggttttgctagtagttatatataagtgctacaacatcgagttaatgctgttttaccgccagcatttcggcgccgatgagactaacgatgacaacaaggagtacgatgcttatcttagctatacgaaagtggaccaggatacactggattgtgacaacccggaggaagaacaattcgccttagaagtcctgcctgatgtcttagagaaacactacggatataaactgttcatcccagagagagaccttataccaagcgggacctatatggaggacctcaccaggtacgtggagcagagccggaggcttattatagtgctgacaccggactatatcttgcggcggggctggtctatttttgagctcgagagtcgactgcacaatatgctcgtcagcggggagattaaagtaatcctgatcgagtgcactgaactgaagggtaaagtgaactgccaagaggtggaatctctgaaacgctcaatcaaactgttatcactcatcaagtggaaggggtccaaaagctctaaacttaattccaaattctggaaacatctagtgtacgagatgcctatcaagaagaaggaaatgctccctcgctgccatgttctggatagcgccgaacaaggtctatttggggaactgcagcctattccttctattgcgatgacatcgacctctgccaccctggtatctagtcaggctgacctgcctgagtttcacccatccgattcaatgcagatcaggcattgctgcagaggctataaacacgagattcctgcgacaacactgcccgttccaagtctcggaaatcaccacacatactgcaatcttcccctgaccctcctgaatggccagttgcctcttaataatacactgaaagatacgcaggaatttcaccgcaattcctccctcctgccactgtcatccaaggagctatcattcacatcagatatatggtag

SEQ ID NO: 120931 - DNA, 876 bp, synthetic construct
  misc_feature 1..876: note = Description of Artificial Sequence: Synthetic coding sequence
  source 1..876: mol_type = other DNA
atgagggataacaaggaatacgacgcgtatctttcttatacaaaagtcgaccaggacaccctggactgcgataaccccgaagaagaacagtttgccctggaagtcctgcccgacgttctcgaaaaacactatggatataagttattcatcccagaacgggatctgatcccatctggcacttacatggaagacctcacccgttacgttgaacagtctaggcggcttatcatagtgttgacacccgattatatcctccgcagaggatggtccattttcgagctggagtcaaggctgcataacatgctggtttcaggcgaaataaaagttatcctgatcgaatgcactgagttgaaaggcaaggtaaattgtcaggaagttgagtctctcaaaagatccatcaaactcctaagtttgattaagtggaagggctcgaagtccagtaagctgaacagcaagttctggaaacatctggtctacgagatgcccatcaaaaaaaaggagatgttgcctaggtgccacgtgcttgatagtgccgagcaggggctgttcggcgaactccagcctatccctagtatcgctatgaccagcacatctgccacacttgttagcagtcaagcggatttacccgagttccacccaagtgacagcatgcagatccgccactgctgcagggggtataaacatgaaattcctgctactaccttgcctgttccgtcactgggcaatcatcacacctactgtaatcttcctctaacacttctgaacggacaattgcctctgaataatactcttaaggatactcaggagtttcacaggaactcctctttgctacccctgagttccaaggaattgtcctttacgtccgacatttggtag

SEQ ID NO: 120932 - DNA, 1197 bp, synthetic construct
  misc_feature 1..1197: note = Description of Artificial Sequence: Synthetic coding sequence
  source 1..1197: mol_type = other DNA
atgcttcgcctctatgtactcgtgatgggtgtgtctgcatttacgctccagcctgccgcgcacacaggggctgcgcgctcatgcagattccggggcaggcactacaaaagggaattccgattggaaggagagcctgtcgcgctgaggtgcccccaggtcccctactggttgtgggccagcgtttcccctcggatcaatctcacatggcataaaaacgatagtgccagaaccgtgcccggtgaggaagaaacccggatgtgggctcaggacggtgccctatggctgttgccagctctgcaggaggatagcggaacatacgtgtgtaccactagaaatgcatcttactgcgacaagatgtcaattgagttacgcgtgtttgagaatacagatgcctttttgccttttataagctatcctcagattctgacactttccacttcaggggttctcgtgtgccctgacctgtctgagttcacacgggacaagactgacgtaaaaattcagtggtacaaggactcattgttgctcgacaaagacaacgagaaattcctctccgtcaggggcaccacccacctgcttgtccacgatgtggctttggaggatgccggctactacaggtgtgttctgacctttgctcatgagggacaacagtacaacatcaccaggtctatcgagctgagaataaagaaaaaaaaggaggaaacaatacccgtcattatctcaccactcaagaccatatccgcatcattggggtctagactcactattccttgcaaagtcttcctcggcaccggtactccccttactacaatgctgtggtggactgccaatgacactcacatagagtccgcataccccggcggccgggtgaccgagggccctaggcaggagtattcagaaaataacgagaactacatagaggtcccacttatttttgaccctgttaccagagaggaccttcatatggattttaagtgcgtagtgcataacaccttatctttccaaactctgagaactacggtcaaggaagcctcatccacctttagctggggtatcgtgctggctcccctctccctcgccttccttgtgttaggtggcatctggatgcatcgtaggtgcaagcatcggacaggaaaggcagatggattgaccgtcctctggcctcaccatcaggacttccagagttaccccaagtag

SEQ ID NO: 120933 - DNA, 1197 bp, synthetic construct
  misc_feature 1..1197: note = Description of Artificial Sequence: Synthetic coding sequence
  source 1..1197: mol_type = other DNA
atgctgaggctgtatgtcctggtgatgggagttagcgcttttaccctccagcctgctgcacatactggcgctgccagatcgtgcagatttcggggacgacactataaaagagaattcagactggagggcgaacccgttgccctgcggtgtccacaggtgccctactggttatgggcaagcgtctcccccaggattaaccttacgtggcacaagaacgattccgcgcgcactgtgcccggagaggaagagacccgtatgtgggcccaggatggggctctgtggctgctgcccgctctgcaggaagattccggcacttacgtgtgcacaacccggaacgcctcctattgcgacaagatgagtatcgagctgagggtgtttgagaataccgacgccttccttcccttcataagctacccccagatccttaccctgagtacctcaggagtattagtctgtcctgacctctccgagtttacacgtgacaagactgacgtgaaaattcagtggtacaaggactctctcttgttagacaaagataacgaaaaattcctgtcggtcagagggaccacacacctcctagtccatgacgtagcgttagaggatgcagggtactacagatgtgtccttacctttgcccacgaggggcagcaatacaacatcacccggtctatagaactgcgcataaagaaaaaaaaagaagagacaatccccgtcattatatctccattaaaaaccatctcagcctccttgggctctcgacttaccataccttgtaaggtgttcctgggaaccgggacaccactcaccaccatgttatggtggactgccaacgacacccacattgagtccgcctatcccggggggcgtgtcacagaggggccacgacaggaatattcagagaacaatgagaattatatcgaagtgcctttgatattcgatcctgtgaccagagaggacttacatatggacttcaaatgcgtcgtgcacaacacactgagtttccagactctgcgtactaccgtcaaggaagctagttctaccttttcctggggcatcgtcctcgctcccttaagcctggcatttctcgtgctgggggggatttggatgcatcgccgctgcaaacataggaccggaaaagccgacggcctcactgttttgtggccccatcaccaggatttccagtcataccctaaatag

SEQ ID NO: 120934 - DNA, 690 bp, synthetic construct
  misc_feature 1..690: note = Description of Artificial Sequence: Synthetic coding sequence
  source 1..690: mol_type = other DNA
atgctgaggctgtatgtgttggtaatgggagtttctgcattcactcttcagcctgcagcccatactggggcagcccggtcctgcagatttcgcgggaggcattataaaagggaatttcggttagaaggcgaaccagtggcactgcgatgcccacaggtgccctactggttgtgggctagtgtcagcccgcggataaatctgacctggcacaagaatgacagcgcaagaaccgtccccggggaagaagaaactcgtatgtgggctcaggacggcgccctgtggttgctgccggctttgcaagaagactccggcacttatgtctgcaccaccaggaacgccagctattgcgacaagatgtctatcgaattgagggtgttcgaaaatacggatgctttcctgccattcatctcttacccccagatcctgacgctaagcacctctggcgttttggtttgtcctgacctcagtgagtttaccagagataaaaccgatgttaagatccagtggtataaagactccctgctgttggataaagacaacgagaaatttttgtcggtcaggggaactacacacttactcgtacacgatgtcgctttagaggacgctgggtactacaggtgcgttctgacctttgcccatgagggccagcagtacaatatcacgcgtagcatcgaactgcgaataaagtag

SEQ ID NO: 120935 - DNA, 1098 bp, synthetic construct
  misc_feature 1..1098: note = Description of Artificial Sequence: Synthetic coding sequence
  source 1..1098: mol_type = other DNA
atgctgcctccgttaccctctagactgggcctgttgctgctgttactgctgtgtcccgcccacgtgggagggctatggtgggcagtgggctctccccttgtaatggacccaacctccatttgtaggaaagccaggagattggccgggagacaagcggagctttgccaggccgaaccagaggtggttgcagaactcgctagaggggccaggctcggagttcgggaatgtcaatttcagtttcgctttagaaggtggaattgctcctctcattccaaagcctttggcaggattctgcagcaggatataagagagacagcctttgtgttcgctatcaccgccgctggcgcgtcccatgccgtgacccaagcttgcagcatgggagagctactccaatgcgggtgtcaggccccacgtggccgggcccctccacgcccaagcggcctccctggaaccccaggcccccccgggccggcggggtctcccgaaggatctgcagcttgggaatggggcgggtgcggagatgatgtcgacttcggcgacgagaaatcacggttattcatggacgcacgccacaaaagaggtagaggggacatccgagctctcgtgcagctgcataacaacgaggcgggtaggctcgccgtgcggtcccatacaagaaccgagtgtaagtgtcatgggctaagcgggtcatgtgccttgcgcacctgctggcagaagctgcctccctttcgggaggtgggtgcccgattgttagaacgctttcacggagccagccgtgtaatgggcaccaatgacggaaaggcactgttgcccgcggtgaggactttgaagccaccggggagggccgaccttttatatgctgccgactctccggacttttgcgcccccaacagacgaactggatcccccgggaccagggggcgagcctgcaatagtagcgcgccagaccttagcggatgtgatctgttgtgttgcggaaggggccacagacaagaaagcgtgcaattagaggagaactgtctctgtcgctttcattggtgctgcgtggtgcaatgtcatagatgtcgagtgcgaaaagagctgtccctgtgcctgtag

SEQ ID NO: 120936 - DNA, 987 bp, synthetic construct
  misc_feature 1..987: note = Description of Artificial Sequence: Synthetic coding sequence
  source 1..987: mol_type = other DNA
atggggttctggatcctggctattcttaccatcctgatgtactctacagccgccaagttctctaagcagagctggggcttagagaatgaggcgcttatcgtgcggtgcccacgtcagggcaaaccaagttacacagtagattggtattacagccaaactaataaaagcatccctacccaggagcggaatcgggtctttgcatcagggcagctgcttaagtttctgccagcagccgtggccgacagcggtatctacacttgtattgtgaggtctcccacatttaatcgcacagggtacgccaacgtgaccatctacaagaaacagtccgactgcaacgtacctgactacctgatgtatagcaccgtgtctggaagcgagaagaatagtaagatttattgtcccactatagatctatataattggactgcaccgctggagtggtttaagaactgtcaggctctgcagggctctcgatatcgggctcataagtcgttcctcgtaattgacaatgtaatgacagaagatgccggagattatacatgtaagtttattcacaatgaaaacggagccaattattccgtgactgcaacgcgatcctttactgtgaaagatgagcagggcttttcgttgtttccagttattggcgcccctgcgcagaatgaaataaaagaagtggaaattgggaaaaatgctaacctgacgtgctccgcgtgtttcgggaagggcacccagtttctggcagcagtgttatggcagcttaacggtacgaaaattacagacttcggagagccccggattcagcaggaagaagggcagaatcagagcttttccaacggtctcgcatgccttgacatggtgcttagaatcgccgatgtcaaggaagaggacctgctactccagtatgactgcctggccctaaacctacatggtctccgcaggcacactgtgaggctgagtagaaaaaacccctctaaggagtgtttttag

SEQ ID NO: 120937 - DNA, 780 bp, synthetic construct
  misc_feature 1..780: note = Description of Artificial Sequence: Synthetic coding sequence
  source 1..780: mol_type = other DNA
atgggattctggatcctcgccatactcaccatactcatgtactccacagctgctaagttttcaaaacagagttggggtctggagaatgaagcactgatagtgcgctgcccgcggcagggcaagccttcctataccgtggactggtactactctcagacaaacaaatcaatccccacacaggaaagaaatagggtctttgcctcgggccaacttctgaagttccttcccgccgcggtggccgactcaggcatctacacatgcattgtgcggtccccaaccttcaatagaaccgggtatgccaacgtgacaatctacaaaaagcagtccgactgcaatgtgcctgactatctgatgtactcaacagtttctgggtcagaaaaaaacagtaaaatttattgtccaactatcgacctgtacaactggactgcaccactggagtggtttaaaaattgtcaagctttacaggggagccgttatagggcccacaagagtttcctcgttattgacaacgtgatgacagaggatgccggggactacacttgcaagtttattcataacgagaatggggccaattattccgtaaccgcaacccgtagttttaccgttaaggtttggtgtcaatctttctgtaaacttaagaagtcgctgattttctcaaatacgcactggatccagtctctcatgcgaggttttgtaatggtgtattacggcgtgcacaagtgttgtcgagtggtcttcaatctgtgtttacagtatttccagcaccatcagtggccgtag

SEQ ID NO: 120938 - DNA, 636 bp, synthetic construct
  misc_feature 1..636: note = Description of Artificial Sequence: Synthetic coding sequence
  source 1..636: mol_type = other DNA
atgtattcaactgtcagcgggtccgagaaaaactctaaaatctattgtcctaccatagatctgtataattggactgctccactggagtggtttaagaactgtcaggcacttcagggtagcaggtacagagctcataagagcttcctagtaattgataatgtgatgactgaagatgccggggactacacctgtaagtttatccataatgagaacggagccaactactccgtgaccgcaaccaggtcttttacggtgaaagatgagcaaggatttagtctttttcctgtcattggggctcctgctcagaatgaaatcaaagaggttgaaattggaaagaatgcaaacctgacatgctctgcttgctttggcaagggcacacagttcctcgccgcagtattatggcagctgaacggcacaaagatcactgatttcggggaaccacggatccaacaagaagaaggacaaaatcaaagcttctctaatggcttggcatgcctggatatggttttgaggatcgccgacgttaaggaagaggacttgctgttacagtacgattgcctcgctctgaatctgcacggcttaaggcgacacactgtgagattgtcaagaaagaacccatcgaaagaatgcttctag

SEQ ID NO: 120939 - DNA, 945 bp, synthetic construct
  misc_feature 1..945: note = Description of Artificial Sequence: Synthetic coding sequence
  source 1..945: mol_type = other DNA
atggggttctggattctcgccatcctaactattctcatgtattctactgccgctaaattttctaagcagagttggggtctggaaaatgaggccttaattgtgagatgtccacggcaaggaaaacccagttatacggtggactggtactactctcagacaaacaagagcatacccactcaggaacggaacagggtcttcgctagtggccagctgctgaagtttctgcctgctgctgttgctgactctggtatttacacatgcattgtgcggtcacctactttcaacagaaccgggtacgctaatgtgacaatatataaaaagcagtctgattgcaatgttcctgattatctgatgtattcaacagtttcggggtcagagaaaaacagcaaaatctactgccccaccatagatctctacaattggaccgcaccacttgagtggtttaaaaactgccaggcgctgcagggttcccgttatcgggctcacaagtctttcctcgtcatagataacgtcatgacagaggatgccggtgattacacgtgcaagtttatccataacgagaatggcgctaactacagtgtgaccgctacaaggagctttaccgtaaaagatgaacaggggttttcgctgttcccggttattggagcacccgcccaaaatgagattaaggaggtcgaaatcggcactcagttcctcgccgctgttctctggcagttgaatggcacaaagatcactgatttcggcgaacccagaatccagcaagaggaagggcagaatcagtctttttccaatggtttagcatgtctggacatggtgctgcggatcgccgatgtgaaggaagaagatctgctgctgcagtacgattgcttggcgttgaacttgcatggcctcagaagacatacagtacgtctttctagaaaaaatccatccaaggaatgtttctag

SEQ ID NO: 120940 - DNA, 117 bp, synthetic construct
  misc_feature 1..117: note = Description of Artificial Sequence: Synthetic coding sequence
  source 1..117: mol_type = other DNA
atgggcttttggatcctggctatacttacaatactcatgtacagcacagccgcaaagttttccaagcaatcgtgggggctcgagaatgaagccctgattgtgcgttgcccaaggtag

SEQ ID NO: 120941 - DNA, 1728 bp, synthetic construct
  misc_feature 1..1728: note = Description of Artificial Sequence: Synthetic coding sequence
  source 1..1728: mol_type = other DNA
atgtggtctcttctcctctgcgggttaagcatcgccctgcctctctccgttaccgccgacgggtgtaaggatatattcatgaagaacgaaatcttgtcagcttcccagcccttcgctttcaattgtacctttccgccgatcaccagcggggaagtttccgtcacttggtacaagaattcctccaaaattccggttagtaagattatccaatcccgcatccaccaagacgaaacctggatcctattcctgcccatggagtggggcgactcgggcgtatatcagtgtgtcattaaaggaagagactcctgccatcgcattcatgtcaacctcactgtatttgaaaaacactggtgtgatacaagtatcggaggcctgcccaacctctcggatgagtacaaacagatcctgcacctgggcaaggatgatagcctgacatgccacttgcactttcccaaaagctgtgtgctaggccctatcaagtggtataaagattgcaatgaaataaaaggagagcgattcacagtactggaaactcgcctgttagtgtctaacgtgtccgctgaggaccgaggcaactatgcctgtcaggcaattctcacacattctggcaaacaatacgaggtgttgaacggcataacggttagcatcactgaacgcgcaggctacggggggtcagtccccaagataatttatccgaagaaccatagcatcgaagtgcagctgggtactaccctaatagtggattgcaacgttaccgataccaaagataataccaatctgcggtgctggcgcgtgaataataccctggtcgatgactactatgacgagagtaaacgcatcagggaaggggtcgaaacccatgttagtttccgtgagcataacctgtatacggtgaatatcacgttcttggaagttaagatggaagattacggcctgccgttcatgtgtcacgccggcgtttcaacagcctatatcatcctgcaactcccagctcccgacttccgagcatatctgattgggggcctgatcgcacttgtggctgtggccgtctcagtcgtgtacatctataacatctttaagatcgatatagttctgtggtatcgcagcgctttccactcgactgagaccatcgtggacggtaagttgtatgacgcctatgtgctgtatcctaaaccccataaggagtcccaaaggcatgccgttgacgctctagtccttaacatcctgccggaggtgttagaacggcagtgtggatacaagttgtttattttcgggagggatgagtttcctggccaggccgtggctaacgtcattgatgaaaatgtgaaactgtgcaggcggctcattgtcatcgttgtgcccgagagcctcggatttggcctcctgaagaacttgtccgaggagcagattgccgtgtactcagcccttatccaggatgggatgaaagtgatcctgatagaactagagaaaattgaagactacaccgtgatgcccgagtcaatccagtacatcaaacagaaacatggcgcaatcaggtggcatggtgatttcacagagcagtcccagtgtatgaagactaaattttggaaaacggtcagataccacatgcctccacgtagatgccgccctttcccccctgtccaattgttacagcacacaccttgttacagaactgctggaccggaactcggcagtagaagaaagaaatgcacgctaacaactggctag

SEQ ID NO: 120942 - DNA, 519 bp, synthetic construct
  misc_feature 1..519: note = Description of Artificial Sequence: Synthetic coding sequence
  source 1..519: mol_type = other DNA
atgtggtcgctgctgctctgcgggctttcaatagccttaccgctgtcagttactgctgacgggtgtaaggacatcttcatgaagaacgaaattctttccgcctcccagccgtttgcattcaactgcactttcccgccaataacctcaggcgaggtgagcgttacttggtacaagaactccagcaaaatccccgtgtccaagatcattcaatccaggattcaccaagatgaaacgtggattctattcctgcccatggaatggggggattcaggagtgtaccagtgcgtgatcaaggggcgcgatagctgccaccgaattcacgtgaacctaaccgtgttcgagaaacattggtgtgatacatccatcggcggactgcctaatttatccgacgaatacaagcagattctccacctaggcaaggatgactctctgacctgccacctgcactttccgaaaagctgtgtgctcggccccataaagtggtacaaggactgtaacgagataaagggcgagaggtag

SEQ ID NO: 120943 - DNA, 1374 bp, synthetic construct
  misc_feature 1..1374: note = Description of Artificial Sequence: Synthetic coding sequence
  source 1..1374: mol_type = other DNA
atgactgggctggtttctctttcatattttccattatctactcgttcctgtgcactgcagagctgctctccggtgtggggttgcggtccttgctgcagcgcagggtgcccatcccccttccactgcctgagccagcaggactgtaacgaaatcaaaggcgaacgatttacagtgctcgagacccgtctgttggtctcaaacgtctccgccgaggatcgaggaaactacgcgtgccaggccatcttgactcactctggaaagcagtatgaagtgctcaatggaattaccgtgagtatcaaaagggccggatacggcggtagtgtgcctaaaattatttaccctaagaaccactccatagaggtccagcttggaaccacgttaatcgtggactgcaacgtaaccgacactaaagataacacaaatctgcggtgctggcgtgtcaacaacactctcgtcgacgactattatgacgagtcaaagcggatccgggagggagtggagacacatgtgtcctttcgggagcataatctctacacagtgaacatcactttccttgaggtgaaaatggaggattacgggctccccttcatgtgtcacgctggcgtatcaacggcgtatataatcctgcagctgcccgccccagacttcagggcatacctgatcggcgggctcatcgcactggtggcagtggccgtgagcgtggtttacatttataacatcttcaagatagacatcgtactgtggtatcgatcagcttttcacagcacggagacaatcgttgatggcaagctctatgatgcttacgtgctgtatcccaagccacacaaggaaagccagagacatgccgtggacgctctggttctgaatatcctgcccgaagttctggaaagacagtgcggctacaagttatttatttttggcagggatgagttccctggccaggccgtggccaacgtgattgacgaaaacgtgaagctctgccgcagactgatcgtcatcgtggtacccgaaagcttaggtttcggactccttaagaacctgtctgaggagcaaattgccgtgtatagtgcgcttattcaggacggtatgaaggtgattctgatcgagttggaaaaaatcgaagactacaccgtgatgcctgagagtattcagtatataaaacaaaagcacggggcaattcgctggcacggcgacttcactgaacaaagccagtgtatgaagaccaaattctggaagacagtccgctatcacatgccccctaggcggtgtagaccctttccgcctgtgcagctgctccagcatacgccatgctaccgaacggccggcccagaattgggatcccggcgaaaaaaatgcaccctaaccactgggtag

SEQ ID NO: 120944 - DNA, 1728 bp, synthetic construct
  misc_feature 1..1728: note = Description of Artificial Sequence: Synthetic coding sequence
  source 1..1728: mol_type = other DNA
atgtggtccttgttgctatgcgggctctcaatagccttgcctttatctgtgaccgccgatggctgcaaggatatcttcatgaagaacgaaattctcagcgcatcccagccttttgccttcaattgcacctttcctccaatcacgtccggtgaggtgagcgtgacctggtacaagaacagtagtaagatacctgtcagcaagatcatacagagccggattcatcaggatgaaacatggatattgtttctgcctatggagtggggcgactccggagtgtaccagtgtgtcattaagggaagagattcatgccacaggatccacgtcaacctgacagtcttcgaaaagcactggtgtgatacaagcatcggaggactgcctaatctgagtgatgagtacaagcagattctgcatctcggcaaagacgactcgttgacctgccacttgcactttcctaagagctgtgttttgggccccattaagtggtacaaagattgcaatgagattaagggtgagcgctttacggtgctggaaacgaggctcctggtttccaacgtgagcgcggaagatagaggtaattatgcctgtcaggccattttgactcactcgggcaaacagtacgaggtgcttaacggcattaccgtatccattaccgagagagccggttacggcggatccgtccccaagattatataccccaagaaccactccattgaggtccagctagggaccacacttattgtggactgtaatgtgacagacactaaggacaacacaaacttgaggtgctggcgggtgaataacactctggtcgatgactactacgacgaatccaaacgcatccgagagggggtggaaacccacgtctcattccgcgaacataatttgtacacagtgaatatcacgtttctggaagtgaagatggaagattacggcctcccatttatgtgccacgcgggggtttctacagcctacatcattcttcagttgcctgcgccggacttccgggcatacttgattggtggtctgatagccctcgtagccgtagctgtgtcggtagtgtacatctacaacattttcaagatcgatatcgtactctggtaccggagtgccttccatagcacggagacaattgtggacgggaaactctatgacgcttatgttctataccccaaaccccacaaggagtctcagcggcacgctgtggacgcactcgttctgaacatcctgcctgaggtcttggaaaggcaatgcggatacaaattattcatattcgggagagacgagttcccagggcaggccgttgccaacgtaatagatgagaacgtgaaactatgtcgtcggttaattgttattgttgtccctgagtccttgggattcggcctgctgaaaaatctcagcgaagaacagatcgctgtctactcagcactcattcaagatgggatgaaagtcatcttaatcgaactggaaaaaattgaagattataccgtcatgcccgaatcaatccagtatatcaaacagaagcatggagcaatccggtggcacggagattttacagagcagtctcagtgtatgaaaaccaagttttggaagaccgtcagataccacatgccacctaggcggtgcaggccgttcccgccagtgcaactgctgcaacataccccgtgttataggacggccggccctgaattggggagccggcgtaagaagtgtactcttacaaccggctag

SEQ ID NO: 120945 - DNA, 300 bp, synthetic construct
  misc_feature 1..300: note = Description of Artificial Sequence: Synthetic coding sequence
  source 1..300: mol_type = other DNA
atgcaacctagagtactcctggtggttgcccttctcgcgctcctggcctcagcgagagccagcgaggctgaggacgcttctctcttgagcttcatgcaaggttacatgaaacatgctaccaagacagctaaagacgcactcagttctgttcaagagagtcaagtcgctcagcaagcacgagggtgggtgactgacggatttagctcgttgaaagactactggtctaccgtgaaagacaaattctcggagttttgggatcttgaccctgaggtgcggcccacaagtgcagtcgccgcttag

SEQ ID NO: 120946 - DNA, 1500 bp, synthetic construct
  misc_feature 1..1500: note = Description of Artificial Sequence: Synthetic coding sequence
  source 1..1500: mol_type = other DNA
atgtcccggactgagctgcccagtccccctagcgtttggtttgaggcagaatttttccaccacatcttgcattggaccccgattcccaaccagtccgaatcaacgtgctatgaggtggctctcttgaggtatggcattgaatcctggaattcaatctccaactgcagtcagacactttcatacgatcttactgcagtaacgctggacctctatcattcaaacggctaccgcgccagagtgagagccgtagacgggtcccggcacagcaactggaccgtgaccaacacccggtttagcgtcgatgaggtcactctcacagtcggctcggtgaacttggaaattcacaacggttttatcctgggcaagatccaactgccccgacccaagatggcgccagctaatgatacctatgaatctattttcagtcactttcgtgagtacgagatcgctatccgaaaagtccccggcaattttaccttcacgcataagaaggtgaaacacgaaaatttttccctgctgactagcggcgaggtgggagagttctgtgtccaggttaagccatcagtggcttcacgttcaaacaagggtatgtggagtaaggaagagtgcatctcactgacacggcagtacttcacggtgaccaacgtgattatattctttgcctttgttctcctgctatccggagcactagcctactgtttagctcttcaactctacgttaggcgccgcaagaaactgccaagtgttttactgttcaaaaaaccttcgccattcatctttatctctcagcgtccctctcccgagacccaagacactattcacccccttgacgaggaggcctttctgaaggtgagtcccgagctgaaaaatctggacttgcatggatcgactgacagtgggttcgggtctactaaacccagtctccagactgaggaacctcaatttctactgccagacccccatcctcaggccgaccggacactggggaacagagagccccctgttctaggcgactcgtgtagcagcggcagcagtaacagcaccgatagtgggatctgcctccaggagccctctcttagcccaagcactggacctacttgggaacagcaagtgggcagcaacagtcgggggcaggacgatagtgggattgacctcgtccagaacagcgaaggccgggccggcgacacgcaagggggaagcgcacttggccatcactcacccccagaacccgaggtccccggagaggaggacccagctgccgttgccttccaaggttacttgaggcaaactcgatgcgccgaggagaaagcgactaaaaccggatgcctcgaggaggaaagtcctctgacagacggtctcgggccgaaatttggtaggtgtctcgtggacgaagccggtctgcaccctccagcgctagcgaaaggctaccttaaacaggaccccctggagatgactttggcatcatccggccccaatggcaccgtagagcccgcccactag

SEQ ID NO: 120947 - DNA, 1677 bp, synthetic construct
  misc_feature 1..1677: note = Description of Artificial Sequence: Synthetic coding sequence
  source 1..1677: mol_type = other DNA
atgagtcgcactgaactcccctcaccaccctccgtttggttcgaggcagagtttttccatcacattcttcactggactcctattccaaatcaatccgaaagcacgtgttatgaggtggctctgctgagatacgggatagagagttggaactccatcagcaattgctcccagaccctgtcttatgatctcacagccgtgactctcgacctgtaccactccaacggatacagagcccgagtccgggcagttgacggctctagacacagcaattggactgtgaccaacaccaggttttcagtggacgaagtgaccctcacggttggatcagttaatttggaaattcacaatggttttattctcggcaagatccagcttcctagaccaaaaatggctccagccaacgacacctatgagagtatcttttcacattttcgggagtatgaaatagcaatcaggaaagtcccaggaaatttcacatttacgcataaaaaagttaagcacgagaatttctcccttctcaccagcggggaagtcggcgagttctgcgtgcaagtaaagccaagtgttgcgagtaggtccaacaaggggatgtggtccaaagaagagtgtatctctttaaccagacagtattttacagtcacgaacgtgatcatcttcttcgcctttgtgctgctccttagcggcgccctcgcctactgcctggccctccagctttacgtcagaagaaggaaaaagctgcccagcgtgctcctgttcaaaaagccttccccattcattttcatctcccagagaccctctccggagactcaagataccatccatcctctggacgaggaggccttcctcaaggtgtctcccgaactaaaaaacctggacctgcatggaagcactgacagtggtttcggcagcactaaacctagtctgcagactgaggaaccccagttcctgttgcccgaccctcatcctcaggcagatagaacccttgggaacagagagccaccagtgctgggagactcctgctccagcggaagttccaactcaacggattctggcatctgtctgcaggagccttccctgtccccgagcactggtccaacctgggagcagcaggtcggaagtaactcaaggggacaggatgacagtggcattgatttggtgcagaatagcgagggacgagccggcgatacacagggaggttccgcgttaggccaccattccccgcctgaacccgaagtgcctggagaagaggaccccgcggcagtggccttccaaggctacctaaggcaaactcggtgcgccgaggaaaaggctacaaagactggatgcttagaagaggagtccccactgacggacggacttgggccaaaatttggccggtgtttagtggacgaagccggacttcacccgcctgcactcgccaaaggttatctgaagcaggatcctctggaaatgacattagccagcagtggggcacccaccggtcaatggaaccagccaaccgaggagtggagtctcttggcattgagcagctgctccgatcttgggatctccgactggtcctttgcacacgacctggctccacttggttgtgttgctgctcctggaggcctgctaggttccttcaattctgacctcgtgacactcccacttatcagttccctacagtcgtctgagtag

SEQ ID NO: 120948 - DNA, 1290 bp, synthetic construct
  misc_feature 1..1290: note = Description of Artificial Sequence: Synthetic coding sequence
  source 1..1290: mol_type = other DNA
atggcgcccgccaatgatacatatgagtcgattttctcccattttcgggagtatgaaatcgcaattcgaaaagttcccgggaactttacatttacacacaagaaggtgaagcatgagaatttctccctactcactagcggggaagtgggcgagttttgcgttcaggtgaaacccagcgtggccagccggtctaacaagggaatgtggtccaaagaggaatgcatatcactgacgcggcagtactttaccgtcactaatgtgattatctttttcgctttcgtgctgctgctgtcaggggctttggcatactgcttggctctgcagctgtacgttcggaggagaaaaaaattaccttctgtgctgttgttcaagaaacccagcccgtttatatttatttcccagcggccaagccccgaaactcaggatacgattcaccccctggacgaggaggcctttttgaaagtgtctccggagctgaaaaacctcgatctgcacgggtcaactgactccggctttggcagtactaagcccagtctccagaccgaggaacctcagttcttactgcccgacccccatccacaggcagaccgcacgctggggaacagagagccgcccgtcctgggcgattcatgtagctcaggttctagcaatagtacagacagcggaatctgtctacaagagccgagcctttccccatccaccggcccaacttgggagcagcaagtgggctccaattcaaggggccaggatgattctgggattgacctcgtccagaattctgagggacgcgccggcgacacccaaggcggtagcgctttaggccaccatagcccacctgagcccgaggtaccaggcgaagaggaccctgctgcggtagccttccaaggctacctgcgacaaacacgctgcgcggaggagaaggctactaaaaccgggtgtttggaggaagagtccccactgaccgacggtctaggccccaagtttggtagatgtctggtcgatgaagccgggcttcatccccctgctctggctaaaggttacctgaaacaagaccccttagagatgacactggcctcctcaggggcaccaactggacagtggaaccagcctactgaggaatggtccctcctggcgctgagctcttgttctgatctgggaatttctgactggtcctttgcccacgatctagcgcctctggggtgtgtcgccgctcctggtggccttctcgggtcgttcaactccgacctggtgactctgccgctcatttcctcattgcagagctctgaatag

SEQ ID NO: 120949 - DNA, 1269 bp, synthetic construct
  misc_feature 1..1269: note = Description of Artificial Sequence: Synthetic coding sequence
  source 1..1269: mol_type = other DNA
atgagctcatcctgcagcggcctttcccgagtgctggtggctgtcgccactgcgctggtgagtgcttcaagcccatgtcctcaggcctgggggccccccggggtacaatatggtcagccagggagaagtgtgaagctgtgttgtccaggcgtcaccgccggcgacccagtgagctggtttagagacggggagcctaaattactacaagggccggacagtggcctaggccacgaactggttctggcccaagccgactccactgacgagggcacttacatctgtcagacgctggacggagctctgggtggtacggtgaccctgcagctgggatacccacctgcacgacctgtagtctcatgtcaagctgcggactacgagaatttctcctgcacctggtcgccttcccagataagcggactgcccacacgctatctgaccagctataggaagaagacagtgctcggagcggatagtcaaagaagaagcccctctactggaccctggccctgtccccaagatccactgggcgcagcacgctgcgtcgtccatggggccgaattctggagtcagtaccgaattaatgttaccgaggtaaacccattaggtgccagtaccaggcttttggatgtctccctgcagagcatcctccggcccgaccctcctcagggcttgcgtgtcgaatctgtcccagggtaccctcgccgtttgcgggccagttggacatacccagcatcttggccgtgccagccacactttttactcaagttcaggctgcagtaccgcccggcccagcaccccgcatggtctacagtggaaccagctgggctggaagaggttataactgatgcagtggccgggctccctcacgcagtgcgggtcagcgccagagacttcctcgatgccggaacatggagcacttggagtcctgaggcatggggcacgcccagcaccggcaccatcccgaaagaaatccccgcctggggccagctgcacacacaacctgaagtggagccacaggtggactcgcctgccccccctaggccgtcccttcagccgcatccacgcctgctcgatcaccgggatagtgtagaacaagtagctgtgcttgcgtctttaggcatcctgtcatttctgggactcgtagccggcgcactcgccctgggcttgtggctgaggttgcgacgcgggggtaaggacgggagcccaaaaccagggtttcttgcatcggtgatacccgtggaccggagaccaggcgctccaaacctgtag

SEQ ID NO: 120950 - DNA, 1173 bp, synthetic construct
  misc_feature 1..1173: note = Description of Artificial Sequence: Synthetic coding sequence
  source 1..1173: mol_type = other DNA
atgagtagctcatgctccggccttagtcgagtgctggttgcggtggccacagccctggtgagcgcctcttccccttgccctcaggcatggggccctcccggggtccaatacgggcaacctggtcggagtgtcaaactgtgttgccccggcgtaacagcaggtgatccagtcagttggttcagagacggcgagcccaagttgctccagggaccggattccggactaggtcacgagcttgttcttgcccaggccgattcgacagacgagggcacctatatctgccaaactcttgacggagctctagggggcacagtcaccttgcagctcggctacccgcccgcacgccctgtggtgtcttgccaagcagcagattatgagaatttttcctgcacctggagtccttcccagatcagcggcctgccaactcgatacttgacaagctaccgaaagaagaccgttctgggtgccgattcccagaggcgcagcccatccaccgggccctggccttgcccccaagacccactgggagctgcccgctgtgtcgtacatggcgccgagttctggtctcagtacaggatcaatgtcaccgaggtgaaccccctgggcgcttctactaggctgctggacgtgagccttcaatctatccttcgacccgaccccccccagggcctgagagtggagtctgtgcccggttacccacggcggctgcgcgcctcctggacctaccccgcaagttggccctgccagccacactttctactgaaattcagactacagtatcgacccgcacaacaccccgcatggagtacagtggagcccgccggcctagaggaagtgatcaccgacgccgttgctggacttccgcatgctgtgcgagtgagcgcacgagacttcctggacgccggaacgtggagtacatggagcccagaagcctggggaacccctagcaccgggacaatacccaaagaaatccctgcttgggggcagctgcacacgcaaccggaggttgagccccaggtggacagtcctgcaccccctaggccaagcctccagcctcacccaagactgctggatcatagagactctgtcgaacaggtggcagtcctcgcctccctgggcatcctgagttttctgggtctagttgcgggcgccttggccctcgggctatggtag

SEQ ID NO: 120951 - DNA, 1269 bp, synthetic construct
  misc_feature 1..1269: note = Description of Artificial Sequence: Synthetic coding sequence
  source 1..1269: mol_type = other DNA
atgtcttcaagctgctccgggctttctagggttctggtggcagtagcaacagccctggtgagcgcatcttctccatgcccccaagcctggggaccgcccggcgtccagtatgggcaaccggggaggtctgtgaagttgtgctgtccaggtgtaactgctggagatcccgtgtcatggttcagggacggtgagcctaagcttctgcagggcccagattccgggctggggcacgaactggtgttggcccaggcagatagtactgatgaggggacctatatatgccagacgttagatggcgcactaggagggacagttactttgcaactggggtatccacccgcccgcccagttgtgagttgccaggcagctgactatgaaaattttagctgcacttggagcccaagccagatcagcggattacctacgaggtatctgacctcataccgaaaaaagaccgtcctcggtgctgactctcaacggcggtccccctccaccggcccctggccatgtccccaagacccattaggagccgcaagatgcgtggtacacggcgcagaattttggagccagtaccgcatcaacgtcaccgaggtaaatccattgggcgcctctactaggctactggatgtcagtctgcaaagtattctgcgccctgatcccccacagggattgagagtggagtctgtgccaggctatccacgccggctgagggcctcatggacctaccctgccagctggccttgtcaacctcattttctgctgaagtttcgccttcagtaccgccccgcacagcacccagcctggagcaccgtggaaccagccggccttgaagaagtcatcactgacgccgtcgcaggtctgccccacgccgttagggtatctgctcgggattttcttgacgcgggaacctggagcacctggagccctgaagcatggggaacccccagtaccgggacaatccccaaggagatccccgcttggggacagttacatactcagccagaggtggagccccaggtggattctcccgccccacctcggccttccctccaaccacatcctagactcctggaccacagggattctgtcgaacaagtggcagtgctagctagcctgggtattttgagctttttgggtctggtcgccggcgcgctcgccctgggcctgtggctaaggctccgcaggggggggaaggatggctcacccaagccgggattcctcgcttcagtgattcctgtggatcgtagaccaggcgcccccaatctctag

SEQ ID NO: 120952 - DNA, 1269 bp, synthetic construct
  misc_feature 1..1269: note = Description of Artificial Sequence: Synthetic coding sequence
  source 1..1269: mol_type = other DNA
atgagctcaagctgcagtggactgtcccgcgttctcgtcgctgttgcaaccgcgcttgtgtccgcctctagcccctgccctcaggcatggggccctcccggcgttcagtatgggcagcccggccggtctgttaaactttgttgtcctggagtcaccgcaggtgaccccgtgtcctggtttagagatggcgagcccaagctgttgcaaggacctgacagcggactggggcatgaattagtgctggctcaagctgactcaaccgatgaaggcacttacatctgtcaaacactcgacggcgccctcggtggtactgtaactcttcagctaggctaccctccagccaggcctgtggtgtcgtgtcaggccgcggactatgagaacttctcgtgtacttggagtccaagccagatttcaggattgcctacaagatatcttacctcatacagaaagaaaaccgttctgggagcagacagtcaacgcagatcgccatcaacaggaccatggccatgcccacaggacccactcggcgctgcacggtgtgtggtgcacggagcagagttctggagccagtaccggataaacgtgaccgaagtgaaccccctcggggcctctacgagactgctggacgtctcattacagagtatactccgaccggatcccccacaggggcttagggtggagtcagtcccaggatatccacggcggctgcgcgcatcctggacctaccctgctagttggccatgtcagccacactttctgcttaaattccgcctgcaatacaggccggcccagcaccccgcttggtccactgttgagcctgctggcctggaggaggtgatcacagacgccgtggcaggtctgccccacgcagttagggtgagcgcccgcgacttcctggacgcggggacttggtctacttggtcaccagaggcctggggcaccccttctacaggaaccatccctaaggagattcccgcatggggacagctacacactcagcctgaggtggaacctcaagtagactcccctgctccaccccgcccctctctccagccacatcctagactcctggaccacagagacagtgtggagcaagtcgcggtgctggcttcactgggcatactgtctttccttggcttagtggcaggggcattggcactgggactttggcttcgtcttcgccgggggggcaaggatggcagtccgaaacccggctttttagcttcagtgataccggttgatcggcgacccggggctcctaacctctag

SEQ ID NO: 120953 - DNA, 813 bp, synthetic construct
  misc_feature 1..813: note = Description of Artificial Sequence: Synthetic coding sequence
  source 1..813: mol_type = other DNA
atgtcgtcttcctgctcaggcttaagccgggtgctcgttgctgtcgccaccgctttggtaagcgcctcctccccatgtccccaggcatggggaccccccggggtccagtacggacagcccggaagatctgtgaaattgtgttgccctggcgtgacggctggagatcccgtctcatggttccgggacggcgaacccaaactactccaaggtccagactccggattaggacacgaactggtcctcgcacaggcggacagcacggacgagggcacgtacatttgccaaaccctggacggcgctcttggggggaccgtcacactacaactggggtaccctcccgctcggcccgtggtgtcttgccaagccgccgactacgagaatttctcatgtacatggtccccaagccagatctccgggttacccactagatatctgaccagctacagaaaaaaaacagttcttggggcagactcccagcgtagatcaccatcgaccggcccctggccctgtccacaggatcctctgggcgcggctagatgtgttgttcatggtgcagagttctggtctcagtatcgcatcaatgttacagaagtaaacccactgggggccagcacccgcctgctggatgtgtcgctccaatctatcctgagaccagaccccccacaaggacttagggtagagtccgtccctggttacccacgccgcttacgggcatcttggacatatcccgcgtcatggccctgtcagcctcatttcctgctcaaattccggttgcaatatcggcctgcccagcaccctgcctggtcaacttag

SEQ ID NO: 120954 - DNA, 504 bp, synthetic construct
  misc_feature 1..504: note = Description of Artificial Sequence: Synthetic coding sequence
  source 1..504: mol_type = other DNA
atgtccagttcctgctctggactgtctagggttctcgtggctgtcgctacagcccttgtgtccgcttcatctccgtgtccgcaggcttggggaccacctggcgtccaatatgggcaacccggcagatccgtcaaattgtgttgtcctggagttaccgccggagaccctgtatcttggtttcgagatggagaacctaagctcctccaagggcctgactcaggtctgggacatgaactcgtcctcgctcaagcagactccaccgacgagggtacgtatatatgtcaaacgctcgatggagccctgggcggcaccgtcacactgcagctggggtatccgccggctcgtcctgtcgtgtcctgccaggccgctgactacgagaatttcagctgtacctggagccctagccagatctcaggtttgcccactcggtatctgactagttatcggaagaagacagtgctcggagcggactcccaacgtcgcagcccttcgacagggccttag

SEQ ID NO: 120955 - DNA, 420 bp, synthetic construct
  misc_feature 1..420: note = Description of Artificial Sequence: Synthetic coding sequence
  source 1..420: mol_type = other DNA
atgagcagttcttgcagcggactgagcagggtgctcgttgccgtggcgaccgctctggtgagtgccagttcaccgtgtccacaggcttggggtcctcccggcgtacagtacggccagccggggcgaagtgtgaagttgtgctgcccgggggtgacagctggcgatcccgtctcctggtttagggatggagagcccaaactcctccagggccccgactccggcctgggacatgagctggttctcgcccaggctgatagcacagatgagggtacctacatctgtcagacactggatggcgcccttggggggaccgtgacccttcaattagggtacccccccgccaggcccgtagtctcttgccaggccgcagactatgaaaacttttcctgcacttggtccccgtcccagatcagtggttag

SEQ ID NO: 120956 - DNA, 1989 bp, synthetic construct
  misc_feature 1..1989: note = Description of Artificial Sequence: Synthetic coding sequence
  source 1..1989: mol_type = other DNA
atggagcccctggtgacatgggtggttccactcctgttcttattcctactcagcaggcagggggcagcatgcaggacaagcgagtgctgcttccaggatccaccataccccgacgctgactcgggaagtgccagcgggccaagagacctcagatgctaccgcattagttcagaccgctacgaatgctcctggcagtacgagggccccacagccggtgtgtcacacttcctaaggtgctgcttgagtagtggccgctgttgctactttgccgccggtagcgccacccgactccagtttagcgaccaggctggggttagcgtcttgtataccgtgacactctgggttgagtcttgggctaggaaccaaactgaaaagtcacccgaggtaacactgcagctttacaacagtgtcaaatacgagcctccactgggcgacattaaggtcagcaagctggctggtcagttacgcatggagtgggagacgccggataaccaggtaggcgctgaggtgcagttccgccataggacccccagttccccttggaaactcggcgactgcggcccccaggacgacgacacggaatcttgtctgtgtccccttgagatgaatgttgcccaggagttccagcttcgcaggcggcagctgggtagccagggctcttcttggtcaaagtggagctcgcccgtttgtgtgccccccgagaaccctccacaaccgcaggtaagatttagcgtcgagcagcttggccaggacggacggcggcggctaactctgaaggagcagccaacccagctggaattgccggaggggtgccagggcctcgcaccgggcactgaggttacataccgcctccagctccatatgctcagttgcccctgtaaagctaaggccactcgcactctgcaccttggtaaaatgccgtatctcagcggcgctgcttacaacgtcgcagtaattagctccaatcagttcggccccggactgaatcagacatggcacattccagccgatacacacaccgaacccgtggcattaaatattagcgtcgggaccaatggcaccacaatgtactggcccgctcgtgcgcagagcatgacctactgcattgagtggcagccagtgggtcaagacggtggcctggccacctgctctttgactgccccccaggatcctgaccccgcaggtatggcaacctactcttggtcaagggagagcggggccatgggccaggaaaagtgctactatattactatattcgcgtctgcccaccctgagaaactgacactgtggtctacagtcctctccacctatcatttcggaggcaacgcctctgcggccggaacacctcaccatgttagtgtgaaaaaccacagcctcgatagcgtatcagtcgattgggcaccatctctactcagcacatgtcctggtgtgctgaaagagtacgtcgtgcgctgtagagacgaagacagcaagcaagtgagcgagcaccctgtgcagcccactgagactcaagtgacgcttagtggcctacgcgctggggtcgcgtacaccgtgcaagtgcgggccgataccgcatggctgcgaggagtatggagtcagccacagcgcttttcaatcgaggtgcaggtctccgattggcttatcttctttgcctcgctgggctcatttttgtccattttactggtcggggtgctaggctatttagggctgaaccgggccgccaggcatctatgtccccctctccctacaccctgcgccagtagcgcgatcgagttccctgggggtaaggagacttggcagtggataaatccagtcgatttccaggaggaagcttcgctccaggaggctctcgttgtggaaatgtcgtgggacaagggcgagagaacagaacccttggaaaagactgagttgcccgaaggagcacccgagcttgctttagatacagagctgtcgctcgaggatggggacagatgcaaagccaagatgtag

SEQ ID NO: 120957 - DNA, 1146 bp, synthetic construct
  misc_feature 1..1146: note = Description of Artificial Sequence: Synthetic coding sequence
  source 1..1146: mol_type = other DNA
atggagcctctggtgacctgggtggtaccactactgttcctgtttctactgtctaggcagggcgcagcctgtaggacatcagaatgttgttttcaagaccccccctatccagacgccgatagcggctcggcgagcgggcctagagatctgcgatgctaccgaattagctctgatcgctatgagtgcagttggcagtacgaaggaccaactgcaggcgtgtctcacttcctcagatgttgcctctcaagcggacgctgctgctatttcgccgccggatccgccacacgcctacagttctccgaccaagccggcgtctctgtcctttacacggtcacactttgggtggaatcatgggcacgcaaccagacagaaaagtctcctgaagtgacattgcaactgtacaactctgtcaaatacgaacctcctctgggggacattaaggtgagcaagctagccggccaactgcgcatggagtgggagacgccagataaccaggtgggggccgaggttcagttccgacaccggactcccagctccccgtggaaactgggtgactgcggaccacaggatgatgataccgaaagctgcctgtgccccttagagatgaacgtcgctcaggagtttcagctgaggcgcaggcagctgggatcacagggatccagctggagtaagtggtcatccccagtctgtgtgccccccgagaacccacctcagccccaggttcgcttcagtgtggagcagttgggccaagatggcagaaggcgtctgaccctgaaagagcagcccacccagctggaattgccagaaggatgtcagggcctggcccctggcaccgaagtgacgtaccggttgcaactgcacatgctcagctgcccatgcaaggccaaagcaaccagaacactccatctgggtaaaatgccatacctctccggtgcagcctacaacgtcgccgtcattagctctaatcagttcgggccaggactgaaccagacctggcacatacccgcggatacacatactgatggtatgattagcgcccattgcaacctgcggctgcctgatagccgtgactcacctgcttctgcaagcagggtggctggaatcaccggaatctgccaccacacccgccttatcttgtatttctag

SEQ ID NO: 120958 - DNA, 1989 bp, synthetic construct
  misc_feature 1..1989: note = Description of Artificial Sequence: Synthetic coding sequence
  source 1..1989: mol_type = other DNA
atggaaccactggtcacctgggtggtgccattgctcttccttttcctgctctcgagacagggggccgcgtgtcgcacttcagaatgttgttttcaagatccaccttacccagacgctgactcgggctcagcatcgggcccgcgcgacttgaggtgttatcgcatttcttccgatagatacgagtgttcgtggcaatacgagggccccacagccggcgtaagccatttcctgagatgttgcctcagttctggacgttgttgttattttgccgccggctctgctacacgactgcagttttcggaccaggcgggagtgagcgtcctttacacggtgaccctctgggtcgagagctgggcacgcaaccagacagagaagagccctgaggttactttgcagctctacaacagcgtgaagtacgagcctccgcttggcgacatcaaagttagcaaactggctggacagctgaggatggaatgggagactcctgataatcaggtcggcgcagaggtccagttccgtcacaggacaccttccagtccttggaagctaggcgattgtggcccccaagacgacgatacggagtcttgcttatgccccctcgagatgaacgtggcccaggaattccaactcaggcgcaggcagctcgggagtcaggggtcctcctggtcaaagtggtcctctcccgtgtgcgtgcctccggagaatccacctcagcctcaggtgagattttcagtggaacagctcggtcaggatggcagaaggcgactgacactcaaggagcaacctacccaactagaactgcctgaaggatgccaagggctggcccctggcactgaggtcacttaccgactgcaactgcacatgctgtcgtgcccctgcaaggccaaagctacccggaccctgcaccttggcaaaatgccttatctatccggggcggcctacaacgttgccgtcatctcatccaatcagttcggccctggcctgaatcagacatggcatattccagcagacactcatacagaacctgtagcgctcaacatcagcgttggtaccaatggcacgacaatgtattggccagccagagcacaaagtatgacttattgcatcgaatggcagccggtgggccaggacggcggcctggcaacctgcagcctgactgccccgcaggaccccgaccccgcagggatggccacatatagctggtcccgggaaagcggcgccatgggccaagaaaaatgttactatatcactatatttgcttctgcccaccccgagaagctgaccctgtggagtaccgtgctctcgacttaccattttgggggtaacgcctccgcagctgggactccccaccacgtgagtgtcaaaaatcatagcttggattcagtgagtgtggattgggcaccatcactgctgtccacttgccccggggttttgaaggaatatgtcgtcaggtgcagggatgaggactcaaaacaggtcagtgaacaccctgtacagccgactgagacgcaagtgactttgagcggcctgcgcgccggtgtggcctatacagtgcaggtcagggctgacaccgcgtggcttcgaggtgtttggtcccagcctcagagattctcaattgaggtgcaggtatcagactggctgatctttttcgcaagcctggggtccttcctgagcatcctgcttgttggagtcctgggatatctgggtttgaaccgtgctgccagacacctttgtcctcccctgcctaccccctgtgcctcatccgccattgagttccccggcgggaaagaaacatggcaatggattaaccccgtcgattttcaggaagaagcaagtctccaggaggccctggtggtcgaaatgtcatgggacaaaggagagagaacagaacccctagaaaaaacagaactcccagaaggtgcccctgagctcgcccttgacaccgagttgtccctggaggatggtgacaggtgcaaggccaagatgtag

SEQ ID NO: 120959 - DNA, 2589 bp, synthetic construct
  misc_feature 1..2589: note = Description of Artificial Sequence: Synthetic coding sequence
  source 1..2589: mol_type = other DNA
atggcacacacattccgggggtgctccctggcgttcatgtttatcattacctggctgctgattaaagccaagattgatgcatgcaaacggggcgatgtgacagtcaagccgtcacatgtgattctcctgggcagcacagttaacataacctgttccctgaagccgaggcagggctgctttcactatagcagacgaaacaaactgatcctatataagttcgacaggcggatcaattttcatcatgggcattccttgaattctcaagtgaccggacttcccttaggcaccaccttgttcgtatgcaaacttgcttgtattaatagcgatgaaatccagatatgtggggcagagatctttgtgggagtcgcccctgagcagcctcagaatctctcctgtattcagaagggcgagcagggcactgtggcttgtacgtgggagagagggagagacactcatctgtacaccgagtatactcttcaactgagcggtccaaaaaatctaacttggcagaagcagtgcaaggatatctactgtgattatttagattttgggatcaacctgacacctgaaagcccggagagcaacttcaccgccaaggtaacagcagtgaactccctcggctcttctagttcactcccttctacgttcacctttctcgacatagttaggccattgcccccttgggatatcagaatcaagtttcagaaggcttctgtctcacgatgcactctttactggagggacgaagggttggtcttgctgaataggctccgctacaggccaagcaactccagactttggaatatggtgaatgtgacaaaggccaaagggcgccacgatctgctggatctgaagccttttacagaatatgagtttcagatttccagcaaattacacttgtacaagggaagttggtccgattggagtgaatccctaagggcgcaaaccccagaggaggagccgaccggtatgctggatgtgtggtatatgaagcgtcacatcgattactcccggcagcagatctctttattttggaaaaatctttccgttagtgaagctagagggaagatcctgcattaccaggtgaccctgcaagaacttaccggcggcaaggctatgacacaaaacattacaggccataccagctggacgaccgtaatccctcgcactggcaactgggcagttgcggtgtccgctgccaattctaaggggagttcgctaccaacaaggatcaacatcatgaatttgtgcgaggcaggacttctggcaccccgccaggtgtccgctaatagtgagggaatggacaatatcctagtgacgtggcagcccccacggaaggacccgtccgcagttcaagagtatgttgtcgagtggcgcgaactgcatcccggcggggacacccaagtccccttaaactggttaagatcaaggccctataacgtcagtgccctaatatctgagaacattaaatcttatatctgctacgagattcgggtttatgccctcagcggagatcaaggtggttgttcttcaatactggggaactcgaaacacaaggccccgctgagcgggccccatatcaatgcaataaccgaagagaagggttctattctgatctcctggaatagtatcccagtgcaggaacagatgggatgcctgctgcactaccgtatctactggaaggaaagagactcgaactcccaaccccagctctgtgagatcccttatagggtgagccaaaacagccacccaattaatagtctgcaaccccgggtcacctatgttttatggatgactgccctgacagccgccggcgaaagtagtcacggcaacgagcgcgagttctgtctgcagggcaaggccaattggatggctttcgtggcgccgagtatatgcattgcaatcattatggttgggatattttcgacccactattttcagcagaaagtgttcgtgcttctggccgcactcagaccccaatggtgtagcagggagattcccgatcccgccaacagtacctgtgcaaagaagtatcccatcgccgaggaaaagacacagctgcccttagaccggctcctaattgactggcccaccccagaagatcctgagcctcttgtgatttccgaggttctgcatcaagtaacaccggtctttagacaccctccttgcagtaattggccacagagggaaaagggaatacaggggcatcaggcaagcgaaaaggacatgatgcacagtgctagttcccctcctcctcctagagctttgcaggccgagagccgccagctggttgatctgtataaagtcctggagtcaaggggatctgaccccaaacccgagaacccagcctgcccttggactgtcttaccagcgggagacctgccgacacatgatggatatctcccaagtaacattgacgatctgcccagccacgaagcccctctcgccgactctctggaggagttagagccccagcacatcagtctgtcagtgttcccgagctcctccttacaccccttaactttcagttgcggggacaagctcacccttgaccagctgaagatgaggtgtgatagtttgatgctgtag

SEQ ID NO: 120960 - DNA, 1980 bp, synthetic construct
  misc_feature 1..1980: note = Description of Artificial Sequence: Synthetic coding sequence
  source 1..1980: mol_type = other DNA
atggctcacacatttcgcggatgctccctggcttttatgtttattattacatggttactcatcaaggccaaaatcgacgcctgcaaaaggggagatgtcacggtgaagccctcccacgtcatcctgttgggcagcacagtgaacatcacatgcagcctgaagccacgtcaaggctgctttcactatagcagaaggaacaagttgatactgtataagttcgacaggcgcatcaatttccatcatggccacagtttgaactcccaggtcaccggcttgcccctgggaacaaccctctttgtctgtaagttagcctgtatcaattctgacgaaattcaaatctgcggcgctgagatctttgtcggggttgcaccagagcagcctcagaatttgagttgcattcagaagggggagcaaggaactgttgcatgtacctgggaacgtgggagagacacccacctgtacacggagtacacacttcagctgtcaggcccgaagaacttgacctggcaaaagcaatgtaaggatatctattgcgactatctggacttcgggattaatctcaccccagaatctccagaatccaactttaccgccaaggtgactgctgtgaactccttaggatctagctccagtctaccatcgacttttactttcttggacatagtacgtcccctgccgccttgggacatcagaattaagttccagaaggccagcgtgtcacggtgcaccctctattggcgggacgagggcctcgtacttctgaaccgcctcaggtacagaccaagtaatagccggttgtggaacatggtcaacgttacgaaagctaagggtaggcatgacctcttagatctgaagcccttcaccgaatacgagtttcaaatcagtagcaagctccatctgtataagggctcttggtccgattggtcagagagcctgagagcccagactcccgaagaggagccaaccggcatgttggacgtgtggtacatgaagagacatattgactattcgagacagcagatttcactgttttggaagaacctgtccgtgtccgaggcacgaggcaaaatcttacattatcaggtcactctgcaggagctgacaggtggaaaggctatgactcagaacataaccgggcatacatcctggacaacggtgattccgcgcacgggaaattgggcagtcgctgtatctgctgctaattctaagggctcttccctaccaactcgtatcaacatcatgaacctatgtgaggcgggattgttggctcctaggcaggtgagtgctaattctgagggcatggacaatatattggtcacttggcagccccctcgcaaggatccctcagccgtgcaagaatacgtggttgaatggagagaactgcaccccgggggtgatacccaagtcccacttaattggctccggagccggccctataacgtgtctgcgctgataagtgagaacataaaatcttatatctgctacgagatacgagtgtatgccctgtcaggtgaccagggtggctgctcttctattctcggaaattcaaaacacaaagccccccttagcggaccccatatcaacgctatcacagaagagaaaggttccatattgatttcctggaactccatccctgtgcaggagcaaatgggttgcttgctacattataggatctattggaaagaacgggactccaattctcaaccacagctttgtgaaattccttatcgtgtttcgcagaactcccaccctatcaattccctacagcctcgagtgacctatgttctctggatgaccgcccttacagctgccggggagtcttcccatggtaatgagcgcgaattttgcctgcaagggaaggcaaactggatggccttcgtggcaccttcaatttgcattgctattattatggtcgggatctttagcacccactatttccagcagaaacgaaggcatagctgtccctggaccggaagttag

SEQ ID NO: 120961 - DNA, 693 bp, synthetic construct
  misc_feature 1..693: note = Description of Artificial Sequence: Synthetic coding sequence
  source 1..693: mol_type = other DNA
tagcagaaaggagagcaaggtaccgtagcctgcacttgggagagaggcagagatacccacctgtacacagaatacacactgcagctctcgggtcctaagaacctcacctggcagaagcagtgcaaggatatttattgcgattacctggacttcggaataaatctgacccctgagtctcctgagagcaacttcacagccaaagttacggcggtcaattccttgggctcttctagtagtctaccttctacctttacatttctcgatatcgtacggcccctgcctccgtgggacatccggatcaagttccaaaaagcctctgtctctcgatgtacactgtactggcgcgatgagggactggttcttctcaatcggctgcgctatcgaccatctaactctcggctgtggaatatggtgaacgttaccaaggccaaagggcggcatgatttacttgatctgaagccgttcactgaatacgaattccagatcagctctaagctgcacctctataaggggtcctggtctgactggtccgagtcattacgagcccaaacgcctgaagaggaacctactggcatgctggacgtttggtatatgaagcgccacattgattactcacgccaacagatctcccttttctggaaggtttctttcaagcgccagctgaagacacaggggaacaaaaccgagggatag

SEQ ID NO: 120962 - DNA, 1980 bp, synthetic construct
  misc_feature 1..1980: note = Description of Artificial Sequence: Synthetic coding sequence
  source 1..1980: mol_type = other DNA
atggcacacacctttaggggttgcagcctggccttcatgttcatcattacatggctcctcatcaaagctaagatcgacgcttgtaagagaggcgatgttacagtcaaaccgtctcatgttatcctcctgggcagtactgtgaacatcacctgttccttgaaaccgcggcagggatgttttcattattcaagaagaaacaagctgatcctgtataagttcgaccggaggattaactttcaccatgggcactcactgaacagccaagtaaccggattacccttgggcacaactctgtttgtgtgtaaactggcttgtatcaactctgatgagatccaaatctgcggggctgaaatcttcgtcggagtggcccccgaacaaccccagaatctgtcgtgcatccagaagggtgagcagggaaccgttgcctgtacctgggaaaggggtagggacactcatttatataccgagtacacccttcagctaagtggacccaaaaatctgacctggcagaagcaatgcaaggacatctactgcgattatttggatttcgggatcaacctgactccggaatctcccgagtccaattttaccgctaaagttactgctgtgaatagccttggtagctcttcttccctaccctcgacattcactttcttggatatcgttaggccattgcccccatgggacatccggatcaagttccagaaagcaagtgtgtcacgctgcacattgtattggagggatgaagggctcgttctcctcaaccgtctccgatacagaccatctaactcacggttgtggaacatggttaatgtcaccaaggccaaaggtcgacatgacttattggatctgaaaccctttacagaatatgagtttcagatttcttccaaactgcacctgtacaaggggagttggtccgactggagcgagtcactccgagcccagactcctgaagaagagcccactggaatgcttgatgtttggtacatgaagcgccacatcgactactcaaggcaacagatcagtttattctggaagaatcttagcgtcagtgaagccaggggaaaaattcttcactatcaggtgaccctacaggagctgacgggcggaaaggccatgactcagaacatcacaggtcacacctcgtggaccacggtgatcccaaggaccggtaactgggctgtggccgtgtcggcggccaattccaaagggtcctctcttccgacacggatcaatatcatgaatctctgcgaggcagggcttctggccccgaggcaggtgtctgcaaattccgaaggaatggacaatattctcgtgacgtggcagccgccaaggaaggacccaagcgctgtccaggaatatgtcgtagagtggcgcgagctgcacccaggtggagatacccaggtccccctcaactggctgagatcccggccatacaacgtgtcagctctcatctccgaaaatatcaaatcgtatatctgttacgagatccgggtatacgcactcagtggagatcaaggtggatgctccagcatcctagggaatagcaaacacaaggcccccctgagcggcccacatatcaacgcgattaccgaggagaagggcagtatcctaatctcgtggaattctattcctgttcaggagcagatgggatgcctcctgcattatcggatatactggaaagagcgggactctaattctcagccgcaactgtgtgagatcccataccgggttagccagaattcccatcctataaacagcctccagccaagggtaacgtatgtgttgtggatgaccgcgctgactgctgcgggtgagagttcgcacgggaatgaaagagaattttgcttgcagggcaaagccaattggatggccttcgttgctccatctatctgcattgctatcatcatggtcgggattttctcaactcactacttccagcagaagcgcagacactcctgcccctggaccggaagctag

SEQ ID NO: 120963 - DNA, 2331 bp, synthetic construct
  misc_feature 1..2331: note = Description of Artificial Sequence: Synthetic coding sequence
  source 1..2331: mol_type = other DNA
atggcccataccttccgaggctgctctctggccttcatgttcataattacctggcttctgatcaaagccaagatagatgcatgcaaacgcggcgacgttaccgtgaagccatcccatgtcatccttctaggttccaccgttaacattacgtgttcgttgaaaccacgccagggatgtttccactacagccgtagaaataaacttattctgtataaattcgatcgacgtattaactttcaccacgggcattcgctgaacagccaggtgaccggattgccgctgggcaccacacttttcgtatgcaaactggcttgtataaattctgatgagatccaaatctgtggcgcagagatattcgtcggagttgctcctgaacaacctcagaatctgagttgtatccaaaaaggtgagcaggggacagttgcgtgtacatgggaacgcgggagagatacacatttatatacagagtacacacttcaactgtccgggcctaagaatcttacttggcagaagcaatgtaaggacatctactgcgactacctcgattttggcattaacctgacaccagagtctcctgaaagtaacttcaccgctaaggtaactgccgttaactctttgggtagttcatcatccctaccaagtactttcacgtttctggatatcgtaagaccactgcccccttgggacatccgtatcaagttccagaaggcatccgtcagccgttgtacattgtactggcgggatgaaggcctggtgctactcaatcgcctccgatatcggccatctaacagtcgcctgtggaatatggtgaacgtaacaaaagcgaagggacggcatgatttactggacctcaagcccttcactgagtatgaattccagatatcgtctaaactccacctgtataaaggcagttggtctgattggagtgagtcactgagggctcagactccggaagaggagcctaccgggatgctggatgtttggtacatgaagagacatatagactacagccgacaacagatttcactcttttggaagaacttgagtgtgtcagaagcacgcggcaagattctgcattatcaagtgacattacaggagctgaccggcgggaaagcgatgacccagaacattacagggcacacctcttggacgacagtgatccctaggaccggcaactgggcagtggctgtcagtgcagccaactcaaaaggatcttcactgcccacacgcatcaacattatgaacctttgtgaggcgggattactggcacctcgccaagtgtctgctaattctgagggaatggacaatatattggttacctggcagcctccgaggaaggatccaagcgcggtccaggagtacgtggtggaatggagggagctgcatcctgggggagacacgcaggtgcccttaaactggttgcgctctcgaccctataacgtgtccgcactcattagcgagattccatacagagtgagccagaactcgcaccccattaatagtcttcaaccacgcgtgacctatgttctctggatgacagctttgaccgcagccggtgagtcctctcacggaaacgagcgagaattctgtctgcaggggaaggcaaattggatggccttcgtcgcaccttctatctgtattgcgattataatggtgggcatcttttctactcattattttcagcaaaaagtgttcgtgctcctcgctgcactcaggccacaatggtgctccagagagattcccgatcctgcgaattctacatgcgcgaagaagtaccccatcgctgaggagaagacacagctgcctctggataggctattaattgactggcctacacctgaggacccagagccactagtgatctcagaagttctacaccaggtgaccccagtgttcagacacccaccgtgttcgaattggccccagagggagaagggaatacaaggccaccaggcatccgaaaaagacatgatgcatagcgcatcctcacctccccctccacgtgcattgcaggcagaatcacggcagctagtggatctttacaaggtgttggaatcccggggctccgatccaaagcctgagaacccggcctgcccatggacagttttgcctgcgggcgatttacctactcatgatggatacctcccttctaacatcgatgaccttccaagccatgaagctcccctggcagattcacttgaagagttggaaccgcagcatattagcctatctgtgttcccatcaagctcgctccaccctcttacctttagctgtggagacaaactgacactggaccaactgaaaatgcgatgtgatagcctgatgttgtag

SEQ ID NO: 120964 - DNA, 681 bp, synthetic construct
  misc_feature 1..681: note = Description of Artificial Sequence: Synthetic coding sequence
  source 1..681: mol_type = other DNA
atgtcttctccaaccgcatcgagtacaactccaagatgtggcacatccgctggcccggccagcccaacttggcgatgtagagctaccgcattgcaccttcatcacccagtcgatcagctcccacaccaggtgttacaacccacaacgggtcagcgccaaccgggaacaggcctgccctggcacagtacacccgcacaactcgccctagctggcctgaggcaggctcagccccacccacagcagcaaaggctgcaccaacctggactgagaggagtggacgcccatggtagtgccgcacatgtgccacaggctgtgccccaggctgtgcgagcccatccgcccggccagctattatcctgggcagccgccgtgtgtctgctatgccaacaccacttacagctgcccggaaagaagcgtaatagcaccctgtatattaccatgctgttgatcgtgccagtgattgtggcaggcgccatcattgtcttgctcttgtacctgaaaagattaaagatcataatttttcccccaattccagatcccggcaaaatctttaaagaaatgttcggagatcagaatgacgacaccctgcattggaagaagtacgatatctatgagaagcaaaccaaagaggagactgactccgtagttttaatagaaaatctcaaaaaagcatcacaatag

SEQ ID NO: 120965 - DNA, 840 bp, synthetic construct
  misc_feature 1..840: note = Description of Artificial Sequence: Synthetic coding sequence
  source 1..840: mol_type = other DNA
atggagtggcccgctcggctgtgtggactgtgggcgctactgctctgcgctgggggtggagggggcggcggcggagcggcgcccaccgaaacgcagcccccagttacaaacctcagtgtgtcagtagagaatctctgcacagtaatttggacgtggaatcctcctgaaggagctagttcaaactgttctctttggtacttctctcattttggagataagcaggataaaaagatagcccctgaaactcgccggagtattgaagtgccactgaacgagcgtatttgtctccaggttggatcccagtgcagcaccaatgaaagcgaaaaacccagcatccttgtagagaagtgtatttcgccgcctgagggagatccagagagcgcggtgacggaacttcagtgcatatggcacaacctttcatacatgaaatgctcttggctccctggacgaaacacctcacctgataccaattacacgctgtattattggcatagaagtctcgaaaagatccatcagtgcgaaaacatcttcagggagggacagtacttcggctgtagctttgacttgaccaaagtcaaggactcatcattcgaacagcattcagtgcagattatggttaaagataatgctggtaaaatcaagccgtcttttaacattgtccctctcacctcccgggtaaaacctgaccctccccacattaaaaacctgagcttccataacgacgacctatacgtgcagtgggagaatccccagaactttataagcagatgtctgttctatgaagtcgaagtgaacaattcccaaacggagacacataatgttttctacgtaagattttag

SEQ ID NO: 120966 - DNA, 1284 bp, synthetic construct
  misc_feature 1..1284: note = Description of Artificial Sequence: Synthetic coding sequence
  source 1..1284: mol_type = other DNA
atggagtggcctgcaagattatgcggtctgtgggctcttctgctgtgtgccggaggcggtggcgggggcgggggagccgcccctacagagactcaaccaccagtgaccaacttgtctgtttccgtggagaatttatgcacggtgatttggacctggaacccccccgagggggctagctccaactgcagtctgtggtacttttcacacttcggggacaagcaggataaaaagatcgcccccgagacccgtcgcagtatcgaggtgcctctaaatgaacgcatatgtcttcaagtcggctctcagtgttccaccaacgaaagtgagaagccatcaatcttggtcgagaagtgtatctcaccacctgagggtgatcccgaaagcgccgtgacagagctgcagtgcatctggcataatcttagttacatgaagtgctcttggttgcccggccggaatacttctcctgacacaaactacaccttatattactggcatagatccctggagaaaattcaccagtgcgaaaatatctttcgcgaaggacaatattttggatgctccttcgacctgaccaaagtgaaggactcatcgtttgagcagcactcagtgcagataatggtgaaggataatgccgggaagattaaaccctcgtttaatattgtgcccctgacaagtcgggtgaaacccgatccaccacatataaaaaacctgtcattccacaacgacgatctctatgtccagtgggaaaatcctcaaaactttatcagtcggtgcctgttctacgaggtggaggttaacaacagtcagaccgagacgcataatgtgttctatgtgcaagaggctaagtgtgagaatccagaatttgagcggaatgtcgagaataccagctgtttcatggtgccaggagtgctccctgacacactgaatacagtgcggattagggtgaagacaaacaagctttgttatgaagatgacaaactttggtcaaattggagccaagaaatgtcaatcggcaagaaacgaaactccacgctttatatcacaatgcttcttattgttcctgttattgtcgccggcgccatcatcgttctgcttctctatctgaagcgattgaaaatcatcattttcccccccattcctgatcccgggaaaatctttaaggagatgtttggggaccagaacgatgacacactgcactggaagaagtacgacatctatgagaaacaaacaaaagaagaaaccgatagcgtagtgctaatcgagaatcttaaaaaggcaagtcagtag

SEQ ID NO: 120967 - DNA, 1143 bp, synthetic construct
  misc_feature 1..1143: note = Description of Artificial Sequence: Synthetic coding sequence
  source 1..1143: mol_type = other DNA
atggcgtttgtatgtctggctatcggatgcctgtacacctttctcatcagtacaacctttggttgcacaagctcatcagacactgagatcaaggtgaacccccctcaggatttcgagatagtcgatccaggctatttgggatacctttacctacagtggcagcctccattgagcctcgatcattttaaagaatgtactgtcgagtacgaattaaaataccggaatataggctcggaaacttggaaaacaattatcaccaagaatttgcactacaaggacggctttgacctcaataagggcattgaagccaaaatccacactctgttaccctggcagtgcacaaatggctcagaagtccaaagcagttgggcagaaactacatactggatctccccccaggggatcccagaaactaaagtacaggatatggattgtgtctactacaactggcaatatttgctttgttcttggaaaccaggtattggggtgctgctcgatactaactataacttgttctattggtatgaggggctggaccatgctctgcaatgtgtggactatatcaaagctgacggccagaatattggctgccggttcccctacctggaagcctcagattacaaggacttttatatttgcgtgaatggcagttccgagaacaaaccaatcagatcgagctacttcacttttcaactccagaacatcgttaagcccctgcccccggtgtacctcaccttcaccagagagtcctcttgcgagattaagttgaagtggagcatccctctgggacccattcctgctagatgcttcgattatgagatcgagattcgcgaagatgataccacgctcgttacagcaaccgtggagaatgagacttacacgctgaagaccaccaacgagacccgacaattgtgctttgttgtcagatcaaaggtgaatatttactgcagtgacgacggcatatggtccgaatggtctgacaagcagtgctgggaaggcgaagatctctcaaagaaaacccttctccgcttctggctgccttttgggtttattctcatactggtgatctttgttacagggctgctccttaggaagccaaatacttaccctaagatgatcccagagtttttctgcgatacctag

SEQ ID NO: 120968 - DNA, 1143 bp, synthetic construct
  misc_feature 1..1143: note = Description of Artificial Sequence: Synthetic coding sequence
  source 1..1143: mol_type = other DNA
atggccttcgtgtgtctggcaataggctgtctgtatacatttttaatctctaccactttcggctgcacctcgtcttccgacactgagataaaggtcaatcctccccaggactttgaaatagtagatcccggatatctggggtatctgtacctgcagtggcagcctccactgtctctcgatcactttaaggagtgcaccgttgaatacgaactgaagtaccgcaacattggatcggaaacctggaagacaatcatcacaaagaaccttcactacaaggatgggtttgatctgaacaaggggatagaggctaaaatccatactctgctgccgtggcaatgcaccaatggatctgaggtgcaaagtagctgggcggaaactacctattggatatctccacagggaatccctgaaaccaaggtccaggatatggactgcgtctattataattggcaatatctgctgtgctcctggaaaccaggaataggcgtgctattagacacaaactacaaccttttctactggtacgagggcctggaccatgcgttgcagtgtgtcgactatattaaagctgacggtcagaatatcggatgccgctttccctacctggaagcatcagactataaagacttttatatttgcgttaatggcagctcagaaaataaacctatacgatcatcctactttacattccagctgcaaaacatcgtgaagccactgccaccagtctacctcacgttcactcgggagagttcatgcgagattaaacttaaatggagtattcccttgggccccatccccgccagatgcttcgattacgaaatagaaattagagaggatgataccaccctggtaacagccaccgtcgagaacgaaacgtacaccctgaaaaccacaaacgagacaaggcagctgtgtttcgtggttaggagtaaggtcaacatatactgttcagatgacggaatctggtctgagtggagcgataagcagtgctgggagggagaggacctgtcaaaaaagactctgctacgcttttggctgccatttggtttcatccttatcctggttatattcgtcaccggtctgctgcttagaaaaccaaacacctaccccaagatgatcccagaattcttctgtgacacctag

SEQ ID NO: 120969 - DNA, 465 bp, synthetic construct
  misc_feature 1..465: note = Description of Artificial Sequence: Synthetic coding sequence
  source 1..465: mol_type = other DNA
atggcccccagacgtgctcgagggtgcaggactctgggcctgcccgccctgctgctattactgctgctgcgaccacccgcaactcgggagcctgcagcaagcagcccctccagcaacaatacggcggctacaaccgctgccatcgtaccagggagtcagcttatgccctccaagtctccttccaccggaaccacagaaatttcatctcacgagtcttctcacggaaccccaagtcagacgactgctaaaaactgggagttaactgcttcagcctcccaccaaccaccaggggtgtatccacaagggcacagtgatacaactgtggctatctctacttcaactgtgctcctgtgtgggcttagcgccgtcagccttctcgcttgttatctcaaaagcagagcatccgtgtgctcatgccaccccaggtccgccgggcatacttgttccgtgggctctgtgtgttag

SEQ ID NO: 120970 - DNA, 804 bp, synthetic construct
  misc_feature 1..804: note = Description of Artificial Sequence: Synthetic coding sequence
  source 1..804: mol_type = other DNA
atggctcctcgtagggcccgggggtgccgcacactgggtctgcccgccttgcttctcttactgctgctgcggcctcctgctaccagaggcattacctgtccaccacccatgtctgttgaacacgccgatatctgggtgaaaagttacagcctgtactcacgggaaaggtacatatgtaattctggtttcaaaaggaaggccggtacaagttcactcaccgagtgtgtgttaaataaagctacgaatgtggcccactggacgacccccagtctcaaatgcataagagaccctgcgctggtccatcagaggcctgcgccaccttccacagtcacaacagctggggtcaccccccagcccgagtccctgtcgcccagcggtaaggagcccgccgcatccagcccttcgagtaataacacggcagccacgactgccgccatcgtacctggctcacagttgatgccaagcaagtcaccatccacaggcactactgaaatcagtagtcatgaatcatctcacggcaccccttcccaaaccacagcaaagaactgggagctgaccgcctctgcttctcaccaaccgccaggagtctacccgcaaggccacagtgacaccacagtcgccatcagtacctctacagtgctgctctgcggcttgagtgccgtgtcccttctggcatgttatctcaagtctcgtcagacaccacctctggcgagcgtcgaaatggaggcaatggaggcactccccgtgacgtgggggacctcttccagggatgaggacctggagaattgcagtcaccacctgtag

SEQ ID NO: 120971 - DNA, 612 bp, synthetic construct
  misc_feature 1..612: note = Description of Artificial Sequence: Synthetic coding sequence
  source 1..612: mol_type = other DNA
atgagcgtggaacatgccgatatttgggtgaagagctactctctttacagtcgggaacgttacatttgtaactctgggtttaaaaggaaggccggaacgagcagcctcacagagtgtgttctgaacaaagctacgaatgttgcccactggaccacacctagccttaagtgtattcgagaccccgcacttgtgcaccaacgtcctgctcctccgagtactgtgactactgccggtgtgacgccccagcctgaatctttatcgcctagcggaaaggaacctgcagcttcgagccctagtagtaacaacactgccgccactaccgctgcaatcgtgcccggttcgcaactaatgcccagtaaatcaccctccacagggacaaccgagatcagctctcacgaatcttcccatggcactcccagtcaaactacagctaagaactgggaactcactgcgtcagcatcccatcagcccccaggagtttacccccaaggtcactcggatactacagtggcaataagcacttccacggtactgctttgtggtttatcagcagtcagcctgctcgcctgctatcttaagagcagtggagcagtgttaagctattctgggtag

SEQ ID NO: 120972 - DNA, 696 bp, synthetic construct
  misc_feature 1..696: note = Description of Artificial Sequence: Synthetic coding sequence
  source 1..696: mol_type = other DNA
atgtctgtagagcatgccgacatttgggtcaaatcctattcattatatagtagggaaaggtatatctgtaacagtggattcaaaagaaaagccggcacatccagcctgactgaatgtgtgctgaataaagctactaatgttgcccattggaccacccctagcttgaaatgcatacgggaccctgccctcgtgcaccagcgtccagcacccccgtccaccgtgacaacagctggagtgacaccccaacccgagtctctctcacctagtggtaaggaaccagctgcctccagcccttcatctaataacaccgccgcaacaacggccgccatcgtgcctggctctcagctgatgccgtccaaatcccctagcacaggcactaccgagatcagtagtcatgagagctctcatggaacccccagtcagacaaccgccaagaattgggagctgacggcaagcgcatcgcaccagcccccgggcgtgtacccacagggacacagcgatacaactgtggcaatttccacgtccacagtcctgttgtgcggcctttcggcagtttcactcttggcatgctacttgaagtccagacagacccctcctctggcctcagtggagatggaggctatggaggccctgcctgttacctgggggacatctagtagggacgaagacctggaaaactgttcgcaccacttgtag

SEQ ID NO: 120973 - DNA, 510 bp, synthetic construct
  misc_feature 1..510: note = Description of Artificial Sequence: Synthetic coding sequence
  source 1..510: mol_type = other DNA
atggccccaagacgtgctcgagggtgccgcacactcgggcttccagccctgcttctgctgctgctgctgagacctcctgccacaagggagcctgccgccagctctccctcaagtaacaacactgctgctacaaccgctgccattgtccccggcagccagcttatgccctcgaagtccccgagcaccggaacgaccgagataagctcacacgaatcttcccatggaaccccttctcagacaacagcaaaaaattgggagctgactgccagcgcgagccaccagccccccggcgtgtatccccaggggcattccgacactacggtagctatcagtactagcactgtgctgctatgtggactcagcgctgtttccctgctggcctgctatctcaaatcgaggcagacaccgcctctggctagcgttgagatggaagctatggaagccctgcccgtcacttggggaacatcctcgcgggatgaagatctggagaactgcagccatcatttatag

SEQ ID NO: 120974 - DNA, 609 bp, synthetic construct
  misc_feature 1..609: note = Description of Artificial Sequence: Synthetic coding sequence
  source 1..609: mol_type = other DNA
atggcaccaagaagggctagggggtgccgcaccttggggctccctgctttgctcctattgctactgttaaggccccctgccacgaggggggatcctgctctagtgcatcagaggccagcacccccctcaaccgtcacaacagcaggcgtaaccccacagcccgaatcactgagccccagtggcaaagagcccgctgcctcttctcccagctcaaataacactgccgccactaccgccgccatcgtccctggatcccagttgatgccctccaaatcgccgagcactgggacaaccgagatctcatcgcatgagtctagccacggtactccaagccagacaactgccaaaaattgggaactgaccgcatccgcttctcaccagccacctggcgtttatccacagggccacagtgacactaccgtggccattagcaccagcaccgtgcttctttgcggcctctctgctgtaagccttctggcatgttacttaaaaagtaggcagactcccccgttggcatccgttgagatggaggccatggaggcccttccagtaacgtggggcaccagctctagggatgaggatctcgaaaattgcagtcaccatctctag

SEQ ID NO: 120975 - DNA, 759 bp, synthetic construct
  misc_feature 1..759: note = Description of Artificial Sequence: Synthetic coding sequence
  source 1..759: mol_type = other DNA
atggccccacggagggcccgtggttgtcgcacactgggtcttccagctctgctgttactcttgctgttgcgtcctcccgctactagggggattacttgtccccccccaatgtcagtcgagcatgccgatatttgggtaaagagctacagtctctactcacgcgagaggtacatctgtaacagtgggtttaagaggaaagccgggacgtcatctttaactgaatgcgtattaaacaaggcaactaacgtggcccattggactactccaagtcttaaatgcattcgcgacccagccctggtgcatcaaaggcccgctccaccgtcgaccgtgaccacggccggagtgacgcctcagcctgagagcctctccccatccggcaaggaaccagctgcatcttcaccttcttcaaataacactgcggccaccacagccgccattgtacccggatctcagctgatgcccagcaaatccccctccaccggtacgaccgaaatttccagccacgagtcatcacacggtacccctagtcaaaccaccgccaagaattgggaacttactgcatcagccagtcaccagcctccaggtgtctacccgcaaggccacagcgacaccacagtagctatcagcaccagcacggtgttgctctgcgggctgtcggctgttagtttacttgcctgctacctcaaatcacgcgccagtgtctgttcttgccatccgaggtccgccgggcatacctgttctgtggggagcgtgtgttag

SEQ ID NO: 120976 - DNA, 564 bp, synthetic construct
  misc_feature 1..564: note = Description of Artificial Sequence: Synthetic coding sequence
  source 1..564: mol_type = other DNA
atggcgccaaggcgcgcacgaggctgtcgaacactgggccttcccgccttgctgctgctgctcttgctccggcccccggcaacacggggtgacccagcgctggtccaccagcgccctgctcctccgtccacggtcacaacagcaggcgttacgccacagcccgaatcactgtccccatctggtaaagagcctgctgcctcctcccctagttctaacaataccgccgctactaccgccgcaatagtccctggaagccagctgatgccaagcaaatccccttccacaggcacaacagagatatctagccacgaaagcagccatgggacaccatcccagaccacagccaagaattgggagctgaccgccagcgcttctcaccagccgcccggggtctatcctcagggccactccgatactacagtggccatttccacttcgacagtactgctttgtggtttgtcagccgtgagcctgctggcttgttatctgaaatccagggcgagcgtatgttcctgccacccgcgaagcgcagggcatacgtgttctgttggctctgtatgttag

SEQ ID NO: 120977 - DNA, 705 bp, synthetic construct
  misc_feature 1..705: note = Description of Artificial Sequence: Synthetic coding sequence
  source 1..705: mol_type = other DNA
atggcccctcggcgggccaggggatgtaggacccttggcctgcccgccctgctgctgctgctgctgctgaggcctccagcaaccaggggcattacctgtccccctccaatgtccgtggagcacgctgacatctgggtcaagagctatagcttatatagccgtgagaggtacatctgcaattcaggatttaaacggaaagctggcaccagctccctgaccgaatgtgtcttaaataaggctactaacgtggctcattggacaaccccttctctcaagtgtatcaagcccgctgcctccagtccgagtagtaacaacaccgccgcaactaccgctgccatcgtgcctggaagtcaattgatgcctagtaaaagtccatccacaggcaccacagagatatcctctcacgaatcttcacacggtacccctagccagacaactgctaaaaactgggagcttacagcctcagcttctcaccagcctccgggggtgtacccacagggccacagcgacaccacagtcgctatcagcacgtctaccgtgctgctgtgcggcctttcagccgttagcctcctagcttgctacctaaaaagcaggcagacccctccgctggcatccgtcgagatggaggctatggaagctcttcccgtgacctggggcacgagcagcagggacgaggacctggagaattgtagccaccacttatag

SEQ ID NO: 120978 - DNA, 660 bp, synthetic construct
  misc_feature 1..660: note = Description of Artificial Sequence: Synthetic coding sequence
  source 1..660: mol_type = other DNA
atggctccccggcgcgcccggggatgtagaacccttggtctgccggccctgctgctgttgttgctcctgcggcctccagccacacggggcattacctgtcctccacccatgtctgttgaacacgccgacatttgggtgaagtcctattctctgtactcacgggaacgctatatttgtaatagtggcttcaagagaaaagctgggacaagcagtcttactgagtgtgtgttgaacaaggccactaacgtggcccattggaccaccccgagcctgaagtgtattaagcctgcagcctcctcccccagcagcaacaatactgcagccactaccgccgcaatcgttcctggcagtcaactgatgccgagtaagtccccatctactggtacgactgagatcagctcacacgagtcaagtcacgggaccccaagccagacgaccgctaaaaattgggagctgacggcttctgcgtcacaccagccccctggtgtatatccccaggggcactctgatacaactgtggccatctctacaagtactgtgttgctctgcggtctttctgccgtgtctctgctggcgtgctaccttaaaagtagagcctccgtgtgtagctgccatccccggagtgcagggcacacgtgttctgtcggaagcgtctgttag

SEQ ID NO: 120979 - DNA, 2601 bp, synthetic construct
  misc_feature 1..2601: note = Description of Artificial Sequence: Synthetic coding sequence
  source 1..2601: mol_type = other DNA
atgggggctgcccggtctcctcccagcgccgtcccaggccccttactgggtctgctactgctcctgctgggagtacttgcccctggaggagcttctcttcgtctcctcgaccatagagcgttagtttgcagtcaaccagggctgaattgtacagtgaagaatagtacgtgcctggacgatagttggatacaccctaggaatcttacgccaagtagccccaaggatttgcagatacagctgcattttgcccacacccagcagggtgatctctttcctgtcgctcacatcgagtggaccctccaaactgatgcaagcatcctctatttggaaggcgccgagctgagcgtgctccagttaaatacaaacgaacgcctctgcgtgcgattcgagtttctctcgaaactacggcatcatcacaggaggtggcgctttacttttagtcattttgtggttgaccctgaccaggagtacgaggtgacagttcatcacctgccaaagcctatccccgatggagacccaaaccaccagtccaaaaacttcctggtccctgactgtgagcatgcccgcatgaaagtgaccaccccttgtatgtcctcaggttccctttgggacccgaacattactgtggaaacccttgaggctcaccaactgcgggtttctttcaccctgtggaacgaatctacccactatcagatcctgcttaccagctttcctcacatggagaatcacagctgcttcgagcacatgcaccacattccagccccaaggcccgaggagttccatcagcgctccaacgtcacattgacgctgaggaacttgaaaggctgctgtagacatcaagtccagattcagccatttttttctagctgcttgaacgactgtctgcgccatagtgccaccgtttcttgccccgagatgcccgacacgcccgaacctattccagactacatgcccctatgggtttattggttcatcaccggtatttcgatcctgcttgtgggcagtgtcattctgctgattgtttgcatgacctggcgacttgccgggcccgggagtgagaaatattccgatgacacaaagtatactgatggcctgcccgcagccgacctcattcctcctcccttaaagccccgaaaagtctggattatctatagtgcagatcaccccctatatgtagatgtagtgttgaaattcgcccaattcttgctaaccgcctgtgggaccgaagtggccttggatctgctcgaggaacaagccatttccgaagccggtgtgatgacatgggtagggcgacagaaacaggaaatggtcgaaagtaattcaaagattatcgtgctttgcagtcggggtaccagggcaaaatggcaggcccttttgggtaggggagcccccgtgcgtctgaggtgtgatcacgggaaaccggtgggggacttgtttacagcagctatgaatatgattctgcccgacttcaagaggccagcctgctttggaacctatgtggtctgttatttcagcgaagtgagctgcgatggcgatgtgcctgatctgttcggcgcggcccccaggtaccctctaatggataggtttgaagaagtctatttcaggatacaggatctggaaatgttccagccagggcgaatgcatagagtgggcgaactgtcaggggataattaccttaggagtcctggaggaaggcagctgcgtgccgccctggatcggtttcgtgattggcaggtgaggtgtccagactggttcgaatgtgaaaatctctactctgccgacgaccaggatgccccttctcttgacgaggaagtctttgaggagcctctgttgcccccgggtacaggaattgtgaaacgcgcgccgctggttagagagcctggaagccaagcatgtctagcgattgaccctctggtgggcgaagagggcggagccgccgtggccaagctagaaccacacctgcagcccagaggacaacctgcacctcaaccgctgcacaccttagtgctggccgcagaggaaggggctctcgtagctgccgtcgagccaggaccactggcagacggtgccgcagtcagattagctctggcaggggaaggggaggcatgtcctcttctgggaagtcctggagcaggtcgcaattcggtgcttttcttgcccgtagaccccgaggattcaccccttgggagttctactcctatggccagccctgatttactaccagaggatgtgagggaacacctggagggcctgatgctctccctgtttgagcagagtctgtcatgtcaggctcaaggcggctgttctagacccgcaatggttctgacagatccccatacaccatatgaggaggaacaaagacagtctgttcagagtgatcaggggtatatctcccgaagctcgccgcagccccctgagggtctcacagaaatggaggaagaggaggaggaagagcaggaccctgggaagcccgcactccctctgtctcctgaggatctggagtctttgcgcagcctgcagcgccagctgctcttccgccagctccaaaaaaactcaggatgggataccatgggaagtgaaagtgaaggaccttcagcgtag

SEQ ID NO: 120980 - DNA, 2445 bp, synthetic construct
  misc_feature 1..2445: note = Description of Artificial Sequence: Synthetic coding sequence
  source 1..2445: mol_type = other DNA
atgggggccgcacggagtcctcccagtgccgtcccagggccactccttggcctgcttctgttgctgctcggcgtgctggctccaggcggcgcttccctgcgattgctcgatcatcgtgcccttgtctgcagccagcccggcctcaattgcacagtcaaaaactcgacttgtctggatgattcctggattcacccacggaacctcaccccgtcgagtcctaaagacttacagatccaactgcacttcgcccacacccagcaaggcgatttgttccccgtggcccatatcgagtggaccctgcagactgacgcctccatcctttacctcgagggtgcggagttatccgtcctgcaattgaacaccaacgaaagactgtgtgtgcggtttgaattcttaagtaaactgaggcaccaccaccgccggtggcgcttcacatttagccactttgtggtcgatcctgatcaggaatacgaagtgactgtccaccacttacccaagcctattccagacggagacccaaatcaccagtccaagaattttttggtaccagattgcgaacacgctcgcatgaaagttaccaccccttgcatgagtagcggctcattgtgggacccaaacatcacagtcgagacgctggaggctcaccaactgagggtatcctttaccctgtggaacgagtcaactcattatcagatcttgcttacctctttcccacacatggaaaaccatagctgctttgagcatatgcatcacatccccgccccacggcctgaggaatttcaccaacggtcgaatgttaccctgaccctgaggaatttaaagggttgttgcaggcatcaagtacagatccagcccttcttcagttcctgcctgaacgattgcttgagacattccgcgaccgtgtcttgccccgagatgcccgacacccctgacggactccccgcagcagatttgatccccccacccctgaaaccacggaaggtttggattatatactcagcagaccatccactgtacgttgatgtggtcctcaaattcgcacagtttttattgaccgcttgtggcaccgaggtcgccttggacctcctggaagagcaagccatatctgaggctggcgttatgacctgggttgggcgccagaaacaggaaatggtggaaagcaatagtaaaattatcgtgctttgctctagaggaacccgcgcaaagtggcaggccctgctgggcagaggggctcctgtgcgtctgagatgtgatcatggtaagcccgtgggcgacttatttaccgcagctatgaacatgattctccctgacttcaaaagaccggcttgttttgggacctacgtagtttgctatttcagtgaagtgagctgcgacggagatgtccctgatctcttcggtgccgctccgaggtacccgcttatggatcgcttcgaagaagtttattttcggattcaggacttagaaatgttccagcctgggcgcatgcatcgggtgggagaactgagtggcgataattacttacggagccccggtggccgccagttgagggctgcactagatcggttccgggactggcaagtgaggtgtcctgactggttcgaatgcgagaatctctactctgcagatgaccaagacgctcccagcctcgatgaggaggtttttgaggaacctctgttaccacccgggaccggaatcgtgaagcgggctccgcttgttcgtgagccgggcagccaggcctgccttgccatcgatcccttggtgggcgaggaggggggtgctgccgtcgccaagttggagccacatctgcagccgcgtggtcaaccggcccctcagccgttgcatacgcttgtgttagcggccgaggagggtgctcttgtggccgccgttgagcctggacccctggccgacggcgctgccgtgcgattggcactggccggcgaaggtgaggcctgtcctctgctgggaagccctggagcaggtcgcaactctgttctgttcctgccagttgacccagaggactccccgctgggatcaagcactcccatggcttctccagatcttctccctgaggatgtgcgggagcatctggaagggttaatgttgagcctgttcgagcaatctctcagttgccaggcacaagggggatgttcccgtcctgctatggtgctcacggatcctcatacaccttatgaagaggagcagcgacagtcggtgcagtctgatcagggctacattagtagatcctcacctcagccccccgagggcctgaccgagatggaagaagaagaggaggaggagcaggaccccggaaaacccgccctgccactttctcccgaggatcttgagtcgctgcgcagtctccaacgacagctgctgttcagacagctgcaaaagaatagcggttgggacacaatgggatccgagtcagaagggccctctgcttag

SEQ ID NO: 120981 - DNA, 1509 bp, synthetic construct
  misc_feature 1..1509: note = Description of Artificial Sequence: Synthetic coding sequence
  source 1..1509: mol_type = other DNA
atgtctcttgtgcttctctcactagccgccttgtgtcggagtgccgtgccacgggagcccaccgtgcagtgcggaagcgagaccgggccgtctcccgagtggatgcttcagcacgatctgatcccgggcgatttgcgcgatctgcgtgttgaaccggtgactacatcagtggctactggtgactatagcatcctgatgaatgtttcctgggtgctgagggctgacgccagcattcgtttgttgaaggccactaagatatgcgttaccggtaaaagcaattttcagagctacagctgcgttagatgcaactatacagaggctttccagacacagacaagacccagtgggggtaagtggaccttctcatacattggtttccctgtggagttgaacactgtctactttatcggcgctcacaacattccgaatgccaatatgaacgaagatggccccagcatgtcagtgaactttacatcgcctggctgcttagatcacataatgaaatataaaaagaagtgcgtgaaagccggctctctttgggaccccaacatcaccgcctgcaagaagaacgaagagaccgtggaggtgaatttcaccacaacacccctgggaaacagatatatggctcttatacagcacagtacgattatcggattttcacaagtgttcgagccacaccaaaaaaaacagacacgggcgtcggtagtgatccccgttaccggggattcagaaggtgcaacagtccaattgaccccctattttcctacttgcggttctgactgtatacggcataaaggcacagtcgtcctttgcccccaaaccggagtcccgttccctctcgataataataagtctaagccaggtgggtggttaccacttctgcttttgagtttactggtggcgacctgggtgttagtagcagggatttacttaatgtggcgccacgaacggatcaaaaaaacaagctttagtaccactacactcctgccacctatcaaggtgcttgtggtctatccttcagaaatctgttttcaccacaccatttgttattttactgagtttctgcagaaccactgccggtcagaagtaattctggagaaatggcagaagaagaagattgccgagatgggccccgtgcagtggcttgccactcagaagaaagcggcggacaaggttgtcttcctgttgtcaaacgacgtcaattccgtgtgtgatgggacgtgcggcaaatctgaagggtcaccctccgagaatagtcaggacctgtttcctctcgcgttcaacctgttttgcagcgacctccgctcccagatacatctccataaatatgtggtggtgtattttcgggagattgacactaaagatgattataatgctctctctgtctgcccaaagtatcatttgatgaaggacgccaccgcgttttgtgctgagctactacacgtaaaacagcaagtgtcagccgggaaacgcagccaggcttgccacgacggatgttgcagcctgtag

SEQ ID NO: 120982 - DNA, 2376 bp, synthetic construct
  misc_feature 1..2376: note = Description of Artificial Sequence: Synthetic coding sequence
  source 1..2376: mol_type = other DNA
atgccggtgccgtggtttctgctctctcttgcactggggagaagccccgtggtgctctcgctggagcgactggtgggcccccaggatgccacacactgttctcccgtatccctcgagccgtggggggatgaggagcgcctcagggtacagtttctggcacagcagtccctgagtttggcacccgtgactgccgcgactgccaggacggctttgagcggcttgagcggtgccgacggaagacgcgaagaaagaggacggggaaagtcatgggtttgtctctccctgggaggtagcggaaatacggaacctcagaagaagggcctctcatgcagactatgggactcggacattctgtgtctgcctggcgacattgtaccggcacccgggcccgtcctggcacccactcacctgcagaccgaactagtgctgcgatgccagaaggagaccgactgcgatttgtgcctgcgcgtagccgttcatctagctgtgcatggccactgggaggaaccggaggacgaggaaaagttcgggggagctgcggactccggggtggaggagcctcggaatgccagcctccaagcccaagttgtgctgtcattccaggcgtatccaactgctcgctgtgttcttctcgaggtgcaggtacctgccgccctggtacaatttggtcaaagcgttggaagcgtggtctatgattgtttcgaagctgctctggggtccgaagtaaggatttggtcatatacgcagcctcggtatgaaaaggagctaaatcacacacagcaactgcccgattgtcgcggacttgaggtctggaatagcatcccgtcgtgttgggctcttccatggcttaacgtgtcagccgatggcgacaatgtacacctggttttaaacgtaagtgaggaacagcattttgggctgagcctgtattggaatcaagtgcagggaccacctaaacctagatggcacaagaaccttaccggcccccagatcattactctcaaccatacagacctagtaccgtgtttatgcatacaggtttggcccctggagccggattcggtccgtactaacatctgtccatttcgtgaggaccccagagcgcatcagaatttgtggcaggctgctcgcctccaactgctaactctgcagagttggctactggacgctccttgctctctcccggccgaggcggcgctgtgctggcgcgccccaggaggagacccttgtcagccactcgtgccaccgctgtcatgggagaatgtgactgtcgacaaggtcctcgaattcccactccttaagggtcaccctaatctatgcgtgcaggtcaattctagtgaaaagctgcagttacaggaatgcctgtgggccgacagcctcgggccactcaaagatgatgtgcttctcttggagacgcggggacctcaggacaatcggtcactgtgtgccctagagcctagtggctgtacaagcttaccgtcaaaagccagcacccgggctgcaagacttggggagtacctgctccaggacctgcaatctggccaatgcctgcagttgtgggacgatgacctgggagctctttgggcttgcccgatggacaaatacatacataaacggtgggccctggtctggctcgcctgcttgctgtttgccgccgcactgtcactgatcctgctcctgaaaaaagaccacgcaaaaggctggctgcggttgctgaaacaggacgttcggagtggtgccgccgcaagaggccgagctgcactgcttctgtactcagcggacgattccggcttcgagcgcctcgtgggtgcgcttgctagcgccctttgtcaactgcctctgagagtggctgtggacttatggtcaaggcgcgagttatctgcccagggacccgtcgcctggttccatgcccagaggaggcagactttacaggagggcggcgttgtggtgctactgttctccccgggagccgtcgcactatgcagcgagtggctacaggatggagtgagtggcccaggggctcatggaccccacgacgctttccgcgcgagcctgagctgtgtcctgcccgacttcctgcaggggcgggcccctgggagttatgtgggcgcatgcttcgacagactcctccatccagatgcggtcccggcactcttcagaactgtacccgttttcacgttaccgtcacaactgcccgatttcctgggcgctctgcaacagccaagagcacccagatctggaagactacaagaaagagccgagcaggtgtccagagctctgcagcccgctctggatagttactttcatcccccaggcactccagcgccagggaggggcgtgggccccggtgctggccctggggctggcgacggaacatag

SEQ ID NO: 120983 - DNA, 2118 bp, synthetic construct
  misc_feature 1..2118: note = Description of Artificial Sequence: Synthetic coding sequence
  source 1..2118: mol_type = other DNA
atgccagtcccctggtttcttctgagcctggctctggggcgcagtccagtggtcttgagcctcgagagattggtaggcccacaggatgctacccattgttctcccggactctcctgtaggttgtgggacagtgatattctttgcttgccaggagacatagtgcctgccccagggcctgtgctcgccccgacccaccttcaaacagaattagtgctgcgttgtcaaaaggaaactgactgcgacctctgcctccgagtcgccgtccaccttgccgtccatgggcactgggaggaacccgaggatgaggaaaagtttgggggagctgccgattccggtgtcgaagaacctcgcaacgccagtttgcaggcccaggtggtactttctttccaagcttaccccacagcgcgctgcgtattgctcgaagtccaggtgcctgcagctcttgtgcagtttgggcagagtgtgggtagtgtggtgtacgactgttttgaggcagctctgggaagcgaggtccgtatttggtcctacactcaacctagatatgagaaggagctgaaccatacacaacagctgcctgcactgccctggctaaatgtgtctgctgatggcgacaacgttcatctcgtccttaacgtctcagaagagcagcacttcggattgtctctttactggaatcaagtgcagggaccacccaaaccacgttggcataagaacttaaccgggccacaaataatcacactgaatcatactgacctggtcccctgtctgtgcattcaggtgtggccattagaaccagactctgttcggacaaatatttgtcccttccgcgaggatcctcgcgctcaccagaatctctggcaagctgcccgtctccagctactcactctgcagagttggctcctcgacgccccttgctcgctgcccgcggaggctgccctttgttggagggctccgggcggagacccttgtcagcccttagtaccacccctctcttgggaaaacgttacagtggacaaggtgctagaatttcctttgctcaaaggacacccaaacctgtgcgtgcaggtgaattccagcgaaaagcttcaactgcaagagtgtctgtgggctgactccttgggtcctctcaaggatgacgtcttactgctagaaacccggggcccacaggacaacagaagcttgtgcgcgctcgaaccctccgggtgtacaagcttgccaagcaaagccagcacacgagccgcgcgcttaggggagtatctgctccaagatctgcagagtgggcaatgcctgcaattatgggatgacgacctgggggccctgtgggcctgtcccatggacaaatacattcacaagaggtgggcgttggtgtggctcgcttgtctgcttttcgccgcagccctgtcgcttatactcctcctgaagaaagaccacgcaaagggctggctgcgtcttctcaaacaggacgtcagaagtggcgcagcagcgcgagggcgggccgctctcttactgtattcagctgacgatagcgggtttgaaagattggtgggggctttggcatccgctctgtgccagctccccctgcgcgtcgcagtggatctctggagtaggagagagcttagtgcccaaggtcctgtagcctggtttcacgcacaaagacggcagaccctccaggaaggcggagtggtagtgcttctgttctctcccggagccgtggctctgtgcagcgagtggctgcaggacggcgtcagcggcccgggcgcccacggtcctcacgacgcctttcgggcctccctgtcttgcgtgctgcctgactttcttcaggggcgagcccctggcagttacgtaggcgcatgtttcgaccgcttgttacatcctgatgccgttcctgccctctttaggaccgtccccgtgtttacacttccctctcagctcccagattttcttggggcactgcagcagcccagggcaccacgttcaggacgcctgcaggagagagccgaacaggtcagcagagctctccaacctgccctcgactcctacttccatccacccggaacaccagcgccaggccgcggagtcggtccgggagctggtcctggggccggtgacggaacctag

SEQ ID NO: 120984 - DNA, 2163 bp, synthetic construct
  misc_feature 1..2163: note = Description of Artificial Sequence: Synthetic coding sequence
  source 1..2163: mol_type = other DNA
atgccggtgccgtggtttctcctgtccctggcccttggcagatcacctgtggtgctgagcttggaaagattagtgggacctcaagacgctactcactgctctcccggactgtcctgcaggctctgggatagtgacatcctctgcctgccaggcgatattgttcctgctcctgggccagtcctcgctcctactcaccttcagaccgagctggttctccgctgccagaaagagactgactgcgacttgtgcttacgagtggctgtgcacctggctgtgcatgggcattgggaggaacccgaggacgaggaaaaattcggaggggctgccgatagtggggtggaggagcccaggaacgcttctttgcaggcgcaggttgtactgtcttttcaggcatatcctactgccaggtgtgtgctcttagaggttcaggtccccgccgcattggtgcagtttggacagagtgtgggcagcgtcgtgtatgattgtttcgaggcggcactcggcagtgaagtgaggatctggagctacacacagccaagatacgaaaaagaactgaatcacacccagcaactcccagactgcagagggctggaggtctggaatagcatcccctcctgctgggcactcccatggctgaatgtcagtgcggatggggataatgtacacctggtcctgaacgtctcagaggaacagcatttcggactcagcctgtactggaaccaggtgcaaggtcctcccaagcctcgatggcacaagaatctgaccggcccccagataattacactgaaccataccgacctcgtgccttgtctttgtatccaagtgtggccgctcgaacccgattctgttcgcacaaatatttgtccgtttagagaggatccccgagcccaccaaaacctttggcaggcggcccgccttcagcttctgacactccagagctggctgttggacgctccttgttctctgccagcagaagcagccctctgttggagggcaccaggtggagacccatgtcagccactcgttccaccactgtcttgggagaatgtaaccgtggacaaggtcctggagttccccctgctcaaaggccacccaaatctctgcgtccaggtgaacagtagcgagaagcttcagctacaagagtgtctttgggccgacagcctgggtccgctcaaggatgacgtcctcctacttgagacacgcggaccccaagacaatcggtctctgtgtgctctggagcccagtggttgcacctctctgccatcaaaggcgtccacacgggccgcacggctaggcgaataccttttacaggacctgcagtctggtcagtgtttgcagctctgggacgatgaccttggcgctctctgggcatgccccatggacaaatacatccacaagcggtgggccttggtttggttggcctgtctgctcttcgccgctgctttatctctgatactcctgttgaaaaaggaccacgccaaaggctggcttagactgctgaaacaggacgtgcggtctggcgccgccgcacgagggagagccgcactgctcctttactcagccgacgatagtgggttcgagcgcctcgtgggggcgctggccagtgccctgtgccagctacccttaagagtggcagttgacttatggagtagaagggaactttccgcccagggcccggttgcttggttccatgctcagcgacgccagacccttcaagagggcggagtggtcgtactgttattttccccgggtgctgtggccttgtgttccgagtggttgcaggatggagtgagcggaccaggagcacatggccctcatgatgcatttcgggcctctctctcctgtgttctgcctgattttttacaaggtcgcgcccctgggtcatacgtcggcgcttgcttcgaccggttactgcatcccgatgccgtccccgctctcttcagaactgttccagtgttcactttaccaagtcagctgcccgactttctcggcgccctccagcagcctcgcgccccacggtccggcagactgcaggagagagctgagcaagtgagcagggctttacaaccggccttggacagctacttccacccacctggaaccccagccccaggacgtggagtggggccaggcgcaggccctggcgccggcgatgggacgtag

SEQ ID NO: 120985 - DNA, 1641 bp, synthetic construct
  misc_feature 1..1641: note = Description of Artificial Sequence: Synthetic coding sequence
  source 1..1641: mol_type = other DNA
atggcttatcccaccgcgcggtgcgttctcttggaggtgcaggttcccgcagccctggtgcagttcggacagtccgtggggtcggtagtctacgattgtttcgaggcagcgctgggcagcgaagttcggatttggtcctatactcagccaagatatgagaaagaactgaaccatacccagcagctgcccgcactgccatggttaaacgtgtctgctgatggggacaacgtgcatttggttctgaatgtgtcagaggaacagcatttcggcctgagcctgtattggaatcaggtgcagggacccccaaaaccccgctggcacaagaatctcaccgggccgcaaattataacactcaatcatactgatctggtgccttgcctttgtattcaagtatggcccctcgagcccgacagcgttagaacaaacatatgtccatttcgtgaggatcccagagcacaccagaacctatggcaagcagctagactacagttgctgaccctccagtcctggctactggacgctccatgttcccttcccgcagaagcagcactctgttggcgcgcccctggtggggatccttgccagccgctggttccccccctttcctgggagaacgtgactgttgatgtgaactcctccgaaaagctacagctgcaggaatgtttgtgggcggacagcctgggccctctgaaagatgatgtgcttcttctagaaacccggggacctcaggataatcggtccctgtgcgccctggaaccgagtggatgtaccagcctgccctctaaggcctccacccgtgccgcccggctgggagagtatcttcttcaggatctacagtcaggccagtgcctgcagctctgggacgacgatctcggcgccttgtgggcatgtcctatggacaagtacattcataaaaggtgggcgttagtttggctggcctgcctcctttttgctgcagcattgtccctgatattgttactgaagaaagaccacgcaaaggctgcggctagaggcagggccgccttactcctttattcggccgatgacagtggatttgagcggcttgttggagcactggcttcagccctgtgtcaactccctctcagagtggccgttgacttgtggagcaggagggaactgtccgcccagggaccagtcgcatggttccatgcccagagaagacagaccctgcaagaggggggggtagtggtcctgctgtttagcccgggcgctgtcgcattgtgcagcgaatggctccaagatggagtttctgggccaggagcacatggcccacatgatgccttccgggccagtttgagctgtgtgctgcccgattttttgcagggcagagcgcctggttcttatgtcggcgcttgtttcgacagactgttgcaccctgacgctgttcctgcgctctttcgcaccgtgccggtatttacactaccctctcaactgcctgacttcctgggcgccctgcagcagccaagggctccccggtcgggaaggctgcaggaaagggccgagcaagtgtctagggccttgcagcccgccctcgacagctattttcatcctcctggtacaccagcccctggcaggggagtgggccccggcgcgggccccggcgctggggacggcacatag

SEQ ID NO: 120986 - DNA, 2124 bp, synthetic construct
  misc_feature 1..2124: note = Description of Artificial Sequence: Synthetic coding sequence
  source 1..2124: mol_type = other DNA
atgcctgtaccttggttcctgctgtctctagcactgggtcggtcacctgttgtattgtcccttgagcgcttagtggggccccaggacgctacacattgcagtccaggtttaagctgtaggttgtgggacagtgacattctttgtttacccggtgatatcgtgccagctcctgggcctgtgctggctcccactcacctccaaacagaactggtgctccggtgtcaaaaggaaactgattgtgacctctgtctgagggtggctgtacacctagctgtgcacggacattgggaagaacctgaagatgaggagaagtttgggggtgccgccgactcgggtgtggaggagcccagaaatgccagcctccaggctcaagttgtcttatcgttccaggcttaccctacggccagatgcgtgcttcttgaggtgcaggtgccagcggctctcgtccagttcggacaatcagtggggtccgtcgtttacgattgctttgaagctgctctaggcagcgaggtgcgcatttggtcctatacacagccacgctacgagaaggaactgaatcacacacagcaactcccggactgcagaggtttggaggtatggaatagtatcccctcgtgctgggccctgccttggttgaatgtgagcgccgatggagataatgtccatctggtcctcaatgtgtccgaagagcagcactttggtttgtcactgtattggaatcaagtccaagggccacctaaacctagatggcataagaacctgaccggtccacagattatcacacttaatcatacagacctggtcccctgcctttgcatccaggtgtggccacttgagcccgactccgttcgaaccaacatctgcccattcagggaggatcctcgagcacatcaaaatttatggcaggccgctagactacagctcttgaccctgcaaagttggctcctggatgcgccttgttctctccccgcagaggctgctctctgttggcgtgcaccgggtggggatccctgccagcccctggtccctcccctgagttgggagaatgtcactgtagacaaggtgctcgaatttccgttattaaaggggcatcccaacctctgcgtgcaggtaaacagctccgagaagctacagctgcaagagtgcctatgggccgactcgctggggccactgaaggacgatgtccttctgctggaaacccgaggtcctcaagataaccgctctctgtgcgcgctggagccaagcgggtgtacctccctgccaagcaaagcatccacacgcgcggccaggcttggtgagtatctgctgcaggatctgcagagcgggcagtgccttcagctgtgggatgacgatctcggcgctctatgggcctgccctatggataaatatatccacaagcgttgggcattggtgtggctggcatgtctcctgttcgccgcggcactctctttaattcttctgttaaagaaagatcacgccaaggctgcggctaggggcagggccgcccttctgctatatagtgccgacgactccggttttgagagactggtgggcgcgctggccagtgccctctgtcaactgcccttgcgcgtggccgtcgatctatggtcccgaagagagctgagcgcccaaggaccagtagcatggttccacgcccagagacgccaaaccctccaggaaggcggagtagtcgtcctgttgtttagtcctggcgcggtagccctttgctccgagtggctacaggacggtgtttctgggcctggggcccacggcccgcacgacgcattcagagcatccctttcctgcgtcctgccagactttctacagggccgcgccccaggttcatacgtgggagcctgtttcgataggttgcttcacccagacgccgtgcctgccctgttccggaccgtacccgtcttcacactccccagtcagcttccggatttcctcggggccctacagcaaccacgggccccccgctctggtcggctacaggagcgcgctgaacaagtgtctcgtgctctgcagcccgccttggatagctactttcacccacctggcactccagcccctggtcggggtgtaggaccaggcgcaggaccaggggcaggtgatggaacatag

SEQ ID NO: 120987 - DNA, 213 bp, synthetic construct
  misc_feature 1..213: note = Description of Artificial Sequence: Synthetic coding sequence
  source 1..213: mol_type = other DNA
atgcctgtcccttggtttctgttatcgctggcgttgggtcgctctcccgtggtgctatccctggagcgcttggtgggacctcaggatgcgactcactgctccccagggctgagctgtcgcctgtgggtcacatattctgcctgtttggggacttcatgtctgttacgcgccccatgctggaggctgcgaacctgtcggcagtcatggtgttag

SEQ ID NO: 120988 - DNA, 2067 bp, synthetic construct
  misc_feature 1..2067: note = Description of Artificial Sequence: Synthetic coding sequence
  source 1..2067: mol_type = other DNA
atgccagtcccgtggtttttgttgtccctggcattgggaagaagtcctgtggtcctgtccttggaaagactcgtaggaccccaggatgccactcactgcagtcccggacttagctgccgactgtgggattccgatatcttatgtttaccaggagatattgtgccagcacccggaccagtcctggccccaacccatctgcagactgagctagtattacgatgccagaaagagaccgattgcgatctgtgcctgcgggtggctgtgcaccttgccgtgcacgggcattgggaggagcctgaagatgaagagaaatttggcggcgctgctgattccggtgtggaagagccccgcaacgcctccctgcaggcacaggtggttctgtcatttcaggcataccccacagctcgttgcgttctgctggaggtccaggtgccagccgctctggtacagttcggacaatctgtagggtccgtggtatatgattgtttcgaggctgccctcgggagtgaagtacgcatctggagttatactcaacccaggtacgagaaagagttgaatcacacccagcaactgcccgccctcccgtggctcaatgtctccgccgacggagataatgtacatttagttctcaatgtaagcgaagaacagcactttggtctctctctatactggaaccaggtgcagggaccacctaagcctagatggcacaagaacctgacagggcctcagataatcactctgaaccatactgacctggtgccctgcttgtgtatacaggtgtggccactggagcctgattcagttcgcaccaacatctgccctttccgggaggacccccgcgctcaccaaaatctgtggcaggctgcacgcctacagttactcactctgcagagctggctacttgacgccccctgctccttacccgccgaagcagccctatgttggcgagcccctggaggtgacccttgccagcccttagtgccccccctgtcttgggagaacgtcacagtggacgtgaattccagcgagaagctgcagctgcaggaatgcctatgggccgactcactcgggcctctgaaggatgacgtcttgctgttggagaccaggggcccacaagataaccggtctctgtgtgccctggaaccatctggatgtaccagtctgccctctaaagcaagtacaagggccgcgcggcttggagaatacctcttacaggaccttcagagcgggcagtgtttacagctttgggacgatgacctcggcgctttatgggcctgtcccatggacaagtatatccacaaaaggtgggcccttgtctggctggcatgtctcctgttcgccgccgcattgtcgctgatcctgctgctgaagaaggatcatgcaaaggggtggttgcgtttactcaagcaagacgttcggagcggcgccgccgcccggggccgggcagccctcttgctctactctgccgatgattcaggcttcgaaaggcttgtgggagccctcgcaagtgccctctgccagctgcctctgcgagtggcagttgatctgtggagccggagagagctttctgcccaagggccggttgcttggttccatgctcagcgcaggcagacgcttcaggaagggggtgttgttgtgctcctgttctcccctggcgccgttgcgctgtgcagcgaatggctgcaggatggagtcagtggccccggagcccacgggccacatgatgcatttagggcctccctgtcatgtgtgttacccgactttctgcaagggagagctcccggttcctatgtgggagcctgctttgacaggctgctccaccccgacgccgtgccagctctgttccgcacagtccccgtgtttactctgccatcccaactgcctgattttctcggggctctccaacagcccagggcccctaggtctggacgcctccaggagcgggccgagcaagtctcgagggcactgcaaccagctctagattcctacttccatccgcccggtacccctgctcccggccgaggagtggggccaggagctggtcctggggccggagatggtacgtag

SEQ ID NO: 120989 - DNA, 2220 bp, synthetic construct
  misc_feature 1..2220: note = Description of Artificial Sequence: Synthetic coding sequence
  source 1..2220: mol_type = other DNA
atggccccatggctacagctctgcagtgtgttttttacagtgaacgcttgcctgaatggcagtcaactggccgtggcagctggcggctccgggcgcgctaggggagctgacacatgcggatggcgcggagtgggccctgccagccgcaacagcggtctttacaatattactttcaaatacgacaactgtacaacctaccttaaccctgtgggcaaacacgtcatcgctgatgcacagaatatcactattagtcagtacgcgtgtcatgaccaggtggcagtgactatcctttggtctcctggtgctctagggattgaattcctgaaaggctttagagtaatcttagaagaactgaagtccgaaggacgacagtgccagcaactgattttgaaagacccgaagcagctcaactcaagttttaagcggactggtatggagagccaaccctttttgaatatgaagtttgaaactgattactttgttaaagtggtccctttcccgagtattaaaaacgagtccaactaccatcccttctttttcaggacccgtgcctgtgacctcctgctccagccagacaatttggcttgcaagccattctggaaacccagaaatctaaacatttcccagcacgggtcagacatgcaggtttcttttgaccacgccccccacaatttcgggttccgttttttctacttgcactacaaactgaagcacgagggcccctttaaacgcaaaacatgtaaacaggagcagaccactgaaaccactagctgcctgctccagaatgtgagccccggagattatattattgagctggttgatgatacgaacaccacccgaaaggtgatgcattacgccctgaaaccggtgcattcaccctgggccggccccatccgggctgtggctatcactgtgcctctcgtcgttatatccgcctttgctactctttttaccgtgatgtgcaggaagaagcagcaggaaaacatatacagtcacctagacgaagagtcatccgagtcttccacatacactgccgctctcccgcgtgagcggctccggccaagacccaaagttttcctttgctactccagcaaggacggacaaaatcatatgaatgttgtgcagtgctttgcttatttcctccaggacttctgtggctgtgaggtggctctcgatctctgggaagacttctcgctctgccgagagggacagcgcgagtgggtcatccagaagattcacgagtcccagtttatcatcgtcgtgtgctcaaaggggatgaaatattttgtggacaagaagaactacaaacacaagggaggtggcagaggctctggaaagggagagctcttcttagtggccgtctccgcaatagcagagaagttaagacaggcaaagcagtctagttccgctgccctgagcaaatttatcgccgtttacttcgattactcatgcgagggtgacgttccaggcattctggatctgtccaccaagtacaggctgatggataacctcccgcagctgtgcagccatcttcacagccgggaccatggtttgcaggaacccggtcaacacactcgtcagggatcccgaagaaactacttccgctccaaatccggccgcagcctgtatgtggctatttgtaatatgcatcagttcattgacgaggagcccgactggtttgagaaacagttcgtgcctttccatcctcctcccttgcggtacagggaacccgtgctagaaaagtttgatagcgggttagtgcttaatgacgtgatgtgtaagcccggtccagagagcgacttttgtttgaaagtcgaagctgccgttctgggggccaccggcccagcggattctcagcatgagagtcagcacggcgggcttgaccaggatggcgaagctcggccggctcttgacgggtccgctgctttacagcctctccttcacactgttaaggcaggctcgccctcagacatgccacgagactctggtatttatgactcgtctgtgccatcttcagagcttagccttccgcttatggaagggctgagcaccgatcagactgaaacgtcttcattaacagagagcgtatcaagttccagtggattgggcgaagaggagccacccgcactcccatctaaactcttgagtagtggaagttgcaaggcagatctgggatgcaggtcttatacagatgagctccacgctgtggcacctctttag

SEQ ID NO: 120990 - DNA, 1788 bp, synthetic construct
  misc_feature 1..1788: note = Description of Artificial Sequence: Synthetic coding sequence
  source 1..1788: mol_type = other DNA
atggagagtcagccctttcttaatatgaaattcgagaccgactattttgtaaaggtggtgccttttccgtcaatcaagaatgagtcgaattaccaccccttttttttcagaacacgggcctgcgacctcctgcttcagcccgataacctagcatgtaagcctttctggaagccccggaacctcaacatctctcagcacggaagtgatatgcaggtatcttttgaccacgcgcctcacaatttcggctttagattcttctatctccattacaagctgaagcatgagggtccctttaaacgaaagacatgtaagcaagaacaaaccacagagacgacctcatgccttctgcagaatgtgagcccgggagattacatcatagaactggtcgatgataccaatactacgcgcaaagtgatgcactatgctctcaaaccggtgcactcaccatgggctggtccaatccgcgctgtggccatcaccgttccacttgttgtaatttccgccttcgctactctgttcactgtcatgtgtaggaagaagcagcaggagaacatctactctcacctggacgaagaatcttcagaatccagcacgtacaccgccgccctgccgcgagagcgcctccggcctcggcccaaggtcttcctttgttactccagcaaagatgggcagaaccacatgaacgtggtgcagtgctttgcctatttccttcaggatttctgtggctgcgaagtcgctctcgacctatgggaagattttagcttgtgtagagagggtcagcgcgagtgggtcattcaaaaaatccatgagtctcagtttatcattgtagtgtgtagcaaaggcatgaaatacttcgtcgataagaagaactacaagcataagggcggaggccgtggtagcggcaagggcgaactgtttttagtggccgtgagcgctatcgctgaaaagttgaggcaggctaagcagagctctagcgcagcattaagtaagttcatcgcagtgtactttgactacagttgtgaaggcgatgtgccgggtatcttggacttgagcactaaatatcggctgatggataatcttccccagctgtgctcacacctgcattcaagggatcacggccttcaggagccaggacagcacacacgccagggctcacggcgaaactattttcgctcaaagtccggcagaagcctgtatgtagccatctgtaatatgcaccagttcatagacgaagagccagattggttcgaaaagcagttcgtcccgtttcacccacctccactgcgctaccgggagccagtcttggagaagtttgatagtggcctggttcttaacgacgtcatgtgtaagccagggcccgaaagtgatttttgcctgaaggtcgaggccgccgtgcttggtgcaacaggccctgccgacagccagcatgagtcacagcatggagggctggatcaagacggagaggcccgacccgccttggatgggtccgctgctctgcaacctcttcttcataccgtaaaggccgggtcgcctagcgacatgccaagggatagcggaatttacgacagctctgtcccctcctcagagctgtccttacccttaatggaagggttgtcaactgaccagacagaaacatcttctctgaccgaaagcgtgtctagttcctctgggttgggcgaagaagagcctccagcgctgccaagtaagctgctaagcagcgggagttgcaaagcagacctagggtgtagaagctatacagatgagctacacgccgtcgctcctttgtag

SEQ ID NO: 120991 - DNA, 2148 bp, synthetic construct
  misc_feature 1..2148: note = Description of Artificial Sequence: Synthetic coding sequence
  source 1..2148: mol_type = other DNA
atgccccgagcaagcgccagcggggtgccagcgctttttgtgagcggagagcagggtgtcggacccgccagcaggaacagtggcctttataatatcacgtttaagtatgacaattgtacaacctacctcaatccagtgggcaagcatgtcatcgccgacgctcagaatattactatcagccagtacgcatgccacgatcaggtggccgtaactattctttggtctccaggcgctctgggcatcgaatttctcaaaggctttcgagtgattctggaggaactaaaaagtgaagggcgccagtgccagcaactgatccttaaggaccccaagcaactgaatagcagcttcaaacgcacaggcatggaatcccagcccttccttaatatgaagtttgaaaccgattatttcgttaaggtggtcccttttccctctattaaaaacgagtcaaactaccaccctttctttttcaggacgcgggcgtgcgatttgctgctacaaccggacaacctcgcttgcaagcccttctggaagcctagaaacctcaatatttcacaacacggctctgatatgcaagtctccttcgaccatgcgccccataactttgggttccggtttttctacttacactataagttgaagcacgaaggtcccttcaagcgcaagacttgcaaacaagaacaaaccacagagaccaccagctgtttgcttcagaatgtgtcaccaggggactatatcatcgagctggtggacgatactaacactacgagaaaggtgatgcattatgccttaaagcccgtgcatagtccttgggcgggccccatccgtgctgtggcaattacagtgccccttgtggtgatatcagcgttcgccacactgtttacggttatgtgccgaaagaaacagcaggagaatatctattcccacctcgacgaagaaagctcggagtcatctacctatactgcagcactacctagggaacggctgcgtccacgcccaaaagtcttcctgtgctattccagtaaagacggtcagaaccacatgaacgtggtgcagtgcttcgcctatttcctgcaggatttctgcggatgcgaagtggccctagacctttgggaagatttctctctgtgccgtgagggtcaacgggaatgggtgatacaaaagatccatgagagccagttcatcatcgtagtctgcagcaagggcatgaagtactttgtggacaagaagaattacaagcacaaaggcggtggccggggatccgggaagggagagttgttccttgtggcagtgagcgccatcgccgagaagttacgacaggccaaacagtcgagttctgcggctctctccaagtttatcgccgtgtattttgattacagctgtgagggggacgttcccggcatcctggacttatcgaccaagtataggctgatggataatctcccccagctatgttctcatctgcatagtagggaccatggtctccaggagccaggacaacacacaaggcagggaagtagacgtaattattttaggagcaagtccggtagatcactctatgtcgctatctgcaacatgcaccagtttatcgatgaggagcccgactggttcgagaaacagttcgtgccttttcacccaccacctcttcgctatcgggaaccagtcttagaaaaattcgatagcgggctcgtgttgaatgacgtgatgtgtaaaccaggacccgagagcgatttttgcctgaaggtcgaagccgctgttctcggggctactggacctgcagatagccagcatgagtcgcagcacggcggactcgaccaggacggagaggcccgccccgcactagacgggagcgcggccttgcagcctctgctccacaccgttaaagccgggtcgccatccgacatgccccgggactcaggcatatatgactcatctgtgccctctagtgaactttccctgccccttatggaaggcctctccaccgatcagaccgaaacttcgtctctcacagagtccgttagtagtagcagcggtttaggtgaagaggagccaccggctctaccgagtaagctcctaagcagcggctcatgtaaagccgacctggggtgtcggtcctacactgacgagctgcatgcagtggcaccactttag

SEQ ID NO: 120992 - DNA, 1788 bp, synthetic construct
  misc_feature 1..1788: note = Description of Artificial Sequence: Synthetic coding sequence
  source 1..1788: mol_type = other DNA
atggagtctcagccctttctcaacatgaagtttgaaacagattattttgtaaaagtggtcccgtttccttccattaagaatgaaagtaattaccaccctttttttttccgcactcgcgcctgtgatcttctgctgcaaccagataatctcgcatgcaaaccattctggaagcctcgcaacctgaatattagtcagcatggatcagacatgcaagtgtcctttgaccacgccccccataatttcggcttcagattcttttacttgcactacaaactgaagcacgagggccccttcaaacggaagacgtgcaagcaggaacagaccacagagaccacatcatgtctgctgcaaaatgttagcccaggtgactacattatagaattggtggacgataccaatacaacgagaaaggtgatgcattatgccttgaagccagttcatagtccctgggccggacctatccgtgccgtggcgatcactgtcccacttgtcgtaatcagcgcatttgccacactgtttaccgtcatgtgccgaaaaaagcagcaggagaatatttactctcacttggatgaggagtcttccgaaagctctacatatacagctgctctgccacgggagaggcttaggcctaggcccaaggtctttctctgctattctagcaaggacggtcagaatcacatgaacgtcgtgcagtgctttgcatatttccttcaggacttttgcggctgtgaggttgctctcgatctctgggaggacttcagtctctgtcgggaggggcaaagggagtgggtgatccagaagatccatgagagccaatttataatcgtggtttgctcaaagggcatgaagtattttgtcgacaaaaagaactacaaacataagggaggtggcagaggttctgggaaaggagagttattcctcgttgctgtgtcagccatcgccgagaaactgcgacaggcaaaacagtccagttccgcagcactcagcaagtttatcgcagtgtatttcgactattcttgcgagggcgacgtgcctggtatactggacctgtcgacaaagtatcgccttatggataatctgccccagctctgttcgcatctgcactctagagaccatgggcttcaggaaccaggccaacatacccggcaagggtctcgcaggaactatttcagatccaaatctgggaggtccctctacgttgccatatgtaacatgcatcaattcattgacgaggagccagactggtttgaaaagcagtttgtaccttttcatccgcctcctctccgatacagggagcctgtcctcgagaaattcgacagtggcctcgtcctgaacgatgttatgtgcaagccagggcctgagtctgacttttgcctgaaagttgaagcggcagtcctgggcgcaacgggcccagccgacagccagcatgaatcacagcacggcgggctggaccaagatggcgaggcccgtccagccttggacgggtctgccgcgttgcagccactgttacacacggtgaaggctggaagtccctccgacatgcctagagactccgggatatatgacagctccgtaccaagctcagaactcagcctgcctctcatggagggtttgagcaccgatcagaccgagacaagctctctaacagagtccgtcagttcgtcgagcggactcggggaggaggagccgccagctctgcctagcaagctcttgagtagtgggtcatgcaaagcggaccttggatgcaggtcatacaccgacgagctacatgccgttgccccgctatag

SEQ ID NO: 120993 - DNA, 222 bp, synthetic construct
  misc_feature 1..222: note = Description of Artificial Sequence: Synthetic coding sequence
  source 1..222: mol_type = other DNA
atggaatcgcagccattcctgaatatgaagtttgagaccgactactttgtaaaagtcgtcccctttcccagcatcaaaaacgagagcaattatcatccattttttttcagaaccagagcttgcgatcttttgcttcagcccgacaatctggcgtgtaaaccattctggaagccccggaaccttaatatcagtcagcacggttctgatatgcaagtgagctag

SEQ ID NO: 120994 - DNA, 1671 bp, synthetic construct
  misc_feature 1..1671: note = Description of Artificial Sequence: Synthetic coding sequence
  source 1..1671: mol_type = other DNA
atgggtttttggattctcgcaatcctcactatcctcatgtattctaccgctgctaagttctccaagcagtcatggggtcttgaaaatgaggcgctaattgtgcgatgccctcgtcagggcaaaccaagctacacagtcgattggtactattctcagacaaacaaatccattccaacccaagagcgaaatcgagtttttgcctccggtcagctactgaagtttctgccagctgccgttgccgactctggtatttatacatgtatagttcgatcccctacatttaatagaaccggttacgccaatgtgaccatctacaaaaagcagtccgattgcaacgtacccgactatctcatgtattcaacagtgagtggcagcgagaagaactcgaagatttactgtcccacgattgatttgtataattggactgcaccactggaatggttcaagaattgtcaagctctccagggatcacgatacagggctcataagtcgttccttgttatagataatgtgatgaccgaggatgcaggagattacacctgtaagtttatccacaatgagaatggggctaactatagcgtcacagcgaccaggtcctttaccgtgaaagacgagcagggctttagcctcttccccgtgattggtgctcctgcacagaatgaaattaaagaggttgagatcggcaaaaatgcgaacctgacctgttccgcttgcttcggcaagggaacacagttcctggctgctgtcttgtggcagctgaacgggactaagataacagacttcggagaaccaaggattcagcaagaagagggacaaaatcagtccttttcaaatggccttgcgtgcttggacatggtgctgagaattgccgatgtgaaagaagaagatctcctgctgcaatacgattgcttggccctcaacctgcacgggttgcgacggcacacagtgcgtctgagtcgaaaaaatcctattgaccaccacagtatttactgtattatcgcggtgtgcagtgtgtttctgatgttaatcaatgtcctggtgatcatcctgaagatgttttggatcgaagcaacactgctgtggcgcgacatcgctaaaccctacaagacacggaatgacggaaaactctatgacgcgtacgtggtttatcccagaaactacaagagcagtacagacggtgcatcacgcgtcgaacactttgtacatcaaattctgcctgacgttctggagaacaagtgtggttacaccctctgcatctacgggagagatatgctaccaggggaagatgtggtgaccgcagtagagacaaacattcggaagtccagaaggcatatctttatactcacaccccagattactcataataaagaatttgcctacgaacaggaagtagcgctacactgcgcgctcattcaaaacgatgccaaggtcatcctcattgagatggaggccctgagtgagctggatatgctgcaagctgaggcactccaggacagtctgcagcaccttatgaaggtgcagggcactatcaaatggcgcgaggatcacatcgccaacaaacgctcgttaaattcaaaattttggaagcatgtcagataccagatgcctgtccctagtaagatccccagaaaagcttcttccctgacgcctctggccgctcaaaagcagtag

SEQ ID NO: 120995 - DNA, 513 bp, synthetic construct
  misc_feature 1..513: note = Description of Artificial Sequence: Synthetic coding sequence
  source 1..513: mol_type = other DNA
atgaactgtcgggaattgcccctaacgctctgggtcctcatcagcgtctcgaccgccgaaagttgcactagtcgtcctcatatcaccgtggtggagggagagccattttacttaaagcactgcagctgctctctcgcgcacgagatcgaaaccaccaccaagtcctggtacaagtcatcaggatcccaggaacatgtggagctgaatcctagaagctccagccgcatcgctttgcacgactgtgtcctggagttctggcctgtggagcttaacgacactggctcctacttcttccagatgaagaactacacacagaaatggaagttgaatgtgattcgccgcaacaaacattcttgctttacggagcggcaggttactagcaagattgtggaggtcaaaaagttttttcagatcacctgtgagaattcatattaccagacgctggtgaattcaacctccctctacaagatcggtccacctatttgtaggaagacttctagcggcttgcactag

SEQ ID NO: 120996 - DNA, 1626 bp, synthetic construct
  misc_feature 1..1626: note = Description of Artificial Sequence: Synthetic coding sequence
  source 1..1626: mol_type = other DNA
atgaattgccgcgaactgccccttaccctttgggtgctgatttccgtaagcacagccgagagttgcactagtagaccccacataacggttgttgaaggcgagcccttctatttgaaacattgcagctgctcactcgctcacgaaatcgaaacgactaccaagagctggtacaaatcatcagggtctcaggaacatgttgagctgaatccacgatctagctcccgtattgctctccatgactgtgtgttagagttctggcctgttgaattaaatgacaccggttcttatttttttcagatgaaaaattacacacagaaatggaaactgaatgtgatcaggaggaataagcacagctgctttacagaaaggcaggttaccagcaagatcgtcgaggtcaagaagttttttcagattacatgtgaaaacagctactaccagaccctggttaattcgactagtttgtacaagaattgtaaaaagttgctcctagagaacaacaaaaatcctactatcaagaaaaacgctgaattcgaagaccagggttattacagttgcgtccattttctgcaccacaacgggaaactgttcaacataactaaaacctttaatataaccattgtcgaggacagatcgaacatcgttcctgtgcttttaggtcccaagctgaatcatgtagcggtggagctgggaaaaaacgttagacttaattgctctgccctgctgaacgaggaagatgtgatctattggatgtttggagaggaaaatggtagcgaccccaacatccacgaagaaaaagagatgcggatcatgacccccgagggcaagtggcatgcaagcaaagtattgcgtattgaaaacatcggtgagagcaatctcaatgtgctgtataactgcaccgtagcgtcaactggtggtacagacaccaaatccttcatcctggttagaaaggcagacatggctgacataccaggccacgtgttcacacggggtatgatcatcgccgtcctcattctcgtggccgtggtgtgtctggtgaccgtctgcgtgatataccgggtagatctcgtgctcttttacaggcacctcactcgtcgcgatgaaacgctgaccgacggaaagacttatgatgcattcgtgtcttaccttaaagagtgtaggcccgaaaatggggaggagcacaccttcgccgtagaaattctgcctcgagtgctggagaagcacttcgggtataaactctgcatcttcgagagggatgttgtaccaggaggggcagtggtggatgagatccacagtttgatagaaaaaagtagacgcctaattatcgtgttaagtaagagctatatgtcaaatgaggtccggtatgagcttgagtctggcctgcacgaagcactggtagaaagaaaaattaaaattatcctgattgaatttaccccagtgactgattttacattcctaccccagagcctaaagctgctgaagtctcatagagtgctaaaatggaaggccgataaatccctgtcctataacagccgattttggaaaaacctcctatacctcatgcccgcgaagaccgtaaaaccggggagggatgagcccgaagtcctgcccgtcttgtccgagtcttag

SEQ ID NO: 120997 - DNA, 1626 bp, synthetic construct
  misc_feature 1..1626: note = Description of Artificial Sequence: Synthetic coding sequence
  source 1..1626: mol_type = other DNA
atgaattgcagagagcttcctctgacactgtgggtcctcattagtgtgtcaaccgccgaatcatgtacatcgcgcccacatataaccgtggtggagggggagcctttttacctgaagcactgctcatgctcgctcgcgcacgagatcgaaaccaccactaagagctggtacaaatcgtccgggtcccaagaacatgtcgagctgaatccaaggtcctccagtcggattgcgttgcacgattgcgttctcgaattttggccagtcgaattgaatgatactgggtcctatttttttcagatgaagaactatacccagaaatggaagctgaatgtaatccgccgcaacaagcactcctgctttacggagcggcaggttaccagcaagattgtggaggttaagaagttctttcagattacatgcgagaatagttactaccagaccctggtgaacagcacgtccctgtataaaaattgcaaaaaacttctgctcgagaacaataagaatcccacaatcaagaagaatgccgaattcgaagatcagggctattacagctgcgtgcactttctccaccacaatgggaagctcttcaatataacaaaaacttttaacatcactatagtagaggaccggagcaatattgtcccagtgctgcttggccctaagctcaatcacgtagccgtggagctggggaaaaatgtaagactgaactgttctgcgctcctgaatgaggaggacgtgatttactggatgttcggagaggaaaatggcagcgatccaaatatccacgaggaaaaagaaatgagaataatgacaccagagggaaagtggcacgcctcaaaggtgctgcgaatagagaacataggagaaagcaacctgaatgtgctctataattgcaccgtggccagtactggaggaacagacacaaaaagctttatcctggttagaaaagcagatatggccgatattccaggccacgttttcacgcgcggtatgattatcgcagtgctcatcctcgtcgcggtagtatgtctggtgacagtctgcgtgatttaccgcgttgatcttgtcctgttttaccggcacctgacacgacgagatgagactctcacagatggtaaaacctatgatgccttcgttagctacctgaaagagtgtcggccagagaacggagaagagcacacattcgccgtagagattctcccccgcgtcctggagaaacattttgggtacaaactgtgtattttcgagagggatgtggttcctggcggggctgtggtcgatgaaatccactcactgattgaaaagtcccgacgacttattatcgtgctgtctaagtcctatatgtcaaacgaggttaggtacgaactggagagcgggcttcacgaagcactcgtggagcgaaaaatcaagataatcctgatagagtttaccccagtgaccgacttcacattcctcccccagagtcttaagctcttgaaaagtcacagggtgctgaaatggaaggcggacaaaagcctctcgtacaactctaggttttggaaaaatctactctatctcatgcctgccaaaacagttaagccaggccgcgacgaacctgaggtgttgcccgtgttatccgagagctag

SEQ ID NO: 120998 - DNA, 1800 bp, synthetic construct
  misc_feature 1..1800: note = Description of Artificial Sequence: Synthetic coding sequence
  source 1..1800: mol_type = other DNA
atgctctgcctaggatggatcttcctttggctggttgccggggagcgaatcaagggattcaacataagcggatgttctacaaaaaagctgctctggacttattcgacaagatccgaggaagaattcgtgctgttctgcgatcttcccgaacctcagaaaagccacttctgccaccgaaatagactgagccccaaacaggtgcctgaacacctcccattcatggggtcgaatgatttgtccgatgtgcaatggtaccagcaaccttcgaatggcgaccccctggaagacatcaggaaatcttacccacatattattcaagacaagtgcactttacattttctgacaccaggcgtgaacaattcaggaagttatatctgccgaccaaagatgatcaagagtccatatgacgtcgcatgctgcgttaaaatgattcttgaagtgaaaccacagacaaatgcaagctgtgagtattccgctagccacaagcaggacctgttgctgggtagcaccgggtcaatctcttgcccgagccttagctgccaaagcgacgcgcaatctcctgcggttacctggtataagaatggtaaactcttgagcgtggagagatcgaatcggatagtcgtggatgaggtgtacgactatcaccagggcacctatgtatgcgattatacccagtccgacactgtttccagctggaccgtgcgggctgtcgtgcaagtgcggaccatagtgggagatactaagctaaaacctgatattctggaccctgtcgaagacacactggaagtggaactgggaaagccccttaccatatcctgtaaagcccggtttggctttgaacgagtgtttaacccagttatcaagtggtatatcaaagactcagatctcgaatgggaggtctccgtaccagaggctaagtcgatcaagtcaactctgaaagacgagatcatcgagcggaatattatactggagaaagtaacacaaagagacttgagacgaaaattcgtgtgctttgtccagaacagcatcggcaacacaacacagtcagtgcagctgaaggaaaaacgtggcgtggtgctattatatatcctgttgggcaccatcggtacgttggtggcagtcttagctgcttccgcgctgctgtatcggcactggatcgagatcgtgctcctgtacaggacttatcaaagcaaagatcaaacactcggagacaagaaggacttcgacgctttcgtgagttatgctaagtggagcagttttcccagcgaggcgaccagctctctatctgaggaacatctcgctctttctctctttccagacgtcctggagaataagtatggttattctctgtgcttgttggaacgcgatgtcgcgcccggtggtgtgtacgcagaggacatcgtttcaatcattaaacggtcaaggcgcgggatctttatcctcagtcccaactacgtgaacgggccgtcgatttttgagctccaggccgccgtaaacctggccctggacgaccaaactctgaagttgatcctcatcaagttctgctacttccaagaaccggaaagcctgccacacctggtcaagaaggcactccgtgtcctgccaacagtcacttggaggggcctcaagtctgtccctcccaactctagattttgggccaagatgagatatcatatgcccgtcaagaattcccagggattcacctggaatcaactccggatcacttccagaatattccaatggaaaggcctgtccaggacagaaacaactgggcggagtagtcagcctaaagaatggtag

SEQ ID NO: 120999 - DNA, 1374 bp, synthetic construct
  misc_feature 1..1374: note = Description of Artificial Sequence: Synthetic coding sequence
  source 1..1374: mol_type = other DNA
atgatcctcgaagtcaaaccccagactaatgcctcgtgcgagtactcagcttcccacaagcaggaccttttgctaggatcgactgggtccattagttgcccttctctctcctgtcagtcagacgcgcaatctcccgctgtgacatggtataagaatgggaagctgttgagtgtggaaagaagcaaccggatagtggtcgacgaggtatacgattaccaccaagggacatatgtgtgtgattacactcaatctgacaccgtcagcagctggacagttcgggctgttgtgcaggtgcggaccattgtcggagacacgaagctgaaaccagatatcctggatcctgtagaagatacattggaagtggagctcgggaaacccttaaccatttcctgcaaggcccgatttggctttgaacgcgtcttcaaccccgtcatcaaatggtatataaaggatagtgacttggaatgggaagtttcagtgccagaagcaaagagcattaaaagcacgctgaaggatgaaattatcgagcgcaatatcatcctggagaaggtgactcagagggacctgagacgaaagttcgtttgtttcgtacagaatagcatcggcaataccactcagtctgtgcagttaaaggagaaacgcggcgttgtcctcctctatatcctgctgggaacaatcggtaccctagtggccgtcttggctgccagtgccttgctgtataggcactggatcgagatagtgcttctttaccggacataccagagcaaagaccaaacccttggagataagaaggacttcgatgccttcgtgtcttacgctaagtggtcgtccttccccagcgaggccacctccagcctgagcgaagagcatctggcccttagcctcttccccgacgtgctggagaataagtacgggtactctctgtgcctgcttgagagggacgttgcgcctgggggggtgtatgccgaggacatcgtcagcatcatcaagaggagccgtcgaggaatcttcattttgagccccaattatgtaaatgggccctccattttcgagttacaagcagccgtgaacctggccttggatgaccagactcttaagctgatactgatcaagttttgttactttcaggagcccgagtcccttcctcatctggtaaaaaaggctttgcgagtgctgcccactgtcacctggaggggactgaagagcgtgcctcctaacagcagattctgggctaaaatgcgctatcatatgcctgtcaagaacagccagggcttcacgtggaaccagctgcgtattacctcccggatatttcagtggaagggactgagcagaactgagaccacaggtcgatcttctcagcctaaagagtggtag

SEQ ID NO: 121000 - DNA, 135 bp, synthetic construct
  misc_feature 1..135: note = Description of Artificial Sequence: Synthetic coding sequence
  source 1..135: mol_type = other DNA
atgttatgcttgggctggattttcctctggctcgtcgcaggagagcggattaagggttttaatatttctggttgttccactaaaaagctgctgtggacctatagcacgcgatctgaggaggagttcgtgctgtag

SEQ ID NO: 121001 - DNA, 534 bp, synthetic construct
  misc_feature 1..534: note = Description of Artificial Sequence: Synthetic coding sequence
  source 1..534: mol_type = other DNA
atgaaattacaatgtgtgagcttatggctgttgggcaccatactgatcttgtgctccgtggataatcacgggctccgaagatgtctgatctccacggacatgcaccacatcgaggaaagcttccaggagattaaacgagcaatccaggcaaaagataccttcccgaacgtgacaatcttgagcacactcgagaccctgcagataatcaagcctctggatgtttgctgcgtaacaaagaatctattagccttttacgtggatcgcgtgttcaaggaccaccaagagcccaatccaaaaattctccgcaagattagcagtattgcaaacagctttttgtatatgcagaaaaccctccgtcaatgccaggaacagcggcagtgccattgtcgccaggaagccacaaacgctaccagggtgattcacgataattatgaccagttagaagttcacgctgccgccattaagagtctcggtgaactagacgtttttctagcgtggataaataagaaccacgaggttatgttttcagcttag

SEQ ID NO: 121002 - DNA, 648 bp, synthetic construct
  misc_feature 1..648: note = Description of Artificial Sequence: Synthetic coding sequence
  source 1..648: mol_type = other DNA
atgtgcactgaaggggcctttccccatcgtagtgcgtgctctctgcctcttacccatgtgcatactcacatccatgtttgcgtgcctgtgctttggggctcagtcccaagggggatgaaactgcagtgtgtgagcctttggcttctaggcacgatcctcatcctgtgcagtgtagataatcacggtctcagacggtgtctgattagcactgatatgcatcacattgaggaaagtttccaggaaataaagcgggcgatccaggccaaagatactttcccaaacgtcaccatcctctcaacattggagacattgcagattataaaaccactcgacgtgtgctgcgtgacgaagaacctacttgctttctatgtcgaccgggtcttcaaagaccatcaggagcctaaccccaagatactcagaaaaattagttccatagcaaattccttcctgtacatgcaaaagactcttagacagtgccaagaacagcgtcagtgtcactgcaggcaggaggccacaaacgccaccagagtgattcacgataactacgaccagctggaggtgcacgctgctgcaatcaagagtttgggagaactggatgtctttctggcatggatcaataagaaccatgaagtcatgttctccgcgtag

SEQ ID NO: 121003 - DNA, 792 bp, synthetic construct
  misc_feature 1..792: note = Description of Artificial Sequence: Synthetic coding sequence
  source 1..792: mol_type = other DNA
atggactcttatttactaatgtggggcctgctgactttcattatggtgcccggttgccaagcagaactgtgcgacgacgatcctcccgagatccctcacgcaaccttcaaggccatggcctacaaggaagggacgatgcttaactgcgaatgcaagcggggtttccgcagaataaagagcggcagcttgtatatgctatgtaccggaaacagctcccatagctcttgggataaccagtgccagtgtacttcctcagctactcgaaatactactaagcaggtgacacctcaaccagaagaacagaaggagcggaaaacgaccgagatgcaaagcccgatgcagcccgtggaccaagccagtctgccaggccactgtcgcgagccccccccgtgggagaacgaagctaccgaaagaatttatcattttgtggtgggtcagatggtgtattaccagtgcgtgcaggggtacagagcccttcaccgcggaccagcagagagcgtgtgcaagatgactcatggcaagacgcgatggacacagccccagctcatttgtacaggtgaagaaaagcctcaggcttccccggaaggacggcctgaatctgagacgtcttgtcttgtcacaacaactgactttcagatacagaccgagatggccgccacaatggaaaccagcatatttaccactgaatatcaggtggcagtagctggctgcgtcttcctgcttatctcagtcctgctactcagtggtctcacctggcagagaaggcaaaggaaatcaagacgtacgatttag

SEQ ID NO: 121004 - DNA, 603 bp, synthetic construct
  misc_feature 1..603: note = Description of Artificial Sequence: Synthetic coding sequence
  source 1..603: mol_type = other DNA
atggattcctaccttcttatgtggggtttgttgacattcattatggtgcctggctgtcaagccgagctgtgcgacgacgatccacccgaaatccctcacgccaccttcaaggcgatggcttataaggagggtacaatgctcaattgtgaatgtaaacggggctttcggaggataaagagcgggtctttatacatgctatgtacgggaaattcatcgcattccagctgggataatcaatgccaatgcactagttccgcgaccagaaacactacaaaacaagttactccccagccagaagagcagaaggagaggaagacgaccgagatgcagtctcctatgcagcctgtggatcaggcctccctacccggagaggagaaaccgcaagctagccccgagggccgtccagaatcagagacatcctgtcttgtcacgaccacagactttcagattcagacagagatggcagcaactatggagactagtattttcactacggaatatcaagtagccgtcgcagggtgcgtgtttctcttgataagcgtacttctgttgtcagggctcacatggcagagaaggcagaggaaaagccgcagaaccatctag

SEQ ID NO: 121005 - DNA, 819 bp, synthetic construct
  misc_feature 1..819: note = Description of Artificial Sequence: Synthetic coding sequence
  source 1..819: mol_type = other DNA
atggattcttatctgctcatgtggggtctcctgacatttatcatggttcccggctgccaggccgagttgtgcgacgacgatccacccgagattccccacgcaacctttaaagctatggcatataaggaaggcaccatgctcaattgtgaatgcaagcgcgggttcaggaggatcaaatccggaagcctgtacatgctttgcacggggaacagttctcattccagctgggacaaccagtgccagtgtacttccagtgccacaaggaacaccacaaaacaggtcaccccccagccagaggagcaaaaggagcgaaagacaacagagatgcagagtcccatgcagcccgttgatcaggcatctttgcccgggcactgccgagagccaccgccctgggaaaatgaggccacggaacgtatttatcacttcgttgtggggcagatggtatattatcagtgcgtgcaaggctatagggctctgcaccgaggccccgccgaaagtgtttgtaagatgactcacggaaagacacggtggacacagccgcagctgatatgtaccggcgagatggagacatcacagttccccggggaagaaaagccacaggcttcgcccgaaggcaggccagagagtgagacatcgtgtctggtcactactacagattttcagatccagacagagatggctgcaacaatggagacttctatattcacaaccgagtatcaagttgccgtggctggttgcgtctttctcttgatttctgtactgctgttatccggactgacttggcagagaaggcagaggaagtcacgccgaaccatatag

SEQ ID NO: 121006 - DNA, 489 bp, synthetic construct
  misc_feature 1..489: note = Description of Artificial Sequence: Synthetic coding sequence
  source 1..489: mol_type = other DNA
atggtgcccggttgtcaagcagagctgtgcgatgatgacccaccagagattcctcacgcgaccttcaaggcaatggcttacaaagagggaacgatgctaaattgcgaatgcaagcggggcttccgcagaattaaaagtggctcactgtacatgctgtgcaccggaaactcctcccatagtagctgggacaaccaatgtcagtgcacctctagtgctacccgaaacaccacgaagcaggtcacacctcagcccgaagagcagaaggaaagaaaaaccaccgaaatgcagagtccaatgcaacccgtggaccaggctagcctccctgattttcagatacagacagagatggcagctacgatggagacgtcaattttcaccaccgagtaccaggtggccgttgcaggatgcgtgtttttactgatctcggttctgctgcttagcggactgacttggcagcggaggcagcggaagagcaggagaacaatatag

SEQ ID NO: 121007 - DNA, 330 bp, synthetic construct
  misc_feature 1..330: note = Description of Artificial Sequence: Synthetic coding sequence
  source 1..330: mol_type = other DNA
taaataccgcatgccaccttcaaagctatggcttataaagaaggaactatgcttaactgcgagtgtaaacgcggattccgaaggattaaatccggctctctgtacatgttgtgcactggtaacagctcgcactcatcatgggataaccaatgtcaatgcacctcctcagccactcggaataccaccaaacaagtaaccccacagccggaagagcagaaggagagaaaaactaccgaaatgcaatccccaatgcagcccgttgatcaggcttctctcccagattttcagatccagacggagatggctgcaacaatggagacttctatatag

SEQ ID NO: 121008 - DNA, 1110 bp, synthetic construct
  misc_feature 1..1110: note = Description of Artificial Sequence: Synthetic coding sequence
  source 1..1110: mol_type = other DNA
atggatcctcgcaaggtgaacgagctgagagcctttgtgaagatgtgtaagcaggatccctctgtgctgcacaccgaggagatgcggtttctgagagaatgggttgagtctatggggggcaaggtgcccccagccacacaaaaagccaaaagcgaggagaacaccaaagaggagaaacccgactcgaagaaagtcgaggaggacctgaaagctgatgaacccagtagtgaggagagtgacctggagatcgataaggagggcgtcattgagccagacactgatgccccacaggagatgggggatgaaaacgcggagataaccgaagagatgatggatcaggccaatgacaaaaaggttgccgccatcgaggctttaaacgacggtgaactgcagaaagcaattgatcttttcaccgacgccatcaagctgaacccacgcctagcgatcttgtatgccaagcgggcctccgtatttgtcaagctgcaaaaacccaatgccgccatcagagattgtgatcgcgcgatcgaaataaatcccgatagtgcacagccctataagtggaggggaaaagcccaccgcctgcttggccactgggaggaggctgcacacgaccttgctctagcctgcaagctagattacgatgaagatgccagtgctatgttgaaagaggtgcagccgagagcacaaaagatcgcagagcatcgaaggaagtatgagcggaaaagggaagagagggaaataaaggagcgtatcgagagggtgaagaaggccagggaggaacatgagcgtgctcaaagggaggaagaagcccgcagacagagcggtgctcaatatggctccttcccgggcggatttcccggggggatgcccggtaatttccccgggggcatgcctggtatgggcgggggaatgccgggcatggcagggatgcccgggctgaatgagatcctgagcgatccggaagtgttggcagcaatgcaagacccagaggttatggtagcattccaggatgtcgcccagaaccccgcgaatatgtcaaagtaccagagtaatcccaaggtaatgaacttaatctccaaactgtcggcgaaattcgggggccaggcttag

SEQ ID NO: 121009 - DNA, 441 bp, synthetic construct
  misc_feature 1..441: note = Description of Artificial Sequence: Synthetic coding sequence
  source 1..441: mol_type = other DNA
atggcggctcccgccctatcttggcgcctgccattgctcatcttgcttttacccctggccactagttgggcctctgcagccgtcaatggcacatcccagtttacctgcttttataactctagagccaacatctcctgtgtatggtctcaggatggggctctgcaagacaccagttgtcaggttcacgcgtggcctgatagaaggcggtggaaccagacctgtgaactgttgcccgtgtctcaggcaagctgggcctgcaatttaattctgggagcacctgattcacaaaaacttaccactgttgatatcgtgacactgagagttctttgtagagagggtgtacgctggcgcgtgatggctattcaggatttcaaaccttttgagaatctccgactgatggctcctatttctctgcaggtcgtacacgtggaaacacactag

SEQ ID NO: 121010 - DNA, 267 bp, synthetic construct
  misc_feature 1..267: note = Description of Artificial Sequence: Synthetic coding sequence
  source 1..267: mol_type = other DNA
atggctgcaccagccctgagctggcgtctgcccctgcttatactccttctgccgctggccacctcatgggcttccgccgccgtgaacggtactagtcagttcacttgtttctataattctagagcgaacatatcctgtgtctggagccaggacggtgctctgcaagacacctcttgccaggtgcatgcttggccggacaggagaaggtggaatcagacctgcgagttactgccagttagccaggcctcgtgggcatgcaatctgtag

SEQ ID NO: 121011 - DNA, 567 bp, synthetic construct
  misc_feature 1..567: note = Description of Artificial Sequence: Synthetic coding sequence
  source 1..567: mol_type = other DNA
atggccgcccctgcactaagttggagacttcctctgctgattctcctgctgccactcgcgacctcatgggctagcgccgctgtcaacggcaccagccagtttacctgcttttacaattcgcgggctaacatttcatgtgtttggtcgcaggatggagcgctgcaggacacctcctgtcaggtacacgcatggccagatagaaggcggtggaaccagacctgtgagctcctccctgtttctcaagcgtcttgggcctgtaatctcatcctgggagctcccgactctcagaaattgactactgttgacatcgtcaccttgcgcgttctctgcagagaaggggtcaggtggcgggtgatggcaatccaagatttcaagcccttcgaaaatctgcggctcatggcaccaatcagtctgcaggtcgtgcacgttgagacacacaggtgcaatataagctgggagatttctcaggccagccactacttcgagaggcatctggaattcgaggcacgcacactttccccaggccacacctgggaggaagccccattgctgacactcaagcagtag

SEQ ID NO: 121012 - DNA, 297 bp, synthetic construct
  misc_feature 1..297: note = Description of Artificial Sequence: Synthetic coding sequence
  source 1..297: mol_type = other DNA
atggaaccacccaatccacttggggagcagtacttcaaacgtacaatgccaaggatacctacactgaaaaatttggaagatctcgtgacggaataccacggcaactttagtgcttggagtggggttagtaagggactggctgagtctctgcagcccgattactctgagcgcttatgcttggttagtgagatcccccccaagggtggtgcccttggtgagggcccgggggccagcccatgcaatcagcactcaccttattgggctcctccgtgctatacgctcaagcctgagacctag

SEQ ID NO: 121013 - DNA, 474 bp, synthetic construct
  misc_feature 1..474: note = Description of Artificial Sequence: Synthetic coding sequence
  source 1..474: mol_type = other DNA
atgctcaaaccttcactcccttttacgtcacttctgttcctgcagttgccccttctgggggtgggcttaaacaccacgattctcactcccaatgggaacgaggacacgacagctgactttttccttacgacaatgcccacggattctctatcggtaagtaccctccccttgccagaagtacaatgtttcgtcttcaatgtcgagtacatgaattgtacctggaattcctcgtcagagcctcagcccactaaccttacattgcactactggtacaaaaatagcgataatgacaaggttcagaaatgctcacactatcttttttcagaagagataactagcggatgccagctgcagaaaaaagagattcacctgtaccagacctttgtggtgcaactccaggacccacgggaacccagaaggcaggccactcagatgctcaaattgcagaatcttggcacgatttctgggctgtag

SEQ ID NO: 121014 - DNA, 1110 bp, synthetic construct
  misc_feature 1..1110: note = Description of Artificial Sequence: Synthetic coding sequence
  source 1..1110: mol_type = other DNA
atgctgaaaccctccttgccgttcacatctctgctgtttctgcagctcccactgttaggcgtaggacttaacactactatcctgactcccaacgggaacgaagacactactgctgatttcttcttaaccacaatgcctacggacagcctctctgtctcaacactacctctccccgaagttcagtgtttcgttttcaatgtggagtatatgaactgtacatggaattcatcgagtgaaccccagcccactaacctcaccctccactattggtataagaactccgacaatgacaaagtgcagaaatgctcccattatctcttctctgaagaaattacctccggatgtcagctccaaaaaaaggaaattcacctctaccagacgttcgtggtccagttacaagacccgcgagagcctagaaggcaagcaacccaaatgctgaagctccaaaacttagttataccctgggccccagaaaatctgacactgcacaagctgagcgaatcgcagttagaattgaactggaacaatagattcctcaatcattgcctcgagcatctggtgcagtaccgcaccgactgggatcactcctggaccgagcagtcagttgattatagacataagttctcactgccgtccgtggatggccagaagcgatacacatttcgggttaggtcccgctttaatccactctgtggcagtgctcagcattggtcggagtggagccatcccatccattgggggtcaaatacatccaaggagaatccttttctgttcgctctggaggccgttgtaatctccgttggaagcatgggcctgattatctcattactgtgtgtctacttctggctggagaggactatgccaagaatacccaccctgaaaaacctagaggacctggtcacagaataccatgggaattttagtgcctggtcgggggtgtctaagggcctcgccgagtccctgcagcccgattactccgaacggctgtgcctggtgagcgagattccccctaagggcggcgccctgggcgaaggcccaggggcttccccatgcaaccagcactctccatattgggctccaccttgttatacccttaagccagaaacatag

SEQ ID NO: 121015 - DNA, 540 bp, synthetic construct
  misc_feature 1..540: note = Description of Artificial Sequence: Synthetic coding sequence
  source 1..540: mol_type = other DNA
atggggatgaaaacgccccagttggaacaaagcgtggactacaggcacaaattctccctcccgagcgtcgatggtcagaaaagatatacatttcgagttaggtcgagattcaacccgttgtgcggttcagcccagcactggtctgaatggagtcaccccatccactggggcagcaatacgtctaaggaaaacccttttctgtttgccctagaggccgtagtgatatcagtcggaagcatgggactgatcatctcactgctgtgtgtgtacttttggttggagagaacaatgccaagaatcccgacgctaaagaatttggaggatctggttacagagtatcacggcaactttagcgcctggagcggcgttagcaagggacttgccgaatcacttcagccggattactctgagcgactgtgtctcgtgtcagagatccccccaaaaggaggagccctgggagagggccccggggcttcaccatgcaatcagcactctccttattgggcccccccttgctacacactgaagcctgaaacatag

SEQ ID NO: 121016 - DNA, 1662 bp, synthetic construct
  misc_feature 1..1662: note = Description of Artificial Sequence: Synthetic coding sequence
  source 1..1662: mol_type = other DNA
atgagggcacctgggcgacccgctctgcggccactgccactgccccctctcctgctgcttctgctcgcggccccttggggccgagcagtgccttgtgtgtccgggggtctccctaagcctgctaacattactttcctgagtattaatatgaaaaacgtcctccagtggacgccgcccgagggacttcaaggagtgaaagtgacctataccgtgcagtactttatctatggacagaagaaatggctgaacaagagtgaatgtcggaacatcaataggacttactgcgatcttagcgccgagacctcagactacgagcaccaatactatgccaaagttaaggctatttggggtacaaagtgttcaaagtgggcagagtcagggcgcttctatcctttcttggagacccagataggcccacccgaggtagccctgaccactgacgagaaaagtatctcagtggtcctcacagcacctgagaaatggaaaagaaaccccgaagatctgcccgtctcgatgcagcagatttattcgaatctgaagtataacgtaagcgtactgaatacaaagtcaaaccgcacctggtcccaatgcgttaccaatcacactctggtgttgacatggctggagccgaacacactatattgcgtgcatgtggagtcctttgtgcccggtcccccccgacgcgcccagcccagcgagaaacagtgcgcaaggaccctgaaagatcagtcaagtgagtttaaggctaagattatcttttggtatgtcctccctgtatctataactgtatttctgttttctgtgatgggatactccatttacaggtacatccatgttggcaaagagaagcaccccgccaatctgatccttatctacggcaatgagttcgacaagcggttttttgttcctgccgaaaagatcgttattaatttcataacgctgaacatcagcgatgacagcaaaatttcacaccaagatatgtcccttttgggtaagagtagcgatgtcagttcattaaacgacccccagcccagcgggaacctacgcccgccccaggaagaagaggaagtgaagcaccttggttacgcatcacacttgatggaaattttctgcgattccgaggaaaataccgagggcacaagcctgactcaacaggagtccctatctcgtaccataccccccgacaaaaccgttatcgagtacgaatacgatgtccggactactgacatctgtgcaggccccgaagagcaggagctcagtctgcaggaagaggtgtctacacagggtacccttttagaaagccaggctgcgttagctgtgctgggtccccaaacactgcaatactcgtacactccacagctccaggacttggatcctctcgcccaagagcatacggacagcgaagagggcccagaggaagaaccctcaaccacgttggtggactgggacccgcagacaggcagactctgtatcccctctctcagtagcttcgatcaggattccgaggggtgtgagccttccgaaggcgacggcctgggagaagaaggcctgttgagcaggctctatgaagaacctgccccagaccgaccacctggggaaaatgagacctacttgatgcaatttatggaggagtggggattgtacgtgcagatggagaactag

SEQ ID NO: 121017 - DNA, 630 bp, synthetic construct
  misc_feature 1..630: note = Description of Artificial Sequence: Synthetic coding sequence
  source 1..630: mol_type = other DNA
atgagagcacctggaagacctgccttaagaccgctgccccttcccccattattattactactgttagccgccccctggggtcgggctgtcccttgcgtgagcggtgggttaccaaagcccgccaatatcacctttctgtccatcaatatgaagaacgtgttgcaatggacccctccagaaggactgcaaggtgtgaaagtcacatacactgtccagtattttatctacggccagaaaaagtggctaaataagagcgagtgccgcaatatcaaccgcacatactgtgatctttcagctgaaacttctgactacgagcaccagtactatgctaaggtgaaggctatatggggaacaaagtgctctaaatgggctgaatccggcagattctacccgttcctggagactcagatcggacctccagaagtggctctgactactgatgaaaagagcatctccgtcgttcttacggcccccgagaaatggaagcgcaaccccgaagatctgcccgtgtcaatgcagcagatctattctaacctaaaatataacgtgagtgtgcttaatacaaaaagtaataggaccgtttccctgaagtggaatggcgcctacatacacgtacctctatgctcctag

SEQ ID NO: 121018 - DNA, 1329 bp, synthetic construct
  misc_feature 1..1329: note = Description of Artificial Sequence: Synthetic coding sequence
  source 1..1329: mol_type = other DNA
atgtcttataatggcttacatcagagggttttcaaagaacttaaactgctcaccttatgctcaatcagcagtcaaattgggcctcctgaagtggccctcaccacagatgaaaaaagtatttccgtagttttaacagctcccgaaaaatggaaacgaaatccggaggacttacctgtgtccatgcagcagatctattccaacctgaagtacaacgtgtctgtgctgaacacaaaaagcaataggacgtggtctcaatgtgttaccaatcatacactcgtgcttacatggctggagcccaatactctgtactgcgtccatgtagaatcatttgttcccggccccccgagacgggcgcagccctccgaaaagcagtgcgccagaacgctcaaagatcaatcctccgagttcaaagccaagatcattttttggtatgttctgcccgtgtcgatcacagtattcttgtttagtgtgatgggatacagcatttataggtacattcatgtggggaaggaaaaacaccccgctaacttgatactcatttacggcaatgagttcgacaaacggttctttgttccggcagagaagattgttattaactttattacactgaacatcagcgatgactccaaaatatcccaccaggatatgtctctgcttggtaaaagttccgacgtcagtagtcttaatgatccacaaccctctggcaacttgcgaccgccacaggaggaggaggaggttaaacacttgggttacgcttcccacttaatggaaattttttgcgattctgaggagaacaccgagggaacctcactcacccagcaggagagcctatccagaacaatccccccagataagacagtgatcgagtatgagtatgatgtccggaccactgatatctgcgccgggcccgaggagcaggagctgtctttgcaggaagaagtgtctacacagggcacactgttagagtctcaggccgccctggccgtcctcggcccccagaccctccaatactcatatacgcctcaattgcaggatctcgatccgctcgctcaggagcacaccgattcggaggagggcccagaggaggagccttcaacaaccctcgttgattgggatccacagaccggccgcctgtgcatcccttccctgtccagtttcgatcaggactcagagggctgcgagccctcagagggagacgggcttggggaggaaggtttacttagccgactctatgaggagcctgctcctgaccgtccaccaggtgaaaatgagacttatttgatgcagttcatggaggagtggggcctgtacgttcagatggaaaattag

SEQ ID NO: 121019 - DNA, 1515 bp, synthetic construct
  misc_feature 1..1515: note = Description of Artificial Sequence: Synthetic coding sequence
  source 1..1515: mol_type = other DNA
atgaagaatgtgctgcagtggacgccgccagagggactccagggggtaaaagtgacctataccgtccagtattttatttacggacagaaaaaatggttaaacaaatccgagtgccgcaatatcaatagaacctactgcgacctgagcgctgagaccagcgactacgaacatcagtattacgctaaggtgaaggctatttggggaactaagtgctccaagtgggctgaatccgggcggttctatcctttcttagagacccaaattggacctcccgaggtcgcactgacgacagatgaaaaatctatttctgtagttcttaccgctcccgaaaagtggaaacggaatcccgaagacctgccggtgtctatgcagcagatttatagcaatttgaaatacaacgtcagtgtgcttaatactaagtctaacaggacctggtctcaatgcgtcactaaccacaccttggttttaacatggctggagcccaatactctttattgtgtgcatgtggagtcattcgtgcccggcccccctcgccgagctcagcctagcgagaaacaatgcgccagaaccctcaaggatcagagcagtgaattcaaggcaaagataatcttctggtatgtcctccccgtgtctatcactgttttcctgttttccgtcatgggatattcaatttaccgctatatccatgtcggaaaggagaaacatccagccaacctgatcctgatttatgggaatgaattcgacaagcgcttctttgtgccagccgagaaaattgtgattaactttatcactctcaatatctcagacgattcaaagatttctcaccaggacatgtccttgttaggcaaaagttctgacgtaagcagcctgaatgacccccagccctccgggaatcttcgaccacctcaggaagaggaagaggtcaaacaccttgggtatgctagccacttgatggaaatcttttgcgatagtgaggaaaacactgaaggtacatctctgacccaacaggaatccctgagccgcacaatccctcctgacaaaactgtaattgagtacgagtatgacgtgcgcactactgacatctgtgcaggtccggaggaacaggaattgtccttacaagaggaggtcagcacgcagggaacgctgctggaatctcaagctgcactggcggttctcggcccccagaccctgcaatattcctatacacctcagctgcaggacctggaccccctggcccaggagcacaccgactcggaggaaggacccgaagaagagccgtctactactctggtagattgggatcctcaaactggccgcctgtgcatcccctccctgagttcctttgaccaggattcagagggctgtgaaccgtctgagggagatgggctgggggaagaaggtctgctgtcacggttatatgaggagccagcccctgatcgtccgcctggagagaatgagacctacttgatgcagtttatggaagagtgggggctctacgttcagatggagaactag

SEQ ID NO: 121020 - DNA, 1617 bp, synthetic construct
  misc_feature 1..1617: note = Description of Artificial Sequence: Synthetic coding sequence
  source 1..1617: mol_type = other DNA
atgccccgagggtgggctgcacccctgctgctgcttctgttgcagggcgggtggggctgccctgacctggtgtgttatacagactatctgcaaacagtaatttgcattctggaaatgtggaatctgcatccaagtacgctcactctgacctggcaggaccagtacgaggagttgaaagatgaggctacatcttgctcacttcataggtcagcccataatgctacccatgccacgtatacctgccatatggatgtgtttcattttatggcagacgatatcttcagtgtcaacattactgaccagtccggtaattattctcaggagtgcgggtcattcctgttggcagaaagtattaagcctgcacctcccttcaatgtcacggtgactttttccggacagtataacatttcttggcgctccgattatgaggaccctgccttttatatgttgaagggcaagctgcagtatgagctacaataccggaataggggggatccctgggccgtctcgcctcgcagaaaactcatttctgttgactctcgctccgtgtccctcttgcctctggagtttcgaaaggactccagctatgaactccaagtgagagcaggtcccatgcctggtagcagttaccaaggaacttggagcgagtggtccgacccggtgatctttcagacccaaagcgaagaactcaaagaaggctggaacccccacttgctacttctcctgttgttggtaattgtctttataccagctttttggtccctgaagacccatcccctgtggagactgtggaagaagatatgggcagtgccttctcctgagagatttttcatgcccttgtataagggctgcagcggagatttcaagaagtgggtgggggcccccttcacggggagctcgttagagctaggtccgtggtcacccgaggtcccatcgacattagaggtgtatagttgccatccgcctagaagtcccgcaaagaggctccagctgaccgagttgcaggaacctgccgaattagtggaatcggatggcgtgcctaaacccagtttttggccaacagctcagaactcaggcgggtcagcttacagcgaggagcgggacagaccgtatggattggtgagcatcgacaccgtgaccgtgctcgacgcagaaggtccttgtacgtggccctgttcttgtgaggacgatggctacccagcattagacctggatgctggtctggaaccaagccccggacttgaggatccccttttggacgctggcaccacagtactctcctgtgggtgtgttagtgctggaagtcctggattaggaggacctctcggcagcctcctggatcggctcaaacccccgctggctgacggagaggattgggcgggcggactgccttggggagggcgtagccctggaggcgtttccgagtctgaagctggctcgcctctagccggcctcgacatggacacattcgactcgggatttgtgggaagtgattgcagtagcccagtagagtgtgatttcaccagccctggagacgagggcccaccgcggtcctacttgagacagtgggttgtgatacccccacctttgtcttcacctggccctcaggcatcctag

SEQ ID NO: 121021 - DNA, 1617 bp, synthetic construct
  misc_feature 1..1617: note = Description of Artificial Sequence: Synthetic coding sequence
  source 1..1617: mol_type = other DNA
atgccaaggggttgggccgcccctttgctgctgttactactgcagggtgggtggggctgccctgacttagtgtgctatacggactatctccagacggtgatctgcatcctcgagatgtggaatctgcacccgtcgaccctgacgctgacctggcaagaccaatatgaggaacttaaggatgaagccacaagttgcagtcttcacaggagtgctcataacgctacacatgctacttatacttgtcatatggatgtctttcacttcatggcagacgacatcttctccgtgaacattactgaccaatcaggcaattactcccaggagtgtggctccttccttctcgctgaatcaattaaacccgcacctcctttcaatgtaactgtgactttttccggacaatataatatctcatggaggtcagactacgaagatcctgccttctacatgttaaaggggaagttacaatacgaattacagtatcgcaaccgcggagacccttgggccgttagcccgcggcggaagctgatctctgtcgattctcgaagcgtctcgttgcttccgctagagttccgcaaggattcctcctatgagttgcaggttagagccggacctatgccaggatcctcatatcaagggacttggtctgaatggagcgacccagtcatttttcaaacacaatcggaggaactgaaggaaggatggaacccccaccttctactgctgcttcttctggtcatcgtctttattcctgcattctggagtttgaaaacacaccctttgtggagactttggaagaagatttgggctgtgcccagccccgaaagattcttcatgcctctctataaaggctgctcaggggatttcaaaaaatgggtcggcgcaccatttaccggcagttcgttagaactcggcccgtggtcacccgaggtgccctctactctcgaagtatactcctgtcatcccccccggtcgcctgctaaaaggctccagctgaccgagctgcaagaacctgcagagctggtcgaaagcgatggtgtgccgaaaccaagtttttggcccaccgctcagaactcaggcggaagcgcctactcagaagagagggatcgcccatacggtctggtttcaatcgataccgtaaccgtgcttgacgcagaagggccttgcacatggccgtgttcctgtgaagatgatggttatccagctctagacctggacgctggactggaaccgtctccaggtctagaggatcccctgctagacgcaggcacgacggtcctcagctgcgggtgcgtgtccgctggcagcccaggtcttggcggtccactcggcagtctccttgacagactgaagccacctctggcagacggcgaggactgggcgggcgggttaccgtggggaggccgctcccccgggggggtgtctgagtcagaggcaggaagcccactggccggcctcgatatggacacattcgattccggttttgtaggaagcgactgtagctcgcccgttgagtgtgattttacaagtcccggggacgaaggcccacctaggtcctacctgaggcagtgggtagtgattccaccaccactcagctctccagggccacaggcttcctag

SEQ ID NO: 121022 - DNA, 1617 bp, synthetic construct
  misc_feature 1..1617: note = Description of Artificial Sequence: Synthetic coding sequence
  source 1..1617: mol_type = other DNA
atgccccggggctgggcagcccctttattattactgctgcttcagggtggctgggggtgccccgacctcgtctgctatactgattacctccagaccgtcatctgtatcctggaaatgtggaatctgcatccgtcaactctgaccctaacatggcaagaccaatatgaggaattaaaggatgaagcgacgtcatgttctctgcatcggtctgcacataacgcaacccatgccacatatacctgccacatggatgtctttcatttcatggccgatgatatcttttctgttaacattaccgaccagtctggcaactatagtcaggaatgcggctccttcctgctcgctgagtctatcaaacccgcacctccatttaatgttactgtgacatttagtgggcagtacaacatttcctggcggtccgactacgaggatccagcattttacatgctcaaggggaagttgcagtatgagttgcagtaccggaataggggagatccgtgggcagttagtcctaggcgcaaactgatctctgtggatagccggtctgtctcactgttaccactggaattccggaaggacagctcttacgaactccaggttagagctggccccatgccagggtcaagctatcagggtacgtggtccgagtggtccgaccccgtcatattccagactcaaagcgaagagctcaaggaaggctggaaccctcacctgctgcttctcttgctcctcgtgattgtgttcatccccgccttctggagtttgaagacccatcccctgtggcgcctctggaagaaaatctgggcagtaccatccccagagcgcttcttcatgccgttatacaagggttgtagcggcgatttcaaaaagtgggtcggcgcaccattcacaggcagttctcttgagctgggcccctggagcccagaggtgccatcaacattagaagtgtactcttgtcacccgcctaggtctcctgcaaaacgcctgcaactgactgagctccaggaacctgccgaattagtggaatccgacggtgttcctaaaccatctttctggccgacagcccagaacagtggcggatccgcctacagcgaggaaagagaccggccatatgggttggtgagtatcgataccgttaccgtattagatgccgaagggccctgcacttggccttgttcttgtgaggatgatggatacccggcactggatctggacgcaggtctggagccctctccaggactggaggacccactattggatgcagggacaaccgtgttatcttgtgggtgtgtctcagcaggtagtccgggactcggaggccctttggggtcgttactggaccggttgaaacccccattggcagatggcgaggactgggcaggcggtctgccatggggtggccgctcccccggcggggtgagcgagtcagaggcggggagcccactggccgggttagatatggacacattcgacagtgggttcgtggggagtgattgctcttcgccagtggaatgcgactttaccagtccaggcgacgagggtccccctagatcctaccttagacagtgggtggtgatccctccgcctctgtcctccccagggccacaggcatcatag

SEQ ID NO: 121023 - DNA, 792 bp, synthetic construct
  misc_feature 1..792: note = Description of Artificial Sequence: Synthetic coding sequence
  source 1..792: mol_type = other DNA
atgatgccaaaacactgtttcctgggattcctgatcagcttcttccttactggcgtggcaggaacacagtcaacacacgagagcctcaagcctcagcgcgttcaattccagtctagaaacttccacaacatattgcagtggcagcctggacgagcacttacgggaaactcaagcgtgtactttgtgcagtacaagatcatgttctcttgtagcatgaagtcaagccaccagaagccctctggctgttggcaacacatttcctgtaactttcccggctgtaggaccctggcgaagtatggacagcgtcaatggaaaaataaagaggactgctggggaacacaggagctctcctgcgacctgacatctgagacctccgacattcaggagccatattacggacgtgtgcgggctgcttccgcagggtcttatagtgagtggagcatgacccctcgctttacaccttggtgggaaactaaaattgatccccctgtcatgaatattacccaagtgaatggtagcctcctggtcattctgcacgctcctaacttaccatacagatatcagaaagagaagaacgtctcaatcgaggattattacgagctcctgtaccgggtgtttattatcaacaattctctggaaaaggaacagaaagtttacgagggcgcacaccgtgccgtggagatcgaggccctgaccccgcattctagttattgcgtcgtggcagagatatatcagcccatgcttgatagaagatctcagagatctgaagagaggtgtgtggaaataccctag

SEQ ID NO: 121024 - DNA, 393 bp, synthetic construct
  misc_feature 1..393: note = Description of Artificial Sequence: Synthetic coding sequence
  source 1..393: mol_type = other DNA
atgatgcccaaacattgcttcttgggtttcctaatcagcttttttctcaccggcgtggctgggacccagagtacccacgaaagcctgaaaccccaacgcgtgcagtttcaatcgcgcaacttccacaacattttgcagtggcagccaggtagagcccttactggcaactcatccgtctatttcgtccagtacaaaatatacgggcagagacaatggaagaataaggaggattgctggggcacacaggaactgtcttgcgacctgacttcggagacctctgatattcaggagccgtactacggccgagttagggccgcaagtgctgggtcatattcagagtggtccatgacacctcggtttacaccttggtgggagagggcaaagggtctctag

SEQ ID NO: 121025 - DNA, 696 bp, synthetic construct
  misc_feature 1..696: note = Description of Artificial Sequence: Synthetic coding sequence
  source 1..696: mol_type = other DNA
atgatgccaaaacattgttttctcggcttcttgatcagcttttttctaactggggtcgcaggcactcagtccactcacgaatcactgaaaccgcaacgcgtgcaatttcagtcccgcaactttcataacattcttcaatggcagccagggagggctctcacaggaaatagctctgtttatttcgtgcaatataaaatatatggccaacgacagtggaagaataaggaggattgttggggaactcaagaactttcctgtgacctcacctccgaaacatcagatatccaggagccgtattatgggcgtgtgagagctgctagcgcaggaagttactcggaatggtccatgacaccacggtttaccccctggtgggagaccaaaattgacccgccagtgatgaatatcacacaggttaacggcagcctgctggtgatcctgcacgccccaaacctcccttaccgctaccagaaggaaaagaacgtgagtatcgaggattattatgagcttctgtaccgggtttttataatcaacaactctctcgagaaggaacaaaaggtttacgagggcgcccatcgtgcagtcgaaatagaggcactcaccccgcatagcagttattgtgtagtcgctgaaatctatcaaccaatgctcgacaggcgctctcagaggtcagaagagaggtgtgtagagattccttag

SEQ ID NO: 121026 - DNA, 1563 bp, synthetic construct
  misc_feature 1..1563: note = Description of Artificial Sequence: Synthetic coding sequence
  source 1..1563: mol_type = other DNA
atggcaggtcccgaacgctggggtcccctcctgctgtgtcttttgcaggctgcccctggccgcccccgcttagcgccaccgcagaatgtcacgcttctatcacagaactttagtgtgtacctgacatggctgcccgggctggggaatccgcaagacgtaacctattttgttgcctatcagtccagccccacacgcagacggtggcgtgaggtggaagaatgcgccggcactaaggagctgctgtgctcgatgatgtgtctgaagaaacaggacctatataataagttcaagggccgtgttaggacggtgtcacccagctccaaatcaccctgggtggaatccgaatacctggactacctgttcgaagtggaacccgcaccaccagtcctggtgctgacccagacggaagaaattctctccgcaaacgctacttaccagcttcccccctgtatgccgcccctggatcttaagtacgaggtcgcattctggaaggagggcgccgggaataaaaccctgttccctgtcacgcctcacggccagccagtgcaaatcactctccagccagctgctagcgagcaccactgcctcagtgcgcggacgatttatacgtttagcgtaccgaaatacagcaagttcagtaagcctacatgctttctcctggaagttcccgaagcaaattgggcattcctggtcctgccaagcctcctgattttactgcttgtgatcgccgctggcggcgtgatctggaaaaccctcatgggaaacccttggttccagagagccaagatgccccgcgccttagacttttcagggcacacacatccagtggctaccttccagccctcccgccccgaatcagtaaacgatcttttcctgtgtcctcagaaagagctgaccaggggagtgaggcccacgccgagggttcgcgctcctgcgacccagcagactcgttggaaaaaggatcttgcggaagacgaggaggaagaggacgaggaggataccgaggacggggtctccttccagccatatatcgaacccccttctttccttggccaggaacatcaggcaccgggccactcagaggcaggtggagtggattccggacggccccgcgcacctctggtaccatctgagggtagcagcgcatgggattctagcgatcgctcatgggccagtacagtggacagtagttgggacagggcaggctcctctggttatctcgctgagaagggaccaggacagggccccggcggcgacggtcaccaggagtcacttccccccccagaattcagtaaagactctgggtttctggaggaactcccagaggacaatctctcttcctgggctacttggggaaccttgcctcccgagcccaatctagttcccggaggtcctcctgtgagcctacagaccttaaccttttgttgggagagttccccagaggaagaggaggaagctagagagagcgagattgaagacagtgacgcaggaagctggggcgcggagagcacacaaaggacagaagaccgcggaaggacgctcggccactacatggctcgatag

SEQ ID NO: 121027 - DNA, 735 bp, synthetic construct
  misc_feature 1..735: note = Description of Artificial Sequence: Synthetic coding sequence
  source 1..735: mol_type = other DNA
atggctggccccgaacgttggggtcctttactgctatgtttgttgcaggccgcacctggccgccctagattggctcctcctcaaaatgtgacccttctgtcccagaacttttccgtctatttgacttggcttcccggtctgggcaatccacaggacgtgacatatttcgtggcctatcagtcatccccaacacgcaggcggtggcgcgaggtcgaggagtgtgccgggaccaaagagctcctctgttccatgatgtgtctcaaaaagcaagacctgtataataaatttaagggaagagtcagaactgtgtccccttcatctaagtccccatgggtcgagtcagaatacttagattacctgtttgaggtagaacccgcaccgccagtcctggtgctgacccaaactgaggagattctatctgcgaacgctacttaccaacttcccccttgcatgccacctcttgatctcaagtatgaagtcgccttctggaaagaaggggccggaaataaaactctgttccctgttacccctcacggtcagccggtacagattactctgcagccagccgcttccgaacatcactgcctgtcggcccgaacgatctacacattctctgtacccaagtattctaaattctctaaacctacgtgctttctgctggaggttcccggcctgttctggactcatacaccatgcggaaacttgtctgcacaacagacccgcgtcagggagtag

SEQ ID NO: 121028 - DNA, 636 bp, synthetic construct
  misc_feature 1..636: note = Description of Artificial Sequence: Synthetic coding sequence
  source 1..636: mol_type = other DNA
atggccggaccagagagatggggccccttgctgttgtgtctgttgcaggccgctccaggaagaccgcgccttgcgccccctcagaacgtgaccctccttagtcaaaacttcagcgtgtacctgacttggctgccgggactcgggaatccccaggatgtaacctattttgtcgcctaccagtccagtcccactcgccgccgctggcgagaagtagaggagtgtgctggaaccaaggaactgctatgttccatgatgtgccttaagaagcaggacctctacaacaaatttaagggcagggttcgcaccgtctcaccttcaagtaagtccccatgggtggaaagtgagtacttggactacctgtttgaggtcgaacctgcccccccagtcttagtcttaacacagactgaagagattctaagcgcaaacgctacctaccagctgccgccatgcatgcctcctctagatctcaaatacgaggttgcattctggaaggaaggggccggaaataaggtgggatctagcttccctgcccctcggctgggtccgctgttacacccctttctattacgatttttttcacccagccaacctgcgcctgctcccttgcttcaggaggtattccccgtccactcgtag

SEQ ID NO: 121029 - DNA, 558 bp, synthetic construct
  misc_feature 1..558: note = Description of Artificial Sequence: Synthetic coding sequence
  source 1..558: mol_type = other DNA
atgatgtgcctgaagaagcaagacctgtacaataaatttaagggccgggtgcggacagtctcacccagcagtaaatcgccttgggtcgagtcagaatatctggattatctgttcgaagttgagcctgcccccccagtgttggtattgacccagacggaggaaattctatcggcaaatgccacctaccagctgcccccatgcatgcccccactcgacctcaagtacgaggtggctttttggaaagagggggcgggcaataaaacactctttcccgtgactccgcatggacagcccgtgcagatcaccctgcagccagcggcctctgaacatcattgtctgtccgcgaggactatttatacattctcggtaccaaaatacagcaaattcagcaagccgacctgtttcctgctcgaagtgcccgaggcaaactgggccttcctcgtgttgccttccttgttaattctgctgttggtcatcgcagctggcggcgtgatatggaagactctgatggggaatccctggttccaacgcgccaagatgcctcgcgcacttgtttag

SEQ ID NO: 121030 - DNA, 1476 bp, synthetic construct
  misc_feature 1..1476: note = Description of Artificial Sequence: Synthetic coding sequence
  source 1..1476: mol_type = other DNA
atggctggcccagagcgctggggtcctctattactatgcctgctccaggcagcgcctggcagacccaggcttgctcccccacaaaacgttacattgctgagtcagaacttctccgtgtatttaacctggctgccgggcctggggaaccctcaggacgtgacatactttgtagcctatcagtcctcccctacccgcagaaggtggcgcgaagtcgaggaatgtgccggtacgaaagaactcttgtgttccatgatgtgtctgaagaaacaggacctctataataagttcaagggccgggtgagaacagtgtctccgagttctaagtccccctgggttgaatctgaatacttagattatctgttcgaagtggaaccagccccacctgtcctcgttttgacccagactgaagaaatcttgagtgctaacgctacctatcagcttccaccttgcatgccacccctggacctgaagtacgaagtcgcgttttggaaggagggagctggtaataagacactattcccagtgacgccccacggtcagccggtgcaaatcacgcttcagcctgcggcctctgagcaccattgcctgagtgctagaacgatctatacattctcagtccctaagtactctaaattcagcaagcctacctgttttttgctggaggtgccagaggcaaactgggcatttttggtgctcccttcgctgctgatcctgctgctcgtgattgcagccggcggtgtgatctggaagactctcatgggtaatccttggtttcagagggcaaagatgccaagagctcttgagctcacacggggagtgcggcccacgcctagggtgcgagctcccgcaacacaacaaaccagatggaagaaggacctggcggaggatgaagaagaagaagatgaggaagacacagaagatggcgtgtctttccagccttacatcgaaccaccttctttccttggccaagaacatcaggcaccaggacactccgaggccggaggcgtcgatagtgggaggccgagagccccattggtgccctcagaagggtcgagcgcctgggattcaagcgaccgctcctgggcttccaccgttgatagctcttgggatcgggctgggagttccggctacctggccgagaagggaccaggccagggcccaggtggggatggccaccaggaatctctgcccccccctgagttcagcaaagacagcggatttctggaggagcttccggaggacaacttatcaagctgggccacttggggcacgctgccccccgaacctaatttggtacccggcggcccacccgtgtctctgcaaacactcaccttctgttgggaaagcagtccggaagaggaggaggaagccagggaatccgaaattgaggactccgatgccggaagctggggcgccgaatctactcagcggactgaagatcgggggcgcaccctaggacactacatggccagatag

SEQ ID NO: 121031 - DNA, 459 bp, synthetic construct
  misc_feature 1..459: note = Description of Artificial Sequence: Synthetic coding sequence
  source 1..459: mol_type = other DNA
atgagccgactgcctgtgctgttactgctccaactgctggtcagacctggactccaggctccaatgacccagactacccccctcaagacctcttgggtaaactgtagcaatatgattgacgagatcattacacacctgaaacaacccccactgccactcctcgactttaacaacctcaatggggaggaccaggacatactgatggagaataatcttcggcggccgaacctagaagcgtttaatagagcagttaagagtctccagaatgctagcgcgatagagtcgattctaaagaatctgttgccctgtttgcccctggccactgctgcccctaccaggcatcccattcatattaaggatggagactggaacgagtttcgcagaaagctgaccttctacctcaaaactctcgagaatgcacaggctcagcaaaccactctgagccttgccatattctag

SEQ ID NO: 121032 - DNA, 1137 bp, synthetic construct
  misc_feature 1..1137: note = Description of Artificial Sequence: Synthetic coding sequence
  source 1..1137: mol_type = other DNA
atggtgctactatggctgacactgctgctgatagcgctcccttgcctgcttcagacaaaagaggacccaaatccccccatcacaaacctccgtatgaaggctaaagcccagcagttgacctgggacctgaaccgcaacgtgacagatattgaatgcgtcaaagatgctgattacagcatgcccgccgttaataactcttattgtcagtttggggccattagcttatgtgaggtaaccaattataccgtcagagtcgcgaatccgcctttcagcacttggatcctttttcccgagaacagcgggaagccatgggccggtgcagagaatctgacatgctggattcacgatgttgatttcctatcgtgttcctgggccgtgggccccggggcccctgccgacgtccagtacgatctgtacctgaatgtcgcgaataggcggcaacaatacgagtgcctgcattataagaccgatgcacaaggcactcgcattgggtgtagattcgatgatatctctcggctctcctcgggaagccagtcctcccacatcctagtcagaggtaggtcagctgcatttgggatcccttgcactgacaagttcgtcgtgttcagccagatcgaaatcctgacgcctccgaacatgactgctaagtgtaataaaacacattcttttatgcactggaaaatgcgctcccattttaacagaaagtttagatacgagctgcaaatccaaaagcgaatgcagccagtcataaccgagcaagtgcgcgaccggaccagctttcaactcctgaatccggggacgtatactgtccagatccgagcacgagaaagagtgtatgaatttctgtccgcctggtccactcctcaacggtttgagtgtgaccaggaggagggcgcaaacacccgtgcctggcgaacatcccttctcatagcattggggactctcctcgccctggtttgcgtgttcgtaatctgtaggagatatcttgtgatgcagcgcctgttcccccgtatccctcacatgaaggatcccatcggggactccttccagaacgataaactcgttgtttgggaggctggcaaagcgggattggaggagtgtctggtaaccgaagtgcaggtggtacagaagacatag

SEQ ID NO: 121033 - DNA, 903 bp, synthetic construct
  misc_feature 1..903: note = Description of Artificial Sequence: Synthetic coding sequence
  source 1..903: mol_type = other DNA
atggtgctgctgtggctgacactgctgctaattgccctgccttgccttctgcagacaaaggaaggtggtaagccctgggcaggtgctgagaatctgacatgctggattcacgatgtggacttcctttcttgcagttgggccgttggccctggtgcccccgcagacgtgcaatacgacctctacttgaacgtggccaataggcgtcagcaatatgaatgtttgcactacaaaacagacgcccaaggcactagaatcggttgtcgctttgatgatattagtagacttagctctggcagccagtcctcgcacatcttagtacgcggccggtcggctgccttcggtatcccgtgtactgataagtttgtggtgtttagtcaaatcgagatcctgacaccgccaaatatgaccgctaagtgcaataaaacccattcttttatgcattggaaaatgcgctctcactttaaccggaaatttagatatgagctccaaatccagaagaggatgcaaccagtaattaccgagcaagtccgagatcgcacctctttccaacttcttaaccctgggacgtacaccgttcagattagagcgagagaaagagtgtatgagttcctgagcgcatggtctaccccccagaggttcgagtgtgaccaggaggagggggctaataccagggcatggcgaacctccctgttaattgctctgggaaccttattagccctggtgtgtgtttttgtgatttgtcgtcgctacctagtcatgcagcggctgtttccccggataccgcatatgaaagatcctattggcgatagcttccagaatgacaaactcgttgtatgggaggcaggtaaggcggggctggaggagtgcctggttactgaggtccaggtcgtccagaaaacctag

SEQ ID NO: 121034 - DNA, 495 bp, synthetic construct
  misc_feature 1..495: note = Description of Artificial Sequence: Synthetic coding sequence
  source 1..495: mol_type = other DNA
atggtactgctttggctgaccctcctactcattgcactgccctgccttctgcagaccaaagagggcgggaaaccatgggctggggcggagaacctcacgtgttggattcatgacgttgattttttatcctgttcttgggcagttgggcctggcgctccagccgacgttcaatatgacctgtacttaaacgtggccaatcgaagacagcaatatgagtgcctccactacaagactgatgcccaagggactcgtattggttgtaggtttgacgacatatccagacttagttctggcagccagagcagccatatcctcgttcgcgggaggagtgcagcattcggtattccgtgtaccgataaatttgttgtgttttcacagatcgagatcttgactccccctaatatgaccgcgaaatgcaacaaaacccactcattcatgcactggaaaatgcggtctcacttcaaccgtaaatttcggtacgagctccagatctag

SEQ ID NO: 121035 - DNA, 1323 bp, synthetic construct
  misc_feature 1..1323: note = Description of Artificial Sequence: Synthetic coding sequence
  source 1..1323: mol_type = other DNA
atgacatattggcggctggaaaatatcgctaaaaccgaacctccgaaaatattccgcgtcaaacccgtgcttgggataaagagaatgatccagattgaatggatcaaaccagaactggctcccgtctcatctgacttaaaatacacactgcgctttcgtacggttaattcaaccagctggatggaagttaacttcgccaaaaataggaaagacaaaaaccaaacttataatctgacagggctccagcccttcacagaatacgtgatagccctgagatgcgccgttaaagagtctaagttctggtctgactggtcccaagagaaaatgggaatgacagaggaagaggcaccttgcgggttggaactgtggcgcgtcctgaagcccgctgaggcagacggtaggagacctgtccgcctattatggaaaaaagctagaggagccccagtccttgaaaaaacactaggctataatatctggtactaccccgagagcaacacaaatctcacggaaaccatgaacacgactaaccaacagctagagctgcacctcggtggcgagtctttctgggtaagcatgatatcatataactcactgggaaaaagtcccgtggcaaccttacggattcctgccatccaagaaaaaagcttccaatgcattgaagttatgcaagcatgcgtggctgaggatcagttggtggtcaaatggcagagttcagccctagacgtcaacacctggatgattgaatggtttccggacgtggattctgagcctactacactcagctgggagtcagtgagtcaggccaccaattggaccatacagcaggacaagctgaagcccttctggtgttacaacattagcgtgtatccgatgctgcacgacaaggtaggagaaccctactccatccaggcatacgctaaggagggggtcccctccgaggggccagaaacaaaggtcgagaacataggtgtgaagaccgttactattacatggaaggagattcctaagagtgagaggaagggaatcatttgcaactacacaatattctaccaggctgaaggcggtaaagggttctgcaaacacgctcactccgaggtggaaaagaatcctaaaccccaaattgacgccatggatcggccggtggtgggtatggcccccccatcacattgcgacctgcagccagggatgaaccacctggcgtcactgaatttaagcgaaaacggagcaaagtccactcatctcctcggattctggggcctgaatgaatctgaggtgaccgtcccggagcggcgagttctgaggaagtggaaggagctgctgtag

SEQ ID NO: 121036 - DNA, 1989 bp, synthetic construct
  misc_feature 1..1989: note = Description of Artificial Sequence: Synthetic coding sequence
  source 1..1989: mol_type = other DNA
atgaagctctccccacagccttcttgcgtcaacctgggtatgatgtggacttgggcattatggatgcttccttccctgtgcaagttctcccttgccgcattaccagctaagccagaaaatatcagctgtgtgtattactaccggaagaacctcacctgcacttggtctccaggcaaggagaccagctacacgcagtatacggtgaaaaggacatacgcttttggagaaaagcatgataactgcactacaaactcctcgacatctgagaacagagctagctgttccttctttctgcctaggatcaccatccctgataactatacaatcgaggtggaggcagaaaacggagatggcgtaattaaatctcatatgacgtattggaggttggagaatattgccaaaactgagccacctaagatctttcgtgtgaaacccgtgcttggcattaaaagaatgatccagatagaatggattaaaccagagttagcgcctgtttccagcgacctgaagtacacactgcggtttagaactgtcaattctacaagttggatggaagtgaactttgcaaagaacaggaaggataagaatcaaacctacaacctcacgggcctacagccctttaccgagtatgtgattgccctgcgctgcgccgtgaaggagagcaaattctggtccgattggtctcaggagaagatgggtatgacagaagaagaggccccttgtggcctcgagctctggagagtgctcaagccagctgaagcagacggtcggaggccggtgaggctactgtggaagaaagcccgaggagccccagtgctggagaagacactgggttataatatctggtactatcctgagagtaataccaatttgacagaaaccatgaacaccacaaaccagcagcttgaactccaccttgggggcgagtccttttgggtgtcgatgatttcgtataatagtctcggcaagtccccagtggctacccttcgcattccagccattcaagagaagtctttccagtgcatcgaggtgatgcaggcatgtgttgctgaggatcaactcgtcgtaaagtggcaaagcagtgccttggacgtaaatacctggatgatcgagtggttcccagatgtggacagcgagccaacaaccttgtcttgggagagtgtgtcccaagcgacaaactggaccattcagcaagataaacttaaaccattttggtgctacaatatcagtgtctaccccatgctccatgataaagtcggcgaaccatactccatccaggcatacgctaaggaaggcgtgcctagcgaaggcccagagaccaaggtcgagaatattggtgtgaaaaccgtcacaataacctggaaagagatccctaaaagcgagagaaaagggatcatctgtaactacacaatcttctatcaggccgaaggcggcaaaggcttcagcaagaccgtaaattcaagcatcctgcagtacgggctggagtccctcaagcggaagacgtcctatatcgtgcaggttatggcaagtacctcagcaggtggtaccaacggcacaagcatcaattttaaaactttatcattctccgtattcgagattattcttattacttcactgatcggaggtggcttgttaattctgatcatcctaaccgtggcttacgggctgaagaagccgaacaagcttactcatttatgttggcccaccgtacctaatccagccgaatcgtccatagcaacctggcatggtgatgacttcaaggataaacttaaccttaaagagtccgacgactccgtgaacactgaggataggattctgaagccctgctccactccttccgacaagcttgtgatcgacaaattagtggtgaattttgggaacgtactccaggagatcttcaccgatgaagctcgaaccggccaggaaaataatctgggaggcgaaaaaaatgggactcgaatcctctcctcctgtcctaccagcatctag

SEQ ID NO: 121037 - DNA, 2046 bp, synthetic construct
  misc_feature 1..2046: note = Description of Artificial Sequence: Synthetic coding sequence
  source 1..2046: mol_type = other DNA
atgtgcatccggcagttgaaattttttaccacggcctgtgtatgcgagtgccctcagaatatcctgtccccccagcccagctgtgtgaacctggggatgatgtggacttgggccctgtggatgctgccatctctctgcaaatttagcctggcagctctccctgctaaaccggagaacattagttgtgtttattattatcgcaagaacctgacctgcacatggtcgcccggcaaagagacatcctatacgcaatatacagtcaagcggacttatgcctttggcgagaagcatgacaattgtacaacaaattctagcacaagcgagaacagggcctcatgttcatttttcctgcctaggattactatccccgataattacacgatcgaagttgaagccgagaacggcgacggcgtcattaagagccacatgacttactggagattggagaatatcgccaagactgagccaccaaagatcttccgagtgaaaccggtgctgggtataaagagaatgatccaaatcgaatggatcaagcccgagctagcacccgtaagttccgacctcaagtacacccttagatttcgcaccgtgaattcgacttcctggatggaggttaatttcgccaagaacagaaaggataagaatcagacctacaaccttacaggtttacagccatttacagagtatgtcatagctttaaggtgtgctgtcaaggagagcaaattttggagtgattggagtcaggagaaaatgggaatgaccgaggaagaagcaccatgtgggttggaactctggcgagttcttaaacctgctgaagcggatggcagacgccccgtccgcctgctttggaagaaagcccgcggggcacctgtgctggagaaaacactgggttacaacatttggtattatccagaatctaacactaacctgactgagaccatgaatactactaatcagcagctggagttgcatcttgggggggaatctttttgggtcagtatgatcagttacaactctttgggaaaaagcccagtcgccaccctgcggatccccgctatccaggaaaaaagtttccagtgtattgaagtaatgcaggcctgtgttgcggaggatcagctggtggtgaaatggcaaagttccgctctcgacgtgaacacttggatgatagaatggttccctgacgttgatagtgaaccgacaactttgtcttgggagtcagtttcacaagcgaccaattggacaatacaacaggataagttgaaaccattctggtgttacaatatcagcgtgtaccccatgctgcatgacaaggtcggcgagccctattccatacaggcatacgcgaaggaaggagtaccttctgaggggccagagaccaaggtggagaacattggagttaagaccgtgacgattacatggaaggagatccctaagtcagagcgcaaaggcataatctgtaactatactatcttttatcaagctgagggcggcaaaggattcagcaaaaccgtgaatagttctattttacagtacggtttggagtccctcaagcgcaaaacctcatatatcgtacaggtgatggcctctacctcggccggtgggaccaatggtacctccatcaatttcaaaactctaagcttttccgtgttcgagatcatactgatcacctccctcatcggaggaggccttctgatactgattatcttaacggtagcatacggcctgaagaaacctaacaagttgacgcatctgtgctggcctaccgtgccgaaccccgccgagtctagcattgccacttggcatggagacgattttaaagacaaactgaaccttaaggagagcgacgacagcgttaacaccgaagatagaatccttaagccctgctcaacccctagcgataagctcgtgatagacaaacttgtcgtgaacttcggcaacgtcctacaggagatctttaccgacgaggctcggacaggccaggaaaataacttaggcggcgagaagaatgggacaagaatcttgtcctcatgccctacttctatatag

SEQ ID NO: 121038 - DNA, 1989 bp, synthetic construct
  misc_feature 1..1989: note = Description of Artificial Sequence: Synthetic coding sequence
  source 1..1989: mol_type = other DNA
atgaaactgtcaccgcagcccagctgtgtcaatctgggaatgatgtggacatgggctctgtggatgcttccaagcctgtgtaagtttagtctcgccgcccttcccgccaaacctgagaatattagttgtgtctactactatcgcaagaacctgacgtgcacgtggtcgcctggcaaggagactagctatactcagtatactgtgaaaaggacatacgccttcggcgagaaacatgacaattgtaccacaaacagtagtacctccgagaatcgcgcaagctgtagctttttcctcccaaggattacaattcccgataactacacaatcgaagtggaagcagaaaacggagatggagtcatcaagagccatatgacttactggaggctggaaaatattgcgaagaccgaacccccgaagattttcagggtgaaacctgtactcggaatcaagaggatgatacagatcgaatggattaagccagaactcgcaccggtgagtagcgatttaaaatacacccttaggtttagaacagtgaatagcacttcgtggatggaggtcaattttgctaagaataggaaggacaagaatcagacgtacaatctcacaggtttacagccattcactgagtatgtcattgcccttagatgcgctgtgaaagagtcaaagttctggtcagattggtcccaggaaaaaatggggatgacagaggaggaagccccatgtggactcgagctgtggcgggtactcaaaccagctgaggcagacggacggagacctgtcagactcctttggaaaaaggcaaggggggcccctgtgttggagaagacactgggatacaacatctggtactatccggaatctaacaccaatttgacggagactatgaacacaaccaaccagcagcttgagctccacttgggtggcgaaagcttctgggtctctatgatatcttacaactccttgggaaaaagccctgtagccactttgaggattccagctattcaggaaaaaagcttccaatgtatcgaggtgatgcaggcctgtgtcgctgaagatcaattggtggttaaatggcagtcttctgcactcgatgtcaacacttggatgatcgagtggttccccgatgttgattccgagcccaccaccctctcctgggaaagcgttagccaggcgacgaattggaccattcagcaggataagctgaagccgttctggtgctataatatctccgtgtaccccatgctgcatgataaggtgggcgagccctactccattcaggcctacgccaaggaaggcgttccaagtgaaggcccggagacaaaggtggagaacattggcgtcaaaaccgtgacaataacctggaaggaaatccctaaaagtgaaaggaagggaattatctgcaattacactatattctaccaggccgaagggggcaaggggttttccaagaccgtgaatagcagcatcctgcagtatggtctcgaatccttgaagagaaaaacgtcttacattgtgcaggtgatggcttccacgtccgccggcggcacaaatggcacttccataaattttaagaccctgagcttttcagtttttgaaatcattctgatcacaagccttattgggggcggactgctgatcctcatcatcctgactgtggcatacggccttaagaagcctaacaagctgacacacctgtgttggcccactgtgcccaaccctgctgaatcttcaattgccacttggcatggggatgacttcaaagataaactgaatttgaaggaatccgacgactccgtgaacacggaggataggattctgaagccttgctccacgccgtctgacaagctggtgatcgataagttggtggttaatttcggcaatgtgctgcaggaaattttcaccgatgaggccaggactgggcaggaaaacaatttaggcggtgaaaagaatggcacacgaatactgtcaagctgtccaacgtcaatctag

SEQ ID NO: 121039 - DNA, 1749 bp, synthetic construct
  misc_feature 1..1749: note = Description of Artificial Sequence: Synthetic coding sequence
  source 1..1749: mol_type = other DNA
atgtgcattcggcagctgaagttcttcacaaccgcatgcgtatgcgagtgcccacagaacatcctcagcccccagccatcttgcgtgaaccttggaatgatgtggacctgggccttgtggatgctgccctcgctgtgcaagttctcactggcggctcttcctgcaaaaccagaaaatatcagctgcgtgtactattatcgcaagaacctgacttgcacctggtcccctggcaaggaaacttcctatacacagtatactgtgaaaaggacatacgccttcggtgaaaagcatgataattgcactaccaacagtagcacatctgagaaccgcgcctcttgttccttctttctgcccagaataactattccagataattacaccatagaggtcgaggcagaaaatggagacggggtaatcaaatcacacatgacatactggaggctggaaaacatcgctaagaccgaacctcctaagattttccgcgtgaaaccagttctgggcattaaacggatgattcaaatagagtggattaaaccagagttggcacccgtgtccagcgacctgaaatacactctgcgtttcaggaccgtaaacagtactagctggatggaggtcaattttgcaaaaaaccggaaggacaaaaaccaaacatacaatctgacaggcctccaacccttcaccgaatacgtgattgccttacggtgcgcagtaaaggagtcaaaattttggtccgactggtcccaagagaagatgggaatgacagaggaagaggccccatgcggactagaactatggcgcgttttgaaaccggccgaagctgacggcaggcggccggtgaggttgttgtggaagaaggcgaggggtgcccccgtacttgagaagaccctgggctacaatatctggtactatccagagtcaaacactaatctgactgaaacaatgaataccacaaatcaacagctggagcttcacctcgggggtgagtctttctgggtgtcaatgatcagctataactctttaggtaagagtccggttgccacactccgaatcccggccatccaggagaagtcgttccagtgcatcgaggttatgcaggcctgcgtggcggaggaccaattggtcgtgaagtggcagagctcagcccttgacgtgaatacttggatgatcgaatggttcccagatgtcgactctgaaccgactacactctcatgggaaagtgtctcgcaggctaccaactggacaattcagcaggacaagttgaagccattttggtgctataatatcagcgtatatccaatgttgcacgacaaagtcggtgaaccctactcaatacaggcctacgcgaaggagggggtgccctccgaaggcccagaaacaaaggtggagaacatcggtgtgaaaaccgtcaccattacttggaaagaaatccctaagtcagagcgcaagggcatcatttgcaattatactatcttttatcaggctgagggcgggaagggcttttgtaagcacgcacatagcgaggtggagaaaaaccccaagcctcagatcgacgcgatggacagaccagttgtggggatggcgccaccttctcattgtgatctgcagccaggtatgaaccacctggcatcactcaaccttagcgagaacggggcgaagagcacacatctgctgggtttttggggtctcaacgaatcagaggtcaccgtccctgaacgccgcgtgctacgcaaatggaaggagctcttgtag

SEQ ID NO: 121040 - DNA, 2295 bp, synthetic construct
  misc_feature 1..2295: note = Description of Artificial Sequence: Synthetic coding sequence
  source 1..2295: mol_type = other DNA
atgtgcatccgccagttgaaattcttcaccacagcttgcgtctgtgagtgtccccagaacatattaagccctcagccttcgtgtgttaatctggggatgatgtggacctgggccctatggatgttgcctagcctttgtaagttcagtcttgccgcccttccagctaagcctgagaacatttcctgcgtgtactactaccggaaaaacttaacatgcacctggtccccaggtaaagaaacgtcctacacccagtacaccgttaagcggacctacgcctttggcgaaaaacatgacaactgcaccactaatagctccacttctgagaacagagcgtcctgcagcttctttttgccgaggataaccattcccgataattacaccattgaggttgaggcagaaaacggtgatggggtgattaagtctcacatgacttattggcgactcgaaaacatcgcaaagaccgaaccccccaagatcttccgggtaaagcccgtgctcggaataaaaaggatgatccaaatagagtggataaaacccgaactggcgcctgtgtctagtgatctgaaatacaccctccgctttaggaccgtgaattccacttcctggatggaagtgaatttcgctaagaaccggaaagacaaaaaccagacctacaatcttaccggactgcagcctttcacagaatacgtcatagcgctgcggtgtgctgtgaaagaatctaaattctggagcgactggtctcaggagaagatgggaatgaccgaggaggaagcaccatgtggcctggaattgtggagagttctgaaacccgccgaagcggatggtcggagaccggttcgattgttgtggaagaaagcacgcggggccccggtcctggagaagacacttggatacaacatctggtattacccagagagcaacactaatctcacagaaacaatgaacacaactaatcagcaacttgaactacacttgggaggcgaatctttttgggtctctatgattagctataatagcttgggcaagtcacctgtcgctaccctgcgcattccagccattcaagagaaatctttccagtgcattgaggtgatgcaggcatgcgtggccgaggaccagcttgtggtgaagtggcaatctagcgctcttgatgttaacacatggatgatcgagtggtttcccgacgtcgactctgaaccaacaactctctcatgggagtctgttagccaggccactaattggaccattcagcaggacaagctgaaacctttttggtgttacaacatctcagtgtatcccatgttacatgataaagtcggggagccttactcaatccaagcatacgcaaaggaaggcgtcccatctgaaggcccagagactaaagttgagaacatcggggtaaaaaccgtcacaatcacatggaaggagattcctaaatcagaacgtaaaggcattatctgtaattatacaatattttaccaggctgaaggcggaaaaggattttcaaagacggtgaattcaagcatccttcagtatggcttggaatcactcaaacgcaaaacttcgtacattgtacaggttatggcctctaccagtgctggtggaacgaacggaacgtccatcaattttaagactcttagcttcagtgtcttcgagataatcctgattaccagcctgattgggggcggactgcttatcctaataattctgaccgtggcctacgggcttaagaagcctaataaattaacccacctctgctggccgaccgtgccgaatcctgcagaatctagcattgctacatggcatggggacgattttaaagataagctgaatctgaaagagagcgatgatagtgttaatactgaagaccggatactgaagccgtgcagcactccctctgataagctcgtgatcgataagttggtcgtgaattttggaaatgtgctgcaagagatctttactgatgaagcacgcaccgggcaagagaataatctcggcggcgagaagaacggttatgtgacatgtccattcaggcctgattgtcctttggggaaatctttcgaagagttgccggtatctcccgagattcccccacgtaaatcccagtacctccgtagtcggatgccagaaggtacccgcccggaggctaaagaacaactcttgttttctggacaatcgctcgtaccagaccacttgtgcgaggaaggcgcgcccaatccatacctgaaaaactccgttactgcaagagaattcttggtgtctgagaaactgcctgagcacacgaagggtgaggtatag

SEQ ID NO: 121041 - DNA, 1869 bp, synthetic construct
  misc_feature 1..1869: note = Description of Artificial Sequence: Synthetic coding sequence
  source 1..1869: mol_type = other DNA
atgacatattggcgcttggagaacattgccaagacagagccccctaagatttttcgggttaaaccagtgttgggaatcaagcgcatgatccagatcgaatggatcaagcccgagctggcgcccgtcagctctgacctgaagtataccctcagattccgcacagtcaactccacatcctggatggaggtgaactttgctaagaatcgcaaggataagaaccagacctacaatctgactgggctccaaccatttacagagtacgtcattgcactgcggtgcgcggtcaaagagtccaagttctggagcgactggagtcaggagaaaatggggatgaccgaggaagaagctccatgcgggttagaactttggcgagtgctgaagcctgctgaggccgatggccggcgtcccgttcgcttactgtggaagaaggcccgtggggcacctgtactggagaaaacactcgggtacaacatatggtactatcccgaatcaaacactaacctcacagaaactatgaacactactaatcagcagttagaactgcacctgggaggtgagtccttttgggtctccatgatttcttataactccttgggtaagagtcccgtggcaactcttcggattcccgccatccaagaaaagtcttttcagtgtatcgaggtgatgcaggcctgcgtggccgaggaccagctcgtggtgaaatggcagtcctctgcgcttgacgtcaatacctggatgattgagtggtttccagacgttgactctgaacctaccaccctgagttgggagtccgtgtcccaggcgaccaactggacgatccagcaggacaaactcaaaccattctggtgttataacatcagcgtgtatcccatgctgcacgacaaggtgggtgagccttactccatccaagcatatgccaaagagggtgtgccttcagagggccccgagacaaaagtcgaaaatatcggagtgaagacagttaccatcacctggaaggaaatcccaaagtctgaaaggaagggaattatctgcaactacacgatcttttatcaagcagagggtggaaaaggattctctaaaaccgtaaacagctcaatcttacagtatggactggagtcattgaagcgtaagacctcctacatcgtgcaagttatggcttccactagcgcaggagggaccaatggtacgtcaattaattttaaaactctcagcttttctgtttttgagatcatcttgatcactagcctgattggcggaggtctcctcatcctgatcatcttgaccgtggcctacggtctgaagaagcccaataagctgacacacctttgctggcccactgtccctaatcctgctgagagctcgattgcaacatggcacggagacgattttaaagacaagctcaatctgaaggaaagcgacgactccgtcaacactgaggatcggatcctaaagccatgctccacacccagcgacaaactggttattgacaagctagtggtcaactttggaaatgtgctgcaggagatcttcacggatgaagctcgaactggtcaagagaacaatctcggcggtgagaagaatgggtacgtgacatgccctttccggcctgactgccccttgggcaagtctttcgaggagcttccagtctctccagaaattcctccaagaaagtcccaatacctgagatccaggatgccggagggaacccggcccgaagctaaggagcaattgctcttcagcgggcagtcactcgtcccagaccacttgtgtgaggagggagctcccaatccttacctgaaaaactctgtgaccgcaagagaatttctggtctctgagaaactcccagagcatacaaaaggtgaagtgtag

SEQ ID NO: 121042 - DNA, 468 bp, synthetic construct
  misc_feature 1..468: note = Description of Artificial Sequence: Synthetic coding sequence
  source 1..468: mol_type = other DNA
atggtgttgagcggcgctctgtgctttcggatgaaagattccgcactcaaggtcctgtatcttcacaataaccagctcctcgcaggagggctgcacgctggtaaagtgataaagggcgaagaaatctccgtggtcccaaaccgatggttagacgccagtttatctcccgttatcctcggcgtgcagggcggcagtcagtgcttgtcttgcggggtgggccaggagcctactctgactcttgagcccgttaacatcatggagctctacttaggagcaaaggagagcaagtcctttacattttacaggagagatatgggtttaaccagctccttcgagtcagctgcctaccccggatggtttctgtgcaccgtacccgaggccgaccagcccgtcagactcacgcagctgccagaaaatggcggttggaacgcacccatcaccgatttttatttccagcagtgtgattag

SEQ ID NO: 121043 - DNA, 468 bp, synthetic construct
  misc_feature 1..468: note = Description of Artificial Sequence: Synthetic coding sequence
  source 1..468: mol_type = other DNA
atggtgttgtcgggcgctctgtgcttcagaatgaaggattcagcactgaaggtgttatatcttcacaataaccagttactggcgggtgggctccacgccggaaaagtgattaaaggggaagaaatcagcgtcgtgccgaacagatggctcgacgcgtcactgtctccggtcatcctcggagtgcagggcggcagccagtgcctctcctgcggcgtagggcaagaaccgaccctgacccttgagccggtaaacattatggagctgtacctgggagcaaaagaaagtaaaagctttaccttctatcgccgagacatggggctgacctctagttttgaatcagccgcgtatcctggctggtttctctgcactgtcccggaagcggaccagcccgtgaggttgactcagcttccagaaaacgggggctggaacgcacccataacagacttttactttcagcagtgcgactag

SEQ ID NO: 121044 - DNA, 354 bp, synthetic construct
  misc_feature 1..354: note = Description of Artificial Sequence: Synthetic coding sequence
  source 1..354: mol_type = other DNA
atggtgctcagcggcgcgttgtgtttcaggatgaaagactccgctctgaaagtcctgtatttgcacaataaccagttgctggctggaggcctccacgccggaaaggtcatcaaaggcgaggaaatctctgtggtcccaaacaggtggctggacgcatcattgtcgcccgtgatcctgggcgttcaggggggatcccaatgcctgtcctgtggcgttggccaggaaccaactcttaccctggagccagttaatatcatggaactctacctgggagctaaggaatccaaatcttttacattttacagacgcgacatggggcttacgagctcatttgagagcgccgcgtacccatag

SEQ ID NO: 121045 - DNA, 2478 bp, synthetic construct
  misc_feature 1..2478: note = Description of Artificial Sequence: Synthetic coding sequence
  source 1..2478: mol_type = other DNA
atgggctggctgtgctctgggctgctttttccagtttcatgcttggtcttactccaagtggctagctctggcaatatgaaagtgttacaggaaccgacttgcgttagcgactacatgtctatctccacgtgcgagtggaagatgaatggcccaacaaactgtagcaccgagttgaggctgttataccagcttgtctttttgttgagcgaagcacacacatgcatacctgaaaataacggtggcgctggttgcgtttgtcacctcctgatggacgatgttgtgtccgctgacaactacacactggacctgtgggcaggccagcagctgctgtggaaggggagttttaaaccaagcgagcatgttaagccgcgtgctcctggcaatttaacagttcatacaaatgtttctgatacactgcttttgacctggagcaacccttatcctccagacaattatttatataaccatctgacatacgccgtcaatatctggtctgagaatgatcctgctgacttccggatttacaacgtgacctatttggagcccagcctgcgaatcgctgcatccacgctgaagtctggaatcagctatcgagcacgagtaagggcttgggcccagtgctacaacaccacatggagcgaatggagccctagtaccaaatggcacaacagctatagggaacccttcgagcagcatctgctgcttggagtgagcgtttcttgcatcgtcatcttggctgtgtgcctgctatgctacgtttccatcacaaaaattaaaaaagaatggtgggatcaaatccccaacccggcgcgatctaggctcgtggcgatcatcatacaggacgctcagggatcacagtgggaaaagcggtctcgcggtcaggaaccggccaaatgtccccactggaagaattgtcttacaaagttactcccctgctttctggagcataacatgaaacgcgacgaggaccctcacaaggctgccaaggagatgccttttcagggctccgggaagtccgcctggtgcccagttgagatctctaaaacagttttgtggcctgaaagcatatcggttgtgagatgcgttgaactattcgaagcccccgtggaatgtgaggaggaagaagaggtcgaagaggagaagggaagtttctgcgctagtcctgagagtagccgggacgacttccaggaaggtagggagggaatcgtcgcaagattgacagaatcactcttcctggatctgctgggtgaggaaaatggtgggttctgtcaacaggacatgggtgagtcttgcctgctacctccctcgggctctacctctgcccatatgccatgggatgagttcccttcagccggccctaaggaagcacctccttggggtaaggagcagcccttgcacctcgaaccctcaccaccagcgagcccaacccagtcacccgataatctcacatgcactgaaacgccgctggtcatagcaggtaaccctgcatatcgctccttcagcaacagcttgtctcagtcgccatgcccccgggagcttggcccagaccccctcctggcccgccacctagaagaggttgaaccagagatgccctgtgtcccccagctctccgagcccacgaccgtgcctcaacctgaaccagagacctgggaacagatcctgagacggaatgtccttcagcacggtgcggccgctgctcctgtttcagctcccacgtccggctatcaggagttcgtccacgccgtggagcagggaggcactcaggcttctgcagttgtgggtttgggcccccccggcgaagccgggtataaagccttcagctcactcctggccagctccgcggtgtctcctgagaagtgtggattcggcgcaagctcaggagaggaaggatacaaacctttccaggacctgatcccagggtgtcctggagacccagccccagtgcccgtgccgctgtttaccttcgggctggatagggagccgccacgttccccccagagttcccacctaccttccagttctcccgaacatctgggattagaaccaggtgaaaaagtcgaggatatgcctaagccccccctgcctcaagagcaggctactgatcctctcgtggatagcctaggaagtgggatagtgtattccgcactgacttgccacctctgtggacacttgaagcagtgccacggccaagaagatggagggcagacccctgtgatggcaagcccttgttgcggctgctgttgtggcgatcgcagtagtccgccaactactccactgagagctcctgatccttccccaggcggggtcccgctggaagcaagcctgtgtcccgcctccctggccccatccggtatttcagagaaatcaaaatcctctagcagcttccatcctgcgcctggcaatgcccagtcatcctctcaaactccgaagattgttaattttgtgtcagttgggcccacctacatgagggtttcatag

SEQ ID NO: 121046 - DNA, 2433 bp, synthetic construct
  misc_feature 1..2433: note = Description of Artificial Sequence: Synthetic coding sequence
  source 1..2433: mol_type = other DNA
atgcaaaaagacgctagaagagagggcaacatgaaggtcctccaggaacccacgtgcgtttccgattatatgtccatctcgacctgtgagtggaagatgaacggccccactaactgtagcaccgagttacgactgctgtatcaactagtgttcctcctttccgaggcgcacacatgcatccctgagaacaacggaggcgctggctgtgtgtgtcatctgctcatggacgatgtagtctcagcagataactatactttggacctgtgggccggtcagcagcttctgtggaagggctctttcaaaccaagcgagcacgtgaagccacgggcccctgggaatctcaccgtgcacactaatgtatccgatactttgttactgacatggagcaacccgtatcctcctgacaactatctttacaatcacctcacctatgctgtaaatatctggtctgaaaatgatcctgcagacttcagaatttataacgtcacctacctggaaccctccttgaggatagcggcttcgactttaaagtccggcatttcgtatcgggctcgggtccgagcctgggctcagtgttacaataccacctggtcagaatggtccccatctaccaaatggcataactcctacagagagccgttcgaacagcacctcctcctcggtgtttccgtgagctgcatcgtgatcctggcggtctgtctgctgtgttacgtgtctatcacaaaaattaagaaagaatggtgggatcaaataccaaatcccgctcgatcccggctcgtcgccattattattcaggatgcgcagggatctcagtgggaaaaaagaagccgagggcaggagcccgcaaagtgcccgcattggaaaaattgcttaacaaagctattgccttgctttctggaacacaacatgaagcgcgatgaagatcctcataaagctgctaaagagatgcccttccagggctccggcaagtccgcgtggtgtccagtcgaaatttcgaagacggtcctctggcccgaaagcattagtgtcgtacgctgcgtcgagctctttgaagcccctgtcgaatgcgaagaggaagaggaggtggaagaggaaaagggcagcttttgtgcctctccggaaagcagccgggacgactttcaggagggccgtgaaggaattgtcgcaaggctgactgagtcactttttctggaccttctcggtgaggagaacggcgggttctgtcagcaggacatgggtgagagttgcctccttccccccagcggctccaccagcgctcatatgccttgggatgagttcccttctgccgggcccaaggaggcccctccgtggggaaaggaacagcccctgcacctggagcccagtcccccagcatctcctacacaaagccccgacaacctgacctgcactgaaaccccactggtaatagctggtaaccctgcctacaggagctttagcaattccttgagtcagtcaccatgccccagggagctgggccccgacccgctgctggcgcgccatctggaagaggtagaacctgagatgccatgtgttccacaactgagcgaaccgacaactgtaccacagccagaacctgaaacctgggaacagatccttagaaggaatgtgttgcagcacggcgcagccgcggctccagtgtctgccccgacttctggttaccaagagtttgtgcacgccgtcgagcaggggggaactcaggccagcgccgtggttgggttgggacctccaggggaggccggctataaggctttctcaagcctgttggctagttctgcggtctctcctgagaagtgtgggtttggcgccagctcaggcgaagaggggtacaagccgttccaagatctgatacctgggtgccccggagacccagctccggtgccggtgccgctcttcacatttgggctggatcgtgagcctccaaggagtccgcagtctagtcatctgccctcatcatctccagagcaccttggccttgagccaggtgagaaggtggaagacatgcctaaacctcctctaccacaggagcaggcgactgaccccctagtagacagcctcggtagcggaatcgtctacagtgcactgacatgccatttgtgtggccacctcaagcagtgtcacggacaggaagacggaggccaaacacccgtgatggcatccccgtgttgcggctgttgctgtggggatcgctcgtctccacctacgacaccactccgtgccccagacccttctccaggcggggtccccctcgaggcaagcctttgcccggcttcattggctccctcaggaatttcagaaaagtctaaatctagcagcagcttccatcctgcaccaggaaatgcccagtcaagcagccagacgccaaagatcgtgaacttcgtgagtgtcggccccacctacatgagggtgagttag

SEQ ID NO: 121047 - DNA, 684 bp, synthetic construct
  misc_feature 1..684: note = Description of Artificial Sequence: Synthetic coding sequence
  source 1..684: mol_type = other DNA
atgggttggctgtgttctgggctgctgtttccagtatcttgcctcgtgctgctacaggtagctagttcagggaatatgaaggttctgcaggagccaacttgcgtgtccgactatatgtcaatctccacgtgtgaatggaaaatgaatgggccaaccaactgctcaaccgagctgagattattgtaccagctcgtatttctactgagcgaggcacacacttgcataccggaaaataacgggggagccggctgtgtgtgtcaccttctcatggacgacgtggtttcagccgataattatacactggatctgtgggcgggccagcagctgctttggaagggatcctttaagcccagcgagcatgtcaaaccacgggcacccgggaatctgactgtccacaccaatgtgtccgatactttgttgcttacttggtcgaacccatacccccccgacaattatctgtataatcatcttacatatgccgtgaatatttggtcggaaaatgaccctgcagacttccgcatttataatgtcacttatctcgagccgagcctgcgcatagcagcttctacacttaaaagcggaatcagttaccgggctagggtgagggcctgggctcaatgctacaacacaacttggtctgagtggtccccaagtacaaagtggcacaacttctctgtgtgctag

SEQ ID NO: 121048 - DNA, 2478 bp, synthetic construct
  misc_feature 1..2478: note = Description of Artificial Sequence: Synthetic coding sequence
  source 1..2478: mol_type = other DNA
atgggttggctctgttccggcttgctgtttcctgtgtcatgtctggtcttgctacaggtagcctctagcggaaacatgaaggtattgcaggaacctacatgtgtcagcgactacatgagcatcagcacctgcgagtggaaaatgaatgggccaaccaactgcagcacagaactccgcttgctgtaccaactcgtcttcttgctttcagaggctcacacctgtattcctgagaataacggcggggccgggtgtgtttgccacttactgatggacgatgtggtgagtgccgacaactataccctcgacttatgggccggtcagcagttactttggaaaggctccttcaagccatccgagcacgtcaagccaagagcacctggaaaccttactgtacacaccaatgtctcagatacactccttctcacatggtcaaacccatacccacccgataattacttgtacaaccacttaacctatgcggtgaatatctggagcgagaatgatcctgccgacttcagaatctataatgtgacctatctggagccctctctgagaatagcggcctccactctgaaaagcgggattagctatagggcacgagtccgtgcctgggcacagtgctataatacgacttggtcagaatggtccccttccaccaagtggcataactcttacagagagcccttcgaacaacacctactgctgggagtctccgtgtcctgtatcgtgattctggccgtctgtctcctctgttacgtgtctatcaccaaaatcaaaaaagaatggtgggaccagattcctaaccccgcaagatcacggttagtcgctatcatcatacaagatgctcagggctctcagtgggagaaacgctcacgagggcaagaacccgccaaatgtccccactggaagaattgcttgactaagctgctaccctgcttcctggaacacaacatgaagcgagacgaggatcctcataaggcagcaaaagaaatgccgttccaggggtcaggaaaaagcgcctggtgcccagttgaaatttcaaagacagtcttgtggcccgagtcaatcagtgtggtgcgctgcgtggagcttttcgaagccccggtggagtgtgaggaagaagaagaggttgaagaagaaaagggctctttctgcgctagccctgagagcagccgagacgattttcaggaaggccgggagggcatcgtggcacgtttaaccgagtccctgtttcttgatttattgggggaagagaatggtgggttttgccaacaagacatgggcgagagttgtctgcttcccccttccggctcaacctccgctcatatgccttgggacgagttcccaagtgccggccctaaagaggcccccccttgggggaaagagcagcctctgcatctggaacccagtccgccggcttcaccaactcagagcccagacaacctgacatgtactgagacccccctggttatcgcaggaaatcctgcatacaggagcttctccaactcactctcccagtccccctgccctagagagctgggcccagacccattactggccagacacctggaggaagttgagcccgagatgccatgcgtgcctcaactatcggagcccacaacagtgcctcagccagaaccagaaacgtgggaacagatcctgcgtcgaaatgtgctccagcatggcgctgctgctgcccctgtttctgctcccacttcaggatatcaagaattcgtgcatgcggtggaacagggaggaacccaggcatctgctgtagtcgggctaggaccaccgggagaggccggctataaggcattctcgagcctactggcgtcatccgctgtgtccccggaaaaatgtggcttcggtgcgagctccggagaagaaggatacaaacctttccaagatttgatcccaggatgccccggcgacccagcccccgtcccagtgccgctgtttacattcggccttgatagagagccaccccggagtcctcagagctcccatctcccgtcatccagtccagagcacttagggttggaacccggggaaaaagtggaggatatgcctaagccacccttaccccaggagcaggcaacggatcccttagtagatagccttggctctggcatcgtctatagcgctttgacctgccacctgtgcggtcaccttaaacagtgtcatggacaagaagatggcggccagacaccagtcatggccagcccttgttgtggatgttgctgtggcgatcggtcttccccacccactaccccactgcgcgcacccgatccctccccgggaggcgtgccactagaagcgtcattgtgtcctgccagtctggctccgagcggaatatccgaaaagagtaaaagcagcagtagttttcacccagctcctgggaatgcccagtcctcgtcccagacgccaaaaattgtgaatttcgtgtccgtggggccaacgtacatgagagtgagctag

SEQ ID NO: 121049 - DNA, 684 bp, synthetic construct
  misc_feature 1..684: note = Description of Artificial Sequence: Synthetic coding sequence
  source 1..684: mol_type = other DNA
atgggttggctctgtagcggcctgctctttcccgtgagttgcctggtcctcctgcaggttgcaagcagtggaaacatgaaagtcctgcaggaacctacatgtgtgtctgactatatgtccatctcgacgtgtgaatggaagatgaacggtccaacgaattgtagcacagagctgcggcttctatatcagctcgtgtttctattgtccgaagcccacacctgtatcccagaaaataatggcggtgccggctgtgtatgccacctgttaatggacgacgtggtctccgctgataattatactttggatctgtgggcaggacagcagctgttatggaaagggtcgttcaagccctccgaacatgtcaaaccacgcgctccaggaaatctcaccgtccataccaacgtgtctgacactctgcttttgacgtggtccaatccatacccccctgacaattacctgtacaatcatctcacctatgctgtgaatatatggtcggaaaacgaccccgcagattttcgcatttacaatgtgacttacctggaaccttcactcagaatcgccgcttccactctgaaatcaggaataagctatcgggcccgcgtgagagcatgggcccagtgctataatacaacctggtctgagtggagtccgagcaccaagtggcacaactccaacatatgctag

SEQ ID NO: 121050 - DNA, 2478 bp, synthetic construct
  misc_feature 1..2478: note = Description of Artificial Sequence: Synthetic coding sequence
  source 1..2478: mol_type = other DNA
atggggtggctgtgttcgggacttctttttcctgtgtcatgtcttgttctgctccaggtggcttcctctgggaatatgaaagtgctgcaagagcccacctgcgtttccgattatatgagcatctccacatgcgaatggaaaatgaatggtccaaccaactgttccacagagttacgtctgctgtatcagctagtgttcttgttatccgaagcccacacttgcatccctgagaacaatggaggcgcaggctgtgtgtgtcacctcttgatggacgatgtggtgtcagccgataattacacactggacttgtgggcgggacagcagctcttgtggaaggggtcgtttaaaccctcagagcacgtgaagccacgcgcccccgggaacttaaccgtgcatactaacgtctccgacactctgctcttgacctggtcaaacccataccccccagacaattacctatacaaccacctgacgtacgcagttaacatttggagtgagaacgaccccgcagactttcgaatatataatgttacttatttggaacccagcttacgcatagctgcttctacactgaagtcaggtatatcctatcgcgctcgggtccgggcctgggcccaatgctataacactacttggtctgaatggtcgccctcaaccaaatggcacaacagctaccgggaacccttcgaacaacatctgttgctgggcgtgtcagtatcatgcatagtgattctggctgtgtgcctgctgtgttatgtcagcataacgaaaatcaagaaggagtggtgggaccaaatcccaaaccctgctaggagcaggctggttgctattattatccaggacgcacagggctcacagtgggaaaagagaagccgtggccaggaaccagctaagtgtccccattggaaaaattgcctgaccaaactcctaccctgcttccttgagcacaatatgaagcgagacgaagaccctcacaaggctgccaaggaaatgccctttcaggggtctggcaaatccgcatggtgtccggtagaaatctccaagaccgtcttatggcctgagtctattagcgtggttaggtgtgtggagttgtttgaggcccccgtcgagtgcgaggaagaagaggaggtcgaagaggagaaaggctcattctgcgctagtcccgagtcttcaagggacgattttcaagagggccgggaggggatcgttgctaggctgaccgagtcgctgtttttagacctgctcggggaggaaaacggaggtttctgtcagcaggatatgggcgagtcttgtctgctgccaccctccggatccacaagcgcacacatgccttgggatgaatttcccagcgccgggcctaaggaggctcccccttggggaaaggagcaacccttgcacctggagccctctcctcccgctagtccaacacaatcaccagacaacctcacatgcaccgagaccccccttgttatagccgggaaccctgcctaccgaagtttctctaactcccttagccagagtccctgccctcgcgagctgggacccgacccgctcctcgcccgtcacctcgaggaggtagaacccgaaatgccttgcgtcccacagctgtcagaaccaacaaccgtcccccaaccagagccagagacgtgggaacagatattaaggaggaacgtgctgcaacacggagccgcggccgccccggtcagtgcacctacctctggatatcaagaatttgtgcatgcagttgagcagggcggtacgcaagcctccgccgtggtcggactgggccccccaggcgaggctggctacaaggcgttcagctctttattagctagttccgctgtgagcccagagaagtgtggctttggcgcatcgtcaggggaagaaggctataagccgttccaggaccttatccccggatgtccaggcgacccagcgccagtgcctgttccccttttcacctttggcctggatagagagccccctcgaagcccacagtcgtcacacctgcccagttctagccctgaacatctgggccttgaacccggcgagaaagttgaggacatgcctaagccgcccttgccacaggagcaggcaactgatccactcgtggatagtcttgggagcggtatagtgtactcagctctcacttgccatctctgcgggcacctgaaacagtgtcacggccaagaggacggcggacagaccccagtaatggccagcccttgttgtggctgctgctgcggagacaggtcatctcccccaacaactcctctaagagctcccgacccttcccctggaggcgtgccattggaagcgagcctgtgtcccgcctcattagctccatcaggcatctccgaaaaatcgaaatccagttcttcattccacccagcaccaggaaacgcccagagctcatctcagactccgaaaatcgtgaattttgttagcgttggtcctacttatatgagagtcagctag

SEQ ID NO: 121051 - DNA, 1263 bp, synthetic construct
  misc_feature 1..1263: note = Description of Artificial Sequence: Synthetic coding sequence
  source 1..1263: mol_type = other DNA
atgatcatcgtcgcccatgttcttttaatcctcctgggagcgactgaaatcctccaggcagacctgcttcctgatgagaagatctccctgttacctcccgtgaatttcacaattaaagttaccgggctcgcccaggtcctcttacagtggaagcctaaccccgaccaggagcagagaaatgttaatttggagtaccaagtgaagataaacgcccccaaggaagacgactatgagacccgcattacagaaagcaagtgcgtgaccattctccataagggctttagcgcaagtgtgcgaaccatcctacaaaacgatcacagcctgttagcatcatcctgggcctccgctgaactgcatgcaccaccaggctcccctgggacttcaattgtgaaccttacatgtaccacaaacacgactgaagataactattccagactgagaagttaccaagtgtcacttcactgcacttggttggttggcaccgatgcaccagaggatacacaatacttcttgtattaccgctatgggtcctggacagaggagtgtcaggaatactcaaaggacactctgggccgaaatattgcctgttggttcccgcgcacattcattcttagcaaaggccgggattggctggctgtcctcgttaatgggagtagtaagcactccgcaattaggccctttgatcagctcttcgctctgcatgctattgatcagatcaacccacccctcaacgtgaccgcggaaattgaagggactcgcctgtcaatacagtgggagaaacccgttagcgcctttccgattcactgtttcgactacgaggtgaaaatacacaacacacgtaacggctatctgcagattgaaaagttaatgaccaacgcgtttatatccattatcgacgatttatccaagtatgacgtccaagtccgggcagctgtgtcctctatgtgtcgcgaagccggcctctggtcagaatggtcccagcccatctatgtaggaaacgacgaacacaaacctcttagggagtggttcgtgattgtaattatggcaacaatttgtttcattctgttaatcttatccctcatttgtaagatctgccatctatggattaagctgtttccccccattcccgcgcctaaatcgaacatcaaagacctctttgtgacaacgaactacgaaaaagcaggatctagcgagaccgagattgaggtcatatgctacatcgaaaagccaggcgttgaaactctggaggattcagtcttttag

SEQ ID NO: 121052 - DNA, 1008 bp, synthetic construct
  misc_feature 1..1008: note = Description of Artificial Sequence: Synthetic coding sequence
  source 1..1008: mol_type = other DNA
atgattatcgttgcccacgtcctcctgatcctcctgggagccacagaaatcttacaggccgacttgttgccagatgagaaaatttcactgctgccgcccgtcaactttactattaaggtcacgggcctggctcaggtcctgctgcaatggaagccgaacccagatcaagagcagagaaacgtcaatttggaatatcaagtaaagatcaatgcccccaaagaggatgattacgagacaaggattaccgagtcgaaatgcgttacaattctccataaagggttttctgcaagtgtgcgcaccattctacagaacgatcactctcttctggccagttcatgggcctcagccgaattacatgctcctccgggatctccagggacttcgattgtgaacctgacttgtacaaccaatacaacagaggacaactactcccgcttgagatcataccaggttagtctgcactgcacctggctcgtgggcaccgacgctcccgaggacactcagtacttcctgtactacagatacggctcctggaccgaggaatgtcaagaatatagcaaggatacactgggtcgcaacatcgcttgttggtttcctcggacttttatactgagcaaggggcgtgattggctcgcagtgttggtaaacggctcatctaagcattctgctatccggccttttgaccagctgttcgcacttcacgccattgaccagattaaccccccactgaatgttaccgccgaaatcgagggcactcgtcttagcatccaatgggaaaagcctgtctcagctttcccaatacattgtttcgactacgaagtcaaaatacataatactagaaatgggtatctgcagatcgaaaagctgatgaccaatgccttcatctctatcatcgatgacctaagcaaatacgatgttcaagtgcgggctgccgtgtcgagcatgtgccgcgaagccggcctctggagcgagtggagccagcctatctacgtgggcttctcacggtag

SEQ ID NO: 121053 - DNA, 453 bp, synthetic construct
  misc_feature 1..453: note = Description of Artificial Sequence: Synthetic coding sequence
  source 1..453: mol_type = other DNA
atgaccaatgctttcatcagcattatcgacgacctgagtaagtacgacgtccaggtcagagcggcagtttcatctatgtgtcgagaggctgggctgtggagcgagtggagccagccgatttacgtgggcaacgacgaacataaaccgcttcgggaatggtttgtcatcgtgatcatggccacaatatgttttattctgctgatcctttcactcatttgtaaaatctgtcatctgtggatcaagctcttcccacccatccctgccccgaagtctaatatcaaagatctgtttgtgaccaccaattacgaagtcctgtgcatattcatctacattctcgattccgctgacaattttctgcagaagaagaaagctggatcttctgaaaccgagatcgaggtcatctgctacatcgaaaagcccggcgttgaaactctggaggatagcgtattctag

SEQ ID NO: 121054 - DNA, 1008 bp, synthetic construct
  misc_feature 1..1008: note = Description of Artificial Sequence: Synthetic coding sequence
  source 1..1008: mol_type = other DNA
atgatcattgtcgcccacgtgctactcattctactcggggctactgagatcctgcaagccgacctcctgccagacgaaaaaatctcactcctccctccggtgaattttactatcaaagtcacgggcctcgcccaggtgctgttgcagtggaagcctaaccctgatcaggagcagcggaacgttaacctggaataccaggtcaagattaacgccccaaaggaagatgattatgagacacggattacagaatccaagtgtgtcacgattctgcacaagggattctctgcatccgtcagaactatcttgcagaatgatcatagcctcctggcctcgtcctgggccagcgccgaactgcacgcgcctccagggtcccctggaacctctattgtcaatctgacctgcaccaccaatacaaccgaggacaattattctcgccttcgatcatatcaggtgagcctccattgtacatggttagtagggacagacgcgcctgaggacacccagtacttcttgtattaccgctacggaagctggactgaagaatgtcaggagtatagtaaggatacactcggacggaatatcgcctgctggttccccagaaccttcattctgtccaagggccgcgattggctggcagtgcttgtcaatggcagcagcaaacactcagctatcaggccatttgaccagctgtttgctcttcacgcaatagaccaaattaaccccccgctaaacgtgacagccgaaatcgaaggaacacgcttaagcatccagtgggagaagcccgtatccgcctttcctattcactgctttgactatgaggtgaagatccacaacacccggaatgggtacctccagatcgagaaactgatgaccaacgcatttattagtatcattgacgacctgtcgaagtatgatgtgcaggtgcgtgcagctgtgtcatccatgtgcagagaggccggcctgtggagcgagtggtcccagcctatttacgtgggattcagtcgctag

SEQ ID NO: 121055 - DNA, 978 bp, synthetic construct
  misc_feature 1..978: note = Description of Artificial Sequence: Synthetic coding sequence
  source 1..978: mol_type = other DNA
atgatcatcgtagcccacgtgctgctcatcctgctgggcgcgaccgagatcttgcaagccgacctgcttccggatgagaaaatcagtcttctccctcctgtgaattttacaatcaaagtcaccgggcttgctcaggtcttactccagtggaagcccaatcctgatcaggagcagagaaatgtcaatctggagtaccaagtcaagataaacgcaccaaaagaagatgactatgaaactcggatcacagagagcaagtgcgtcactatcttacacaaggggttctccgctagcgttaggaccatccttcaaaacgaccacagtttgttggcctcttcatgggcatcagccgagctccacgccccgcccggcagtcctggaacctccatcgtcaatctcacttgcactaccaatactaccgaggacaattattcccgacttagatcctaccaggtttctttgcattgtacttggctggtgggcacagatgcgcctgaggatacccagtactttctatattatagatatggcagttggacagaggaatgtcaggaatactccaaagacaccttaggtcggaacatcgcctgttggtttccaagaacttttatcctgtctaagggtcgtgattggctcgccgttctagtaaacggatcctccaagcatagtgccatccgtccgttcgaccagctattcgccctacacgccatcggtaatgacgagcacaagccccttagggaatggttcgtaatcgtgatcatggccaccatctgctttatcctcctgattctgtcattgatctgcaagatttgtcacctctggatcaaactcttccctcccattcccgccccaaagtccaacatcaaggacttgttcgtaactaccaattacgagaaagcaggcagctccgagaccgagatagaggtaatctgctacattgagaagccaggggttgagacgctggaagatagcgttttctag

SEQ ID NO: 121056 - DNA, 330 bp, synthetic construct
  misc_feature 1..330: note = Description of Artificial Sequence: Synthetic coding sequence
  source 1..330: mol_type = other DNA
atgatcattgtggcccacgtcctgctcattctgctgggagcgaccgagatcctgcaggctgacctcctgccagatgaaaaaatatctctactgcctcccgtgaatttcactataaaggtgacaggcctggcacaagttctgctccaatggaagccgaacccagatcaagagcagaggaatgtcaatctggagtatcaggtgaagattaatgctcccaaagaggatgactacgaaactcgaataacagagtctaagtgtgtgaccatcttgcataaggggttttccgcctccgtgaggaccatcctgcaaaacgatcattccttactatag

SEQ ID NO: 121057 - DNA, 1002 bp, synthetic construct
  misc_feature 1..1002: note = Description of Artificial Sequence: Synthetic coding sequence
  source 1..1002: mol_type = other DNA
atgatcatcgtcgcacacgtgctgctcatcctgttgggcgctactgagattctgcaagcagacctcctcccagatgaaaagatttctctgctcccaccagtaaacttcaccatcaaggttacgggcctggctcaggtgctgctgcagtggaagcctaatccggaccaagagcagcgcaatgtcaacctggagtaccaggtgaagatcaatgctcccaaggaagacgattatgaaacgcggataactgaatccaagtgcgtgacgattctccataagggtttcagtgcaagcgtcagaactatactgcagaacgaccacagtctgttggcttccagctgggcttcggcagaactgcatgctccacccggcagtccaggcacctctatcgtgaatctgacttgtacaacaaacactacagaggacaactatagtcggctgcgatcataccaggtgagcctccattgtacctggttagtcgggacagacgctcccgaagatacccagtattttctctattatcgatacggctcatggaccgaagaatgtcaggaatactcaaaagatacgctgggacggaatattgcatgctggttccccaggacatttatcttgtcaaaaggaagagactggctagctgtgttggtgaatggtagctccaaacatagcgccatccgcccctttgatcaactctttgctctgcatgccattgaccagatcaacccccccctcaatgttaccgccgaaattgaaggcactcgcctgtcaattcagtgggaaaagcccgtgtctgcttttccaattcactgcttcgactacgaagtgaagattcacaatacgcgaaacgggtacttgcaaattgagaagcttatgactaatgctttcatcagcattatcgatgatttatcaaaatatgatgttcaggttagagcagcagtgtcgagtatgtgtagggaagcgggcttatggagtgaatggagccaaccgatctacgtgggcaagtag

SEQ ID NO: 121058 - DNA, 1137 bp, synthetic construct
  misc_feature 1..1137: note = Description of Artificial Sequence: Synthetic coding sequence
  source 1..1137: mol_type = other DNA
atgatcatagtcgcccacgtgctgctgatcctgcttggtgcaaccgaaatactacaggcggatctgcttcctgacgagaagatcagcctgctgcctcctgtaaactttacaatcaaagtaacaggattggcacaagtgctgctgcagtggaagcccaatcccgaccaggaacagagaaatgtcaatctcgagtaccaagtgaagatcaacgcccccaaggaggatgactacgagaccagaataaccgaatcaaagtgcgtcacgatccttcataaagggttctcggccagtgttaggacaatcctccagaacgatcacagtctcttggcttcctcttgggccagcgctgagctccatgcgccaccaggttccccaggaacaagcattgtcaacttgacctgtaccacaaataccactgaagataattacagtcgattgcgctcctaccaggtgtccttacactgtacgtggctcgttggcaccgatgcgcctgaagatactcagtacttcttgtactacagatatggttcctggacagaggagtgccaggagtattctaaggatactttggggcggaacatcgcctgctggtttcctaggacattcattctgtctaaaggtcgagactggttggccgttctagttaatgggtcatcaaagcacagtgccatacgtccttttgaccagctttttgcccttcatgcgattgaccagattaatccaccccttaacgttactgctgaaatcgaggggacacggctgtcaatacagtgggagaaacctgtgagtgctttccccattcactgtttcgactatgaggtcaaaatacataacacacgtaatggctacctgcagatcgagaaactcatgaccaacgcctttataagcattatcgacgatctctctaaatatgatgtgcaagttcgggccgcagtgtccagcatgtgcagagaggccgggctgtggtcagaatggtcgcagcctatctacgtgggcaacgacgaacataagcccttaagagagtggttcgtaattgttatcatggcaactatatgcttcatcctactgattctgagtctgatatgcaagatcaaactcggccccgtccgacgtaagctcaagtcgtccgttatctag

SEQ ID NO: 121059 - DNA, 591 bp, synthetic construct
  misc_feature 1..591: note = Description of Artificial Sequence: Synthetic coding sequence
  source 1..591: mol_type = other DNA
atgataatagttgctcacgtgttattgatattactcggagctacagaaattctgcaagccgatctgctgccagacgaaaaaatcagccttttgcccccagtgaacttcactattaaggtgaccggcctcgctcaggtgttacttcaatggaagccaaatcccgaccaggaacagagaaacgtgaacctcgagtatcaggttaaaataaatgctccgaaagaggatgactacgagactcgcatcacagaaagtaagtgtgtgacaatactgcacaaagggttttcggcatcagtgcgcacaatcctacaaaacgatcattccctgctcgctagttcttgggcctcagccgaattgcatgctccacctggatctcccggcacgtcaatcgtgaacttgacctgcacaaccaatactactgaggataactacagtcgccttagatcgtatcaggtgtctctgcattgtacatggttagtcggcactgatgctccagaggacacacagtacttcctgtactaccgctatggatcatggacggaggagtgtcaggaatactccaaagacacattaggtcgaaacattgcatgttag

SEQ ID NO: 121060 - DNA, 636 bp, synthetic construct
  misc_feature 1..636: note = Description of Artificial Sequence: Synthetic coding sequence
  source 1..636: mol_type = other DNA
atgatcatcgttgcccatgttttgttaatcctgctcggagctacagaaattctgcaggcggacctgctgcccgatgagaagatctccctcctgccgcccgtcaacttcacaattaaagtgaccggtctagcgcaggtgctgttgcaatggaagccgaaccctgatcaggagcagcgtaatgtgaatctggagtatcaagtgaagattaatgctccaaaggaagacgactatgagacaaggatcacagaatccaagtgtgttacaattctgcataaggggttctctgcaagtgtgaggacgatcctgcagaacgatcacagcctgctggccagttcttgggcaagcgccgaactccatgcaccacctggcaacgatgaacacaagccattacgcgaatggtttgtcatcgtgattatggccaccatatgctttattctgctaatcctgtctctcatatgcaaaatatgtcacctgtggattaaacttttcccacctattcccgcccccaagtcaaacatcaaggacctgttcgtcacaaccaactacgagaaagctggaagtagtgagacggaaatcgaggtcatctgctacatcgagaagccaggtgtggaaaccctcgaggactcagttttctag

SEQ ID NO: 121061 - DNA, 1263 bp, synthetic construct
  misc_feature 1..1263: note = Description of Artificial Sequence: Synthetic coding sequence
  source 1..1263: mol_type = other DNA
atgatcattgtagcccacgttctattgatcctgctgggtgctaccgagattttgcaggccgacctgcttcccgacgaaaaaatatctttgctgccgcccgtgaattttacaattaaagtaaccggactggcccaggtgctcttacaatggaagccaaacccggatcaggaacagagaaatgttaaccttgaataccaagtgaaaataaacgcgcctaaggaagacgattacgaaaccaggattacagaaagtaaatgcgtgacaattcttcacaagggtttctcagcaagcgtacggaccattttgcagaacgaccatagtttgttggccagtagttgggcttcagcggaactgcatgcccctccaggcagcccagggaccagcatagttaacttgacctgtaccacaaatacaacggaagataattactctcgccttcgatcctaccaggtttctctgcactgtacttggttagtaggcacagacgcaccagaggatacacagtattttctatattataggtatggctcgtggacagaagaatgccaggaatatagcaaggacactctgggtagaaacattgcatgctggttcccgcgaacctttattctgtctaaaggccgagattggttagccgtcctagtcaatggatccagcaagcattccgctatacggccatttgaccaacttttcgccttacatgctattgatcaaataaacccacctctgaacgttaccgccgagatcgaggggaccaggctctcaatccagtgggaaaaaccagtgagtgccttccccatccattgcttcgactacgaagtgaagatccacaatacccggaacgggtatctccagattgagaagctcatgacaaatgccttcatctcaattatcgacgatctgagtaagtatgacgttcaggtgagagccgcagtgtccagcatgtgtcgagaggccggcctctggtccgagtggtcacagccgatttatgtagggaatgatgaacacaagcctctcagagaatggttcgttattgtcatcatggcgactatctgctttatccttttaatcctgagtcttatttgtaaaatctgtcacctctggattaagcttttcccccccatccctgcaccaaagtcaaacattaaggacctgtttgtaacgacaaattacgagaaggccggctccagcgagacggagatcgaggtgatctgctatatcgagaaacctggtgttgagacacttgaggactctgttttttag

SEQ ID NO: 121062 - DNA, 1002 bp, synthetic construct
  misc_feature 1..1002: note = Description of Artificial Sequence: Synthetic coding sequence
  source 1..1002: mol_type = other DNA
atgattatcgttgcccacgttctgctgatacttttgggggccaccgaaatcctgcaggctgatttactcccggatgaaaagatttcccttcttcctcccgtgaatttcactatcaaggttaccggtcttgcgcaagtgctcctacagtggaagcccaatcctgaccaggaacagaggaacgtaaacctcgagtatcaggtaaaaattaatgcaccaaaggaagacgactacgaaacgcgtatcacagaaagcaaatgtgtcacaattctccacaaaggattttccgcgtccgttaggacaatcctccagaacgatcactcacttctggcttctagctgggcttcagcagagctccacgccccaccaggctcccctggtacttccatcgtcaaccttacatgcactacaaacacaacggaggataattattctagactacggagctaccaggtgtccttacattgtacatggttagtgggcaccgacgcacccgaagacacacagtacttcctatactatcggtatggatcttggactgaggaatgtcaagaatactcaaaagatacgcttgggaggaatatcgcttgttggtttcccagaacgttcattctttccaagggtcgagattggcttgccgtcctggttaacggctcatccaagcacagcgcaatcagaccgttcgaccaactgtttgctctccatgcaatagaccagataaaccctcctctcaatgtgaccgccgaaattgagggaaccagactttccatccagtgggaaaagcccgtgagtgcatttcccatacattgtttcgattacgaagtcaagatccacaacacccggaatggatatctgcagattgagaaactgatgaccaatgcattcatttccattatagatgatctgagtaaatacgatgtccaggtaagagccgcagtatcctctatgtgtcgtgaagcaggtctatggagtgagtggagccagcccatatacgtgggtaagtag

SEQ ID NO: 121063 - DNA, 1098 bp, synthetic construct
  misc_feature 1..1098: note = Description of Artificial Sequence: Synthetic coding sequence
  source 1..1098: mol_type = other DNA
atgctggctgttggctgtgccctactggcagctttgctggctgctccaggagccgcactggcccctcgcaggtgccctgcccaggaggtggcccgaggcgtccttacctcgctccctggcgattctgtgactcttacctgcccgggggtggagccagaggacaatgccacagtacattgggtcctgcgcaaacccgccgctggatctcacccatctaggtgggcagggatggggcgaaggctcctgctaaggtcagtacagctgcacgacagtggaaattactcctgctaccgcgccggccggcctgctgggacagtgcaccttttggtggacgttcctcccgaggagccacaactgagttgtttcaggaagtctccccttagtaatgttgtgtgtgaatggggacctcgctccaccccttccttgactacgaaggccgtgctgctggtgcgcaagtttcagaattcacctgccgaggactttcaggagccttgtcagtactcacaggagagccagaagttcagttgtcaactggctgttccagaaggagacagttctttctatattgtgagcatgtgcgtcgcctctagtgtgggttcgaagtttagtaaaacgcaaaccttccagggatgcggcatactacagcccgatccaccagcgaatattacagtgaccgccgtggctcgcaatccaaggtggctctctgtgacgtggcaagatccccactcctggaactctagcttttataggctccgctttgaattacggtacagggctgagagatctaagacatttacaacctggatggttaaggatcttcagcaccactgtgtcatccacgatgcttggagtggactccgccatgtagttcaactcagggcccaggaggagttcggacaaggcgagtggtcggagtggtccccagaagctatgggtaccccttggacagagtctagatcgcctccagctgaaaatgaagtcagtactcccatgcaggcattgaccaccaataaagacgatgacaatatcttattcagagattcagctaacgctacttcgttacctggaagtagaaggagaggtagttgtggcctttag

SEQ ID NO: 121064 - DNA, 1407 bp, synthetic construct
  misc_feature 1..1407: note = Description of Artificial Sequence: Synthetic coding sequence
  source 1..1407: mol_type = other DNA
atgctcgccgtcggctgtgcactattggccgccttacttgcagccccaggggcagctcttgcacctaggcgatgtcctgcacaggaggtggctagaggtgtgcttacatccctgcctggtgactctgtgacactcacctgtcccggcgttgaaccggaggacaatgccaccgtccactgggtgctgcgcaaacctgccgctgggtcacatccatcgcggtgggcaggtatggggcgccggttgctcctacgttcggtacagttgcacgacagcgggaattactcgtgttaccgtgccggcagacctgcagggactgtgcacctcctggtagatgtgccgcccgaggagccacagctctcttgttttcgcaaatcccctctgtcaaacgttgtttgcgaatggggtccaagaagtacgccctctctcacaactaaggcggtgctgctggtgcgcaaattccagaattcgccggcagaagattttcaggagccttgccagtatagtcaggagtcacagaaattctcttgccagctcgccgtgcctgaaggcgactccagtttctatatagtgtccatgtgtgtggcctctagtgtgggtagcaaatttagtaagacccagacatttcagggctgcggcattcttcagccagatcccccagccaacattacagtaacagcggtggcaaggaacccgcggtggttatcagtgacctggcaagacccccattcttggaatagttcattctatcgactgcgcttcgaacttcggtacagggctgaacgctccaagaccttcaccacttggatggtgaaggacctccagcaccactgtgtgattcatgatgcatggtctggcctacggcacgttgttcagctgcgtgcccaggaagaattcgggcagggcgagtggagcgagtggagtcctgaagctatgggcaccccctggaccgagagtcgctctccgcccgctgaaaatgaggttagtaccccgatgcaggccttaactacaaataaagacgacgataatatcttgttcagagattctgcaaacgcaaccagcctgcccgttcaagattcatcctcagtgcctctccctacatttctggtcgctggcggaagtttggctttcgggaccttactgtgtatcgcgattgtgttacgatttaaaaagacatggaaattgcgggcactgaaagagggaaagacgtcgatgcacccaccttacagtttaggacagctggtcccggaaagacccaggcccactccggtcctcgtgccgctgataagcccaccagtgtccccgtcttcgttaggttctgataacacctccagtcataaccgccctgatgctagggatccgaggagcccatatgacatctccaataccgattatttttttccacggtag

SEQ ID NO: 121065 - DNA, 2757 bp, synthetic construct
  misc_feature 1..2757: note = Description of Artificial Sequence: Synthetic coding sequence
  source 1..2757: mol_type = other DNA
atgttgacccttcagacctggctggttcaagccctctttatatttctgacaacagaatctactggggagttgctcgacccctgtggatacattagtcctgagtctccagttgtgcaactgcacagtaatttcaccgctgtgtgtgtcttgaaggaaaaatgcatggactatttccatgtgaatgccaactacattgtctggaaaactaaccatttcaccatccccaaagagcagtacaccatcatcaatcggacagccagttctgtgactttcacggatattgcgagtttaaatatccagctgacatgcaatatcctgaccttcgggcagctggaacagaacgtgtacgggattactatcatatccggtttaccccccgagaaacccaagaatctgagttgtatcgttaacgagggaaagaaaatgagatgtgagtgggatgggggccgcgaaacgcaccttgaaaccaattttacgctaaagagcgagtgggctacccacaaattcgctgactgtaaagctaaacgggatacccctacctcttgtacagttgattacagtaccgtgtattttgtcaatatagaggtgtgggttgaagcagagaatgccctcgggaaagtaaccagcgatcatattaattttgaccccgtctacaaggtgaagcccaatccaccccataatctgagcgtgatcaacagcgaagagctgtcgtccatcctgaaattgacatggactaatcccagcatcaagtcagtgatcatcctgaagtacaatattcagtatcggactaaggacgcttcaacctggagtcagattcctcctgaagacactgcctctacgaggtcctcgttcacagtccaggacctgaaaccctttacagaatatgttttcaggatacgctgcatgaaagaggacggtaagggctattggagcgactggtctgaagaggcatccggtatcacttatgaggaccgtccttccaaggctccgagtttttggtataaaatcgatccctcccacactcagggctatcggactgttcaactggtttggaaaacactacctcccttcgaggccaacgggaaaatactggactatgaggttacgttaacccgatggaagtcacacctgcaaaactacactgtaaacgcgaccaagttgaccgtgaatctgacaaacgaccgttatctcgccaccctcactgtgcgaaacctcgtgggcaaatccgacgcagcagtcctgacaatccctgcttgcgatttccaggccacacaccctgtgatggacctaaaggcgttccccaaggacaatatgttatgggttgaatggacaacccctcgagagagtgtgaaaaagtacatcttggagtggtgcgtgctcagcgataaggccccctgcattacagattggcaacaggaggacggtactgttcatcgtacatatcttcggggaaacttagcagagagtaagtgctacttaattacagtgacacccgtgtatgccgatgggccagggagccccgagagtatcaaagcttatctaaaacaagctccaccatcaaaaggcccaaccgtgaggacgaagaaggtcggcaagaatgaggctgtgctggaatgggaccagctgccagtcgatgtgcaaaacggcttcataagaaactataccattttttacaggacaatcatcgggaacgagactgccgtcaacgtcgattccagccataccgagtacacgctatcctcgctgaccagcgacacgctctacatggtgagaatggccgcctatacagatgagggcggtaaggatgggcccgagttcacattcaccacacccaaatttgcacagggcgaaattgaagcaatcgtggtgccggtgtgtctggctttccttctgacgaccttattgggcgtcctcttttgcttcaacaaacgggaccttatcaagaagcacatctggccaaacgtccctgacccctctaagtctcacattgcccagtggtcaccccatacaccaccacggcataacttcaatagtaaagatcagatgtactccgatgggaattttaccgatgtgtctgtggtggaaatcgaggcgaatgacaagaagccctttcctgaagatctgaagagtctggatttatttaagaaagagaaaatcaatacagaaggccactcgtctggaatcgggggctctagctgtatgagttctagccggccttcaattagctctagcgatgaaaacgagtcatctcaaaacactagcagcactgtgcagtactcaacagtggtgcacagcgggtatcgccaccaagtcccttccgtgcaggtgtttagtcgttcagagtctacccagcccctgcttgacagcgaggagagaccagaggatctgcaactggtggatcacgtggacggcggcgacggaattctcccccgccagcagtatttcaaacagaattgctcccaacacgaatctagcccagatatttcacatttcgaacgttccaaacaagtgtcttcggtgaatgaggaagattttgtgcggcttaaacagcagatttccgatcatatttctcagagctgtggctctggacagatgaagatgttccaggaggtgtcagccgccgacgcattcggccctggtactgagggccaggtcgagcgttttgagacagtaggcatggaagctgcaactgacgaggggatgccgaagtcttacctgccacagacagtgcgccaaggaggctacatgccccagtag

SEQ ID NO: 121066 - DNA, 990 bp, synthetic construct
  misc_feature 1..990: note = Description of Artificial Sequence: Synthetic coding sequence
  source 1..990: mol_type = other DNA
atgctgactctccagacctggctggtgcaggcactctttatcttccttacaaccgagagcactggtgaactacttgatccctgcggttatattagcccagaaagcccggtggtacagttgcatagcaactttaccgcggtctgcgtccttaaggaaaagtgcatggattactttcacgttaacgcaaactatatcgtctggaaaaccaatcactttaccattccgaaagaacagtacacaataataaaccgcactgcctccagcgtgacgtttacggatattgcctccctcaatattcagctgacctgtaatatcctcacgttcggacagttagagcagaacgtgtatgggattacgattattagcggtctgccaccagagaaacctaagaacctgtcctgtatagttaatgaggggaagaaaatgaggtgtgaatgggatggcggtcgggaaactcatcttgaaactaattttaccttgaagtccgagtgggctacccacaaattcgccgactgtaaggcaaagagagacacacccacgtcctgtaccgtagactatagcactgtctatttcgttaacattgaggtttgggtcgaggcggagaatgcgcttgggaaagtgacctccgatcacatcaactttgatcctgtatacaaagtcaaacctaatccacctcataatcttagcgtaattaacagcgaagagcttagttcaattcttaaactcacttggactaatccaagtattaagagcgtgatcatccttaagtacaacattcagtaccgcactaaagatgcttccacctggagtcagattcctccggaggacaccgccagtacacgatctagcttcactgttcaggaccttaagcctttcacagaatacgttttccgaattcgctgtatgaaggaggacgggaaggggtattggtcagattggtccgaggaagcctcaggaattacctatgaggataacatcgcctccttttag

SEQ ID NO: 121067 - DNA, 2574 bp, synthetic construct
  misc_feature 1..2574: note = Description of Artificial Sequence: Synthetic coding sequence
  source 1..2574: mol_type = other DNA
atgctaaccctccagacatggttggttcaggctctatttatttttctaactactgagagcactggggagctgctggatccctgcggttacattagccccgaatctccagtggtgcaactacatagcaatttcaccgcagtttgtgtcctcaaagaaaagtgcatggactacttccatgtaaatgccaactacatcgtgtggaaaactaaccattttaccatccctaaggagcaatacactataataaaccggactgcttcctctgtcacctttactgacattgcaagcttgaacatacaactgacctgtaacatcctgacattcggccagctcgagcagaacgtgtatgggattacaataataagcggacttccccctgagaaacctaagaacctctcctgcattgtaaatgaaggcaagaaaatgcgctgcgagtgggacggtggcagggagacccacctggaaactaactttaccttgaaaagcgagtgggctactcacaagtttgctgactgcaaagcaaagcgcgacactcctacctcttgcacagtcgattactcaaccgtgtacttcgttaacattgaggtgtgggtggaggccgagaacgccctggggaaagtgacatctgaccatatcaacttcgaccccgtctacaaggtgaaacccaatcctccacacaatttaagcgtgatcaactccgaagaactgtcctccatcttgaaactgacatggaccaacccaagcatcaagtctgttattatacttaaatacaacatccaatataggaccaaggatgcctccacctggagtcagatcccccctgaggatacagccagcacacgctctagctttacggttcaagatctcaaaccattcacggaatacgtttttcgtatccggtgtatgaaggaagatgggaagggttactggtccgactggtcagaggaagcgagcggcatcacctatgaggacagaccctcaaaagctccttccttttggtataaaatcgatccttcacatacgcagggttataggaccgtccagctagtttggaagactctgccaccattcgaggctaatgggaaaattttggattacgaggtgaccttgacccggtggaagtcccatctgcaaaactacaccgtcaacgctactaagctgactgtgaatttaaccaacgaccgttaccttgcgaccctgacagtccgaaacctggtagggaaatccgacgctgctgttctaacgatccccgcttgtgacttccagggaaacctggccgagtccaagtgctatcttattactgtcacaccagtgtatgctgatgggcctggctcccctgaatctattaaagcctatctgaagcaagcacctccctccaagggtcccaccgttcgcacgaagaaagtcggcaagaatgaagctgttcttgagtgggaccagctgcccgtagacgtacaaaacgggtttatccgcaactataccattttctatagaaccatcattggaaacgagaccgctgtcaatgtggatagctctcacactgagtataccctgtcctcactaacaagtgataccctctacatggtacggatggcagcctacaccgatgagggcggaaaggatgggccagagttcacatttacaacaccaaagtttgctcagggcgaaattgaggcgatcgtggttccagtttgcctcgccttcctcctcacaacgttactgggggtgttgttctgctttaacaaaagagatctgattaagaagcacatctggccaaatgtcccagatccttccaaatcccacattgctcagtggtctccacacacccccccccgccacaactttaactcaaaggaccaaatgtactccgatgggaatttcaccgacgtttctgttgtggaaattgaagccaacgacaagaagcccttccccgaggacctcaaatctctggatctgtttaaaaaagagaaaattaacacggaagggcactcttcaggaatcggtggatctagttgcatgagcagttcccgtcctagtatcagcagcagcgatgagaacgagtcctctcaaaacacgagtagtactgtgcagtacagtacagtagtacattcagggtatcggcaccaggtccctagcgtgcaggtgtttagccgttctgagtctactcagcctttgcttgatagtgaggagcgtcctgaagatcttcagctcgtggatcatgtggacgggggcgacggcatactgcctagacagcaatactttaagcagaattgctcccagcacgagagctctcctgacatttcacattttgagcgatctaagcaggtcagtagcgtgaacgaagaggacttcgtacgtctcaaacagcaaatttctgatcacatttcacagtcttgtggatcaggacagatgaagatgtttcaggaagtgtcagctgcagacgcgtttggaccgggaactgaaggacaggtggagcgtttcgagactgttgggatggaagctgcaaccgacgaaggaatgccaaagagctatctgccacagaccgttcggcaaggcggctacatgccacagtag

SEQ ID NO: 121068 - DNA, 2757 bp, synthetic construct
  misc_feature 1..2757: note = Description of Artificial Sequence: Synthetic coding sequence
  source 1..2757: mol_type = other DNA
atgctgaccctacagacctggctggtccaagccttgttcatttttctcacaactgaatctactggcgagcttcttgatccttgtgggtacatcagtccagagtccccggtcgtccagctgcattccaatttcaccgctgtctgcgtcctcaaagagaaatgcatggattactttcacgtaaatgctaactatatcgtgtggaagactaaccatttcaccatcccaaaagagcaatatacaatcataaatcgtactgccagctctgtaacttttactgacattgccagcctcaacattcagctgacctgtaacattttaacgtttggacagttagaacagaatgtgtatgggattaccatcatttcaggactaccaccagagaaacccaagaatctctcgtgtattgtcaacgagggcaagaagatgaggtgcgagtgggacggaggtcgtgaaacccatctggaaactaattttacactcaagtccgagtgggccacacacaagtttgccgactgtaaggccaagagggatacgcccacttcctgtacggttgattactccacagtgtatttcgtgaacatcgaggtttgggtcgaggccgagaacgcactgggcaaagtgaccagcgatcatataaatttcgaccctgtgtataaggtgaaacccaatccaccgcacaatctgagtgtcatcaacagcgaagaactgtcttctattctcaagctaacgtggacgaatccgtcgattaagtctgtcattatcttgaagtataatattcagtaccgtactaaggacgcctctacgtggagtcagattccaccggaagatactgcatcaaccaggagttcattcactgtgcaggacctgaagccctttaccgagtatgtctttagaatcaggtgtatgaaggaagatggaaagggttactggtcagactggtcggaagaggcatccggaatcacttatgaggacagaccttctaaggctcccagcttctggtataagatcgaccctagtcacacccaggggtatcggactgtccagctcgtctggaaaactttgcccccatttgaagcaaatggcaaaatccttgactacgaagtcaccctgactcggtggaaatctcacttacagaattatactgtgaacgctacgaaacttaccgtgaatcttaccaacgaccgctatctggccactctgacagtacgaaatctcgtcggtaaaagcgacgccgccgtgctgactattcccgcatgcgattttcaggctacgcaccccgtcatggacctcaaggccttcccgaaagataatatgctctgggtcgaatggacaacaccccgggagagcgtaaaaaagtatatcctggagtggtgcgtgctgagcgacaaagctccctgcattacagattggcagcaagaggacggtaccgtgcatcgcacatatctgcgaggcaatcttgccgagtcgaagtgctatctgattacagtcactcctgtttatgccgatggaccaggatctccagagtccatcaaggcatacctgaagcaggccccgccatccaaggggccaaccgtgagaaccaagaaggtcgggaagaacgaggccgtgttagaatgggatcagttgccagtagatgtgcaaaacggcttcattaggaattataccatattttaccgcactatcataggtaacgagactgctgtgaacgtggactcgtcacacacagagtataccctttccagcctgaccagcgacaccctgtacatggtgaggatggccgcatataccgacgagggcggcaaggatggcccagagttcacctttacaacccccaagtttgcccaaggagaaatcgaagctattgtggttccagtttgtttggcctttttgctgaccacactgctgggagtgctgttctgtttcaacaaaagggacttgataaagaagcacatctggcccaacgtccctgatccgtctaaatctcacattgcccaatggagcccccataccccacctagacataactttaactctaaggaccagatgtatagcgatggtaatttcacagatgtgtcggtggtcgagatcgaggctaatgataagaagcctttccctgaggacttgaagagcctggacctattcaagaaagaaaagattaatactgagggccattcttccggcatcgggggcagcagttgcatgtcctccagtcgtccgagcatttcatcctccgacgagaacgaaagctcccaaaatacgagctccaccgttcagtatagcaccgttgtccattccggctatcgccaccaggttccctccgtgcaggtctttagtcgaagtgaatccacacagccacttctggatagtgaggagcggcccgaggaccttcaacttgttgaccacgtggatggaggagatggtatactacctcgtcagcagtacttcaagcagaattgttcccagcacgaatccagcccggacatttcccattttgagagatcaaaacaggtgtctagtgtcaacgaagaggattttgtgcgccttaagcagcagatctctgatcacatctcccaatcttgtgggtcaggccagatgaaaatgttccaagaggtgtcggccgccgacgcttttggacccggaacggagggacaggtggagcgctttgagaccgtgggcatggaggctgcaaccgacgaaggcatgcccaaatcatacctgccacaaactgtgcgccaaggagggtatatgcctcagtag

SEQ ID NO: 121069 - DNA, 990 bp, synthetic construct
  misc_feature 1..990: note = Description of Artificial Sequence: Synthetic coding sequence
  source 1..990: mol_type = other DNA
atgttaacactgcagacctggctggttcaggccctattcatattcctgaccacggaaagcaccggagaactcctggacccatgtggatatatttcacctgaatccccggtggtccagttgcatagtaattttaccgccgtctgcgtattgaaggaaaaatgcatggattatttccatgtaaatgctaactacattgtttggaaaacaaatcacttcacgatcccaaaagaacaatacactataattaatcggaccgcatcatccgtgactttcaccgatattgcctccctgaatattcaattgacctgtaacattctgaccttcggccagttggaacagaacgtgtacgggattacgattatttcagggctgcctcccgagaaacctaagaatctgtcttgtatcgtaaacgagggcaagaaaatgcggtgcgagtgggatggtggccgggagactcatctcgagacaaattttaccctgaagagcgagtgggcaacccacaagttcgctgattgtaaagcaaaacgggacacacccacctcatgtacagtggactatagtactgtctatttcgttaatattgaggtatgggtggaagcagagaacgcacttgggaaggtgacatcggaccatattaatttcgatcctgtgtacaaggtgaagcctaatccacctcataacttatctgtgatcaattccgaggagctttcatctattctcaagctgacctggaccaacccaagtattaaaagtgtgatcatacttaagtacaacatccagtacagaaccaaggacgcttctacctggtctcagattcctccagaagacacagctagtaccaggagcagcttcacagttcaggatctcaaaccatttacagaatacgtctttagaatccgctgcatgaaggaggatgggaagggatattggagtgattggtccgaggaagcatctggcatcacctacgaggacaatatcgcctccttttag

SEQ ID NO: 121070 - DNA, 990 bp, synthetic construct
  misc_feature 1..990: note = Description of Artificial Sequence: Synthetic coding sequence
  source 1..990: mol_type = other DNA
atgctgactctgcaaacctggcttgtgcaagccctgttcatattcctaactactgagtcgacaggggagttactcgacccttgcggctacattagccctgaatcccctgtggtgcagcttcactctaatttcaccgctgtctgcgtattgaaggagaaatgcatggattattttcacgtgaacgctaactatattgtgtggaagactaaccactttaccattccgaaagagcagtatacgataataaaccggacagcaagttctgtcaccttcaccgatattgcaagcctcaacattcagctcacctgtaacatccttaccttcggccaactggaacagaatgtgtatggaatcacaataataagcggactgccgccagaaaaaccaaagaatctctcgtgtatcgtcaatgagggaaaaaagatgaggtgcgagtgggatggcggacgcgaaacccacttggaaacaaatttcacccttaagagcgagtgggccacacacaagttcgctgattgtaaagccaaaagagacacaccgacaagctgtactgtcgactactctaccgtctactttgtgaatatcgaggtctgggtcgaggccgagaatgcactggggaaggtgaccagcgaccacataaactttgacccagtgtacaaggtgaagccgaacccaccccataatctctccgtcatcaactcagaggagcttagtagcatactgaagctgacatggaccaaccctagcatcaaatcagttatcatcttgaagtataatatccaatacagaaccaaggacgcatccacttggtcacagatccctcccgaggataccgcaagcaccaggtcatcctttaccgtgcaggacctcaaacctttcacagaatatgtcttcagaataaggtgtatgaaggaggatgggaaagggtattggtccgactggtctgaagaagcgtctggaataacgtatgaagacaatattgcttctttctag

SEQ ID NO: 121071 - DNA, 990 bp, synthetic construct
  misc_feature 1..990: note = Description of Artificial Sequence: Synthetic coding sequence
  source 1..990: mol_type = other DNA
atgctgacattgcagacctggctcgtccaggcactgtttatctttctcacgactgagagtacaggcgaactgctcgatccttgcggctatataagtcccgaaagtcctgttgtgcaattgcatagcaactttactgctgtatgcgtgctcaaggaaaaatgtatggactactttcacgtcaatgcgaactacattgtttggaagacaaatcactttaccatcccaaaggaacagtacacgattattaaccgcactgcttcctcagtcacatttacggatattgcctctttgaacattcagcttacttgcaatattctcactttcggacagctggaacagaatgtttacggaattactatcattagtggcctgccccctgaaaagcccaagaacttgtcgtgtatcgtaaacgaaggaaaaaaaatgagatgcgagtgggacggaggacgtgaaacccaccttgaaaccaattttactcttaaatccgagtgggccacccacaaattcgcagattgtaaggcaaagagagatacccctacaagttgcacagtagattactcgaccgtttatttcgttaacattgaagtttgggttgaggcagagaatgccctcggcaaggtgacatctgatcacattaacttcgatccagtttacaaagtcaaacctaaccctccacataatcttagcgtgatcaactctgaggagctgtcttccatcctgaagttgacttggactaatccttcgatcaagtccgtcattatcctgaagtataatatacaataccgcaccaaggacgcatccacatggtcacagatcccaccggaggacactgcgagcacgcggtcatcctttacggtccaggacctgaaaccctttaccgagtatgtgtttcgcattagatgtatgaaagaggacggaaaggggtactggtccgattggtcagaagaggcgtccgggattacatatgaggacacgatctttagtttctag

SEQ ID NO: 121072 - DNA, 1380 bp, synthetic construct
  misc_feature 1..1380: note = Description of Artificial Sequence: Synthetic coding sequence
  source 1..1380: mol_type = other DNA
atgactatcttgggaactaccttcggcatggttttttccctactgcaagtcgttagcggggaaagtggctatgcacagaatggtgatctggaagacgctgagttagacgattacagcttttcatgctatagccagttggaggtgaatggaagtcagcacagtttgacatgcgcattcgaggatcctgatgtcaacattactaatctggagtttgagatatgtggggctctggtggaggtcaaatgcttaaacttcaggaaactccaggaaatctattttatcgagaccaagaagtttcttcttatcggtaagtccaacatctgtgtcaaagtgggggaaaaatctttgacatgcaaaaagatcgatctgacgactattgtgaaacctgaagcacccttcgatctgtcagtggtgtaccgtgaaggagccaacgatttcgtggtcactttcaacaccagccatctgcagaagaaatatgtgaaagtgctgatgcacgacgttgcgtaccgacaggagaaggacgagaataaatggactcacgtcaatctgagcagtacaaagttaacccttcttcagcggaaactgcagccggccgccatgtatgagatcaaggtacgatcgatccctgatcactattttaagggattttggagcgagtggagcccatcatactattttaggacaccagaaattaacaattcatcaggagaaatggatcctatactcttaacaatatccattctgagttttttcagtgttgccctgcttgtgatattagcttgcgtgctgtggaagaagagaatcaaacctatagtttggccatcgctgcctgatcataagaaaacgttagagcatttgtgtaagaagcctcgaaagaaccttaatgtttcattcaatcccgaaagctttctggactgccagatccatagagttgacgacatccaggcgcgtgacgaagtggaaggcttcctgcaggacacgtttccccaacaactagaggagtcagagaagcagcggctcggaggagatgtgcagtcccccaactgccccagcgaggatgtggtgataacacccgaaagttttggtcgtgacagcagtctcacctgtctggctgggaatgtcagcgcctgtgatgccccaattctgtcttcctcacgtagtcttgactgtcgcgaaagtggtaagaatggaccccacgtgtatcaggaccttttgttgtcactgggcaccactaatagcacattacctccccctttcagtctacaatctggcatactgactctgaatcccgtggcacaaggtcagcctattttgacctctctgggtagcaatcaagaagaggcgtacgttactatgagcagcttttaccagaaccagtag

SEQ ID NO: 121073 - DNA, 789 bp, synthetic construct
  misc_feature 1..789: note = Description of Artificial Sequence: Synthetic coding sequence
  source 1..789: mol_type = other DNA
atgaccatcttgggcaccacattcggaatggtgtttagtctgttgcaagtagtcagtggagagagcggatatgcacagaatggagatttagaggacgctgaactcgatgattactctttttcctgctatagtcagcttgaggtgaatggctcccagcacagtctgacatgtgcctttgaggacccagatgttaatattaccaacctcgaatttgagatatgtggcgctctcgtcgaagtgaagtgtctaaatttccgtaaactccaagaaatctacttcatcgagaccaagaagtttctcctgatcggcaagtccaatatctgtgtgaaggtaggcgagaagtcacttacatgtaagaaaatcgacttgacaactattgtgaaacctgaggctcccttcgacctcagcgtggtttatcgggagggtgctaacgacttcgtcgtgaccttcaacactagccatctgcagaagaaatacgtaaaggtgctaatgcatgacgtcgcctacaggcaagagaaagacgagaacaagtggactcacgtcaatctgagctccaccaagttaacactgctgcagcggaaacttcagcccgccgccatgtatgaaattaaagtgaggagcattcctgaccattactttaagggtttctggtcagaatggtctccatcttattacttccggactcccgaaatcaataacagttccggtctctctttgtcgtacggccctgtgtctccaatcattagaagactctggaacatctttgttcgaaaccaggaaaagatctag

SEQ ID NO: 121074 - DNA, 786 bp, synthetic construct
  misc_feature 1..786: note = Description of Artificial Sequence: Synthetic coding sequence
  source 1..786: mol_type = other DNA
atgaccatcttgggtaccaccttcggaatggtgtttagcctgctgcaagtggtttctggcgaaagcggttatgcccagaatggtgatctcgaagacgctgagctggacgactattcatttagctgctattcccagttggaagtgaacggatcgcagcatagcctgacctgtgccttcgaagatccagatgtgaatatcaccaatctggagttcgaaatctgtggcgcactagtggaagtgaaatgcttgaacttccggaagctccaggaaatttactttattgagactaaaaagtttctgctaatcgggaagtccaacatctgtgtcaaggtgggcgaaaaaagtttgacttgtaagaagatcgatctaaccacaatagttaaacctgaggctccgttcgatctgtcggtggtctatcgcgagggagcaaacgatttcgttgtcacattcaatacttcccacctacaaaaaaagtatgttaaggttcttatgcatgatgtggcctaccgacaggagaaagacgagaacaaatggacacatgtgaatctgagcagcactaaacttactctcctccagagaaagctgcagcctgctgcaatgtacgaaattaaagtaaggagtattcccgaccactactttaagggtttctggtccgagtggtcaccaagctactatttccgcacacctgagatcaataactctagcgggctgagcctttcgtacgggcccgtatccccaattattcggcgactgtggaatatcttcgtgagaaatcaggagaaatag

SEQ ID NO: 121075 - DNA, 180 bp, synthetic construct
  misc_feature 1..180: note = Description of Artificial Sequence: Synthetic coding sequence
  source 1..180: mol_type = other DNA
atgacaatcctggggaccacattcggtatggtctttagcctgctacaggtggtgagcggcgaatccggctacgcgcagaatggggacctggaagacgctgagttagatgattatagcttttcctgttactcacagttagaggtgaacgggagtcaacactccctgacctgtgccttctag

SEQ ID NO: 121076 - DNA, 159 bp, synthetic construct
  misc_feature 1..159: note = Description of Artificial Sequence: Synthetic coding sequence
  source 1..159: mol_type = other DNA
atgacaatcctgggaacaacgtttggcatggttttctcgttactgcaggtagtgtccggcgaatccggatacgctcagaatggagacctggaggacgcggaactcgacgactacagctttagttgttactcccagctagaggtcaatggctcacagtag

SEQ ID NO: 121077 - DNA, 1566 bp, synthetic construct
  misc_feature 1..1566: note = Description of Artificial Sequence: Synthetic coding sequence
  source 1..1566: mol_type = other DNA
atgggactcgggcgctgcatttgggaggggtggacccttgagtcggaggcgctaaggagggatatgggtacatggcttctggcctgtatctgtatttgtacatgtgtgtgcctcggagtttcagtcacgggcgagggacagggcccccggtcccggacattcacttgcctgacaaacaacattcttcgaattgattgccactggagcgcacccgagctgggacagggaagcagcccctggttacttttcactagcaaccaagcacccggtggaacacacaagtgtatcttgcggggctcagagtgcacagtagtacttccacccgaggccgtgctggttccttcagataatttcacgatcacatttcaccattgtatgagtggccgagagcaggtgagcttagtggaccccgaatacttgccccggcggcacgtcaaattggatcctccatccgatctccaatccaatatatcgtcaggtcattgcattctcacttggtcaatctctcctgccctcgagcctatgacaacacttttgagttacgaactagccttcaaaaagcaggaggaggcttgggaacaagcccaacacagagatcacatcgttggcgtgacgtggctgatactcgaggcatttgagttagatcctggcttcattcacgaagcacgtctgcgggttcagatggctaccctggaggacgacgtggtggaagaagaaagatatactgggcagtggtccgagtggtctcagccggtctgcttccaagccccccagcgccaggggcccctaatccctccctggggatggcctggaaacacactcgtggctgtctcaatctttctgttgcttactgggcctacatatctgctgttcaagctgagccctcgggtgaaacgcattttttaccagaatgtcccttccccagcaatgtttttccagcccctgtactccgtacacaatggcaacttccagacctggatgggcgcacatggcgctggcgttctgctctcacaggattgcgccgggacaccacagggggccctggagccctgcgtgcaggaagccacagcattactcacctgcggccctgcgcggccttggaagtcagtagccttggaagaggaacaggaaggcccgggcacacgccttcccgggaatctgtccagcgaggacgtcctgccagccgggtgtaccgagtggcgcgtgcagacactggcttatcttccacaggaggattgggcccctacatctctgactagaccagcaccccctgatagtgagggatcccgcagctcatcaagctcttcaagcagtaataataataattactgtgccttgggttgctatggggggtggcacttgtccgccctgcctgggaacacccagtccagcggcccaataccagccctggcctgtgggttaagttgcgaccaccagggactcgaaacccaacagggggtggcctgggtcctcgcaggacattgccaaaggcctggcctccatgaggacctgcaagggatgctcttaccatcagtactgagcaaggctcgatcatggaccttctag

SEQ ID NO: 121078 - DNA, 1029 bp, synthetic construct
  misc_feature 1..1029: note = Description of Artificial Sequence: Synthetic coding sequence
  source 1..1029: mol_type = other DNA
atgccccagacatgcgacgggaccgggcagatgcacctgggcagtaactgttgcaaaaacggtcagacgctgctgcaacggacctgccatggagtttcatgttgcggatggtggttccaagctgctcgctcgatacttggcaaaggtccatcagcccaatcactcgccggttggaccttggagagcgaagccctgagacgggatatgggcacctggctgctggcctgcatctgcatatgcacatgcgtatgcctgggcgtgtccgttacaggggagggacagggtccgcgaagccggaccttcacatgtcttaccaataacattctccggatcgattgccattggagtgcgcccgaattgggccaggggagcagcccttggctgctgttcacgcgacttctggccgcacacattagcgccagttgtggagctgtctcagccccctcgtgctgccatcttcggcaatgttcctgccacctcacgattagcccctcactgtccacgacagcgtgcctcgggggctctaggtctgcgtggtggacaaggagcacatgcccgggagatacgagcaacatttctagcggccactgtattctgacttggagtattagccctgctctggaaccgatgaccactctcctgagttatgagctagccttcaagaagcaggaagaggcatgggagcaggcccagcacagggatcacatagttggtgtgacttggctgattctcgaggccttcgaactggatcctggcttcatccacgaagctaggcttcgggtgcaaatggccaccctagaggatgatgtcgtcgaggaagaaagatacaccgggcaatggagcgagtggtctcagcccgtgtgctttcaggccccacagcgtcagggaccattaattcctccctggggctggcctggcaacacactggtggccgtgtcaatctttcttcttttgacaggtcccacttatttattatttaagctgtcccctcgacttggctggggtcctacaggacccgtgtgctgctag

SEQ ID NO: 121079 - DNA, 1503 bp, synthetic construct
  misc_feature 1..1503: note = Description of Artificial Sequence: Synthetic coding sequence
  source 1..1503: mol_type = other DNA
atgggcacttggctgctggcctgtatctgtatatgtacatgcgtttgtctgggcgtgagtgtaaccggagagggccagggcccacggtcccgcacattcacatgtctcaccaataacatcttgagaatcgactgtcactggtccgctcccgagctggggcagggttcttctccatggctgctgttcacttcaaaccaagctcccggtgggacacataaatgcatcctgcgcggatctgagtgcacagtggtgctgcctccagaggccgttctcgtgccttctgataacttcaccatcacttttcatcactgtatgtccgggcgagaacaggtctctctcgtggatcccgaatatctaccccggaggcacgtgaagcttgaccccccctctgacttacagtcgaacattagcagcggacactgcatcctgacctggtctatctcccctgccctcgagccgatgacaacccttcttagttatgagctagcctttaaaaaacaggaggaagcatgggaacaagcacagcaccgagatcacattgtgggtgtaacctggctgattttagaggcttttgagcttgacccggggtttatccacgaggcccgattgagggtacagatggcaaccctggaagatgatgttgtagaggaggagaggtacactggtcaatggagcgaatggagccaaccagtctgttttcaagccccccaaaggcagggacccttaattcctccttgggggtggccaggcaatacgttggttgccgttagcatctttctgctcctgacaggccccacttacctgctctttaaactctcaccccgcgtgaaaaggatattctatcagaacgtgccatctcctgcgatgtttttccagccactctactcagtgcacaacggaaacttccaaacatggatgggcgcacacggagccggcgtgctgctaagtcaagattgcgcaggtactccacagggtgctctggagccatgtgtgcaggaggccactgctctgctcacctgtggaccagctagaccatggaagtcagtggctctcgaagaggaacaggaaggacccggcactcggctcccaggtaacctcagcagcgaggacgtgttacccgcaggctgtactgagtggagggtacagaccctcgcgtatctgcctcaagaggactgggcaccgacaagtttaacacgccccgcaccccccgactctgaggggagccggtcttcctcgtcttctagctctagcaataacaacaactattgcgccttggggtgctatggaggatggcaccttagtgcattgcctggcaatacacagtccagtggtcccatacccgccttagcttgcggattatcttgcgatcatcagggacttgaaacacagcagggtgtggcctgggtcttggccggccattgtcaacgccccggtctgcacgaggacttgcaaggcatgctactccctagcgtgctgtccaaggcaagatcttggacattctag

SEQ ID NO: 121080 - DNA, 990 bp, synthetic construct
  misc_feature 1..990: note = Description of Artificial Sequence: Synthetic coding sequence
  source 1..990: mol_type = other DNA
atgggcacctggttacttgcctgcatatgtatatgcacttgtgtctgcctgggtgtgtcagtgaccggcgaagggcagggtcctcgaagcagaacctttacatgcctgacaaataacattctccgcatcgactgtcactggtcggcccccgagcttgggcagggttcttccccctggttactctttacttcgaatcaggcacctggcggcactcacaagtgtattctgcgaggcagtgagtgcaccgtcgttctacctccagaggccgtgctcgtgccctccgataattttactattaccttccaccactgtatgagcggaagggaacaggtgtccctcgtggaccctgaatatctccccaggagacatgtcaagctcgacccaccttccgacctgcagagtaatatcagtagtggccactgtattcttacctggtctattagcccagccctggaacctatgacaactttgctttcatacgaattagcttttaagaagcaggaggaagcatgggaacaggcccagcacagagatcacatagttggggtgacatggctgatcctcgaagctttcgagttggatcctggctttatccatgaggcaaggctccgcgtacagatggctactctggaggacgatgtggtggaagaagaaagatatactggccagtggtccgaatggtctcagccagtgtgctttcaggcccctcaacgtcagggacctctgatacccccttggggatggcctggcaacactttagtggctgtctcaatttttctcctcctgacaggcccaacatacctactattcaagctgtcaccacgtgtcaagcgcattttttaccagaatgtgccctcccccgccatgtttttccagccgttgtatagcgttcataatggcaacttccaagtgtgtgcggaaaccacagagggccacggagggcagggcctgccccgggcgctcgcttgtcctcgttgttggctgtcctag

SEQ ID NO: 121081 - DNA, 999 bp, synthetic construct
  misc_feature 1..999: note = Description of Artificial Sequence: Synthetic coding sequence
  source 1..999: mol_type = other DNA
atgcaccttggttctaattgctgtaagaatggccagactctcctgcaacgcacatgtcacggggtatcatgctgcggctggtggtttcaagctgcgaggtctattttgggcaagggaccgagtgcacagtctcttgccggttggaccctggaatccgaagcacttagaagggatatggggacatggttgctcgcttgtatttgcatctgtacttgcgtgtgccttggagtctcagttaccggagaaggacagggccctcggtcccgtacattcacttgtctgactaataatattcttagaattgactgtcattggtcagcaccagaactgggccaaggctcaagcccgtggctgctgtttacaagattactggccgctcacataagtgcctcttgtggagcagtttccgccccttcgtgttgccatctgcggcaatgttcatgccatcttaccattagcccatctttatccacaaccgcctgtctgggagggagtcgttcagcttggtggacaaggtcaacatgtcctggagacacctccaatattagctcaggccactgtatcctaacctggagcataagtccagctttagaacctatgactactctgctgtcttatgagcttgcatttaaaaagcaagaggaggcatgggaacaggcacaacacagagaccatatagtcggcgtcacatggcttattctggaggccttcgagctcgatcctgggtttatacatgaggctcggttgcgggttcaaatggcaactctggaagatgatgttgttgaggaagagcgatacaccgggcaatggtctgaatggagccagcctgtatgcttccaagctccgcaacggcaggggcctctgattccaccttggggatggcccggcaacacactggtggccgtttctatttttcttctcctgactggacctacttacctgttgtttaagctgtcccctcgattgggctggggtcccacaggccccgtgtgctgttag

SEQ ID NO: 121082 - DNA, 1878 bp, synthetic construct
  misc_feature 1..1878: note = Description of Artificial Sequence: Synthetic coding sequence
  source 1..1878: mol_type = other DNA
atggcatgctacatctatcagctgccttcgtgggtgctggacgacctctgcagaaacatggatgccctgagcgagtgggattggatggagttcgcgtcctacgtgatcacagacctgactcaactaaggaaaattaagtctatggaacgcgtgcaaggggtctcaataacccgcgagttactctggtggtggggcatgaggcaggcaaccgtgcagcagttagtagatttgctgtgccggcttgaactctatcgcgccgctcagattatcctgaactggaaacctgcccccgaaattcggtgtccaattcctgcatttcccgactcggtgaagcctgagaaaccgcttgctgcttccgtccgcaaggcagaggacgagcaagaagagggccagcctgtgagaatggctacttttcccggacctggctcaagtcccgccagagctcaccagccagcttttttgcagcctcccgaggaagacgcaccgcattctctacgttcggacctgccgaccagttcagactcaaaagatttcagcaccagtattcccaagcaagagaaactcctttctcttgcaggggatagcttattttggagtgaggctgatgtcgttcaggccaccgatgatttcaaccaaaatcgaaaaatctcccaaggcacttttgctgatgtatatcgggggcacagacatgggaagcccttcgtgtttaagaagctacgggagacagcctgttccagtccaggttccatcgaacggtttttccaagcagaattgcagatctgcctgcggtgttgtcatccaaatgtcttacctgtgttgggcttctgtgctgcccggcagttccactcgtttatctatccctacatggctaacgggagtctgcaggatagacttcagggtcaggggggaagcgatcccctgccctggccccagagggtctccatctgtagcggactcctgtgcgccgttgaatacctgcacggtctcgagatcatccacagcaacgtgaaatcatcaaacgtgctgctggaccaaaatctgacccccaagctggcacacccgatggcccacttatgcccagttaacaagcgcagcaagtatacgatgatgaaaacccatcttctccgaacatctgctgcatacctgcccgaggacttcattagagtaggtcaacttaccaagcgtgtggatattttctcctgcggtattgtcctggctgaggttctgactgggattcccgccatggacaataacagaagtcctgtctacctgaaggatctgctgctgtctgacatcccctcttcaaccgcaagtctttgttcaaggaaaaccggcgtggagaacgtgatggctaaagaaatctgtcagaagtacctcgaaaaaggagccggccgcctacccgaagattgtgctgaggctctggcaacagctgcttgtctctgtctgaggcgacgaaatacgtctctacaagaggtctgtgggtctgttgctgccgtggaggagaggcttaggggtagagaaaccctgctcccatggagcgggctgtccgagggcacgggcagttcctctaacacgccagaagagactgacgacgttgataacagctcgcttgatgccagcagcagcatgtcggtcgccccatgggcaggggcagctacaccattattaccgaccgagaacggtgaagggcgtttaagagtgatcgtcggtcgggaggccgacagcagtagtgaagcatgtgttggcctcgagccacctcaggacgttacagagacctcttggcagatcgagatcaacgaagcgaaaaggaaactgatggaaaatatactattgtacaaggaggaaaaggttgactcaatcgagctgttcggtccatag

SEQ ID NO: 121083 - DNA, 1791 bp, synthetic construct
  misc_feature 1..1791: note = Description of Artificial Sequence: Synthetic coding sequence
  source 1..1791: mol_type = other DNA
atggccggaaactgtggcgccagaggtgcccttagcgcccacaccctcctgtttgatctgccccctgccctcttgggcgagttgtgcgcggttctggactcctgtgacggtgcactggggtggagagggctggcggagagactgtcaagtagctggcttgatgtgaggcatatcgagaagtacgtagatcaaggtaagtctggtacacgcgagctgttatggagttgggcacagaagaacaaaacaattggcgatctcctccaggtgttgcaagagatgggacaccgcagggccatccatctcatcaccaattacggcgctgtgttgtctcctagcgagaagtcttatcaggaggggggttttcccaatattctttttaaggagactgctaacgtcaccgtggacaatgtgctgattcccgaacataatgaaaagggcattctcctgaagtcctcgatctcttttcagaacatcatcgaggggactcgcaactttcataaagattttttgatcggcgaaggggagattttcgaggtatacagggttgagatccagaacctcacatacgctgttaaactgtttaagcaagaaaagaaaatgcaatgcaagaaacactggaagagattcctgagcgagttggaggttctgcttcttttccaccacccgaacatcctggagttagctgcgtattttaccgaaaccgaaaaattctgcctgatttacccgtatatgaggaacgggactttattcgaccgcctgcaatgtgtgggggacaccgccccacttccatggcacattcggattggcatcctgattggaatcagtaaagccatccattatctccacaatgttcagccgtgctcagttatatgtggcagcatctcaagtgcaaatatcctgctggatgaccagtttcagcccaaattgacagattttgccatggcacactttcgctcacaccttgaacatcagagctgcaccattaacatgaccagctcctcatcgaagcacctctggtacatgcctgaggaatatattcgccagggcaaactctcaattaaaacagatgtgtactctttcggcattgttatcatggaagtactgaccggctgccgggtcgtgctggacgatcccaagcacatccagctgagggacctgctccgagaattgatggagaaaagaggcttggacagttgtctgtcttttctcgacaagaaggtgccaccatgtccacgtaatttcagcgcgaaattgttctgcctggccggtcggtgtgccgcgacccgggctaagctgcgcccgagcatggatgaagttctcaacactctcgaatccacgcaagctagcttgtactttgccgaggacccccccacaagcttgaagtcattccgttgcccatccccactgttcctcgagaatgtacctagtatacctgttgaagatgacgaatcacagaacaataacctcctccccagcgacgaggggctgcgcattgaccggatgacacaaaagactcctttcgaatgcagccagagtgaagtaatgttcctatcgctggataagaagcccgaaagtaagcgcaatgaagaggcctgcaacatgccatcctcatcctgtgaagagagttggttcccaaagtatatcgtgccgagtcaggaccttaggccatataaggtgaacatagaccccagttccgaagcccccggccactcttgtcggagtcgtccagtagagtcgtcttgcagcagtaagttcagctgggatgaatatgaacaatataaaaaggagtag

SEQ ID NO: 121084 - DNA, 1608 bp, synthetic construct
  misc_feature 1..1608: note = Description of Artificial Sequence: Synthetic coding sequence
  source 1..1608: mol_type = other DNA
atggcaggcaattgcggggcccgtggcgccctttcggctcacactctgttattcgacttacccccggctctgctcggggagctgtgtgcagtcttggactcctgcgacggggccttaggctggaggggccttggagctgttctgagtcccagcgagaaatcatatcaggagggtgggttccccaacatactgtttaaggaaacagccaacgtgacggtagacaatgtgctcattccagagcacaacgagaagggcatcctcctaaagagctctattagtttccaaaacatcattgagggaacaagaaatttccataaggattttttgattggcgaaggggagatcttcgaggtctaccgtgtcgagattcaaaatctgacctacgcagtcaaactattcaaacaggaaaagaagatgcaatgcaaaaaacactggaagcggtttctatcagaactggaagtattactgctgtttcatcatcctaacattttggagctggctgcatactttaccgaaacagagaagttttgcttgatatacccatacatgaggaatggcactctcttcgaccgccttcaatgtgtaggagatactgccccactcccatggcacattcggattggcattcttattggaatttcaaaggctatacactatttacataatgtccagccatgtagcgttatctgcggaagtatcagtagtgcaaatattctcctagacgaccaatttcagcctaagctgacagattttgcaatggcacattttcggtcccacctagagcatcagtcatgcacaatcaacatgacctcctcgagctcaaaacacctctggtatatgcctgaggaatatatccgccagggtaagctgtcaattaagacagatgtctactcatttgggatagttatcatggaagttctgacaggctgtagggtggtactagatgaccccaagcacattcaactgcgcgaccttcttagagagctaatggagaagaggggcctagacagttgtctttcattcctcgataaaaaagtgcccccgtgcccccgcaacttttcagcaaagcttttctgtctcgccggcaggtgtgccgccactcgagccaaattaaggccctccatggacgaagtgttaaacaccttggagagtacccaagcctctttgtatttcgccgaagatccccccacctcactgaaaagcttcagatgtccttctccactttttctcgaaaatgtgccaagtatccctgtcgaggatgacgaatctcagaacaataacctcctaccttctgacgagggactacggatagacagaatgacgcagaaaactcctttcgagtgctctcaatcggaagttatgttcctgtcattagacaagaagcccgagagcaagagaaacgaggaggcatgcaacatgcccagctctagttgtgaggagtcctggtttcctaagtacattgttccatcccaggacctacgaccctacaaggtcaatatcgatccgtcaagcgaagctcctggccatagttgcaggtcccggcccgtagagtcttcttgcagttctaagttctcctgggatgagtacgaacaatacaaaaaagagtag

SEQ ID NO: 121085 - DNA, 657 bp, synthetic construct
  misc_feature 1..657: note = Description of Artificial Sequence: Synthetic coding sequence
  source 1..657: mol_type = other DNA
atgaacaagccgataactccttccacctacgtgaggtgcctcaacgtcgggctcattcgcaagctgtcagatttcattgacccacaggaaggctggaagaagctcgccgttgcaatcaaaaagccctccggtgacgaccggtacaatcagttccacatccgacggtttgaagccctgctacagactggcaagtcccccacctccgaacttttgtttgactggggcacaactaattgtactgtgggagacctggtagacctgttgatccagaacgaattctttgcacccgccagcctccttctgcctgacgcagttcctaagaccgccaacactctgccctcaaaagaagcaattacagtgcagcagaagcagatgcccttctgcgacaaggatcggactctcatgacacccgtccagaatctggagcagtcgtacatgccccccgattcatcatcccctgagaataaaagcctcgaagtatccgatacccgattccatagcttttctttctacgagctcaagaacgtgactaacaatttcgacgagcgacctatttccgtggggggcaataaaatgggcgaaggcggcttcggcgtcgtgtataagggatacgtcaacaataactgtgggtccgaggaggcctgttccaacgggtag

SEQ ID NO: 121086 - DNA, 1011 bp, synthetic construct
  misc_feature 1..1011: note = Description of Artificial Sequence: Synthetic coding sequence
  source 1..1011: mol_type = other DNA
atgccgttctgcgacaaggatagaaccctaatgacgcctgtgcaaaatcttgaacaatcctacatgccccccgatagcagcagccccgaaaacaagagtctagaagtctctgatactcggttccattccttctctttttatgagctgaagaatgtcactaacaattttgatgaaagacctatttcagtcggcgggaataagatgggcgaaggaggttttggggtcgtctacaaaggctacgtgaataacaccaccgtggcagtcaagaagctagctgccatggtcgatatcactactgaggaacttaagcagcagtttgatcaggagatcaaagtcatggctaaatgccaacacgagaatcttgtggaactcctgggctttagtagcgatggcgacgatctgtgtcttgtttacgtgtatatgcccaacgggtcactcctggatcgcctgagctgcctagacgggaccccaccactgtcttggcacatgcgatgtaaaattgcgcagggcgcagctaatggaataaatttccttcatgaaaaccaccacattcatagggatattaagtctgccaacattctgcttgatgaagccttcacagccaaaatcagcgactttgggctcgcccgggcctcagaaaagtttgcccaaacagtgatgacctctcgcatcgttggaaccacagcttacatggccccagaagcacttcgcggagaaattacgccgaagtcagatatttactcctttggtgttgtgctcctggaaattataactggactgcctgcggttgacgaacaccgggagccccagctactgctcgacattaaagaggaaatcgaagatgaagaaaaaactattgaagactatatagacaaaaaaatgaacgacgctgattccacaagcgttgaagcaatgtactccgtggcaagtcaatgtctgcacgagaaaaagaacaagagaccggatattaagaaggtacaacagttacttcaggagatgacggcttcttag

SEQ ID NO: 121087 - DNA, 1011 bp, synthetic construct
  misc_feature 1..1011: note = Description of Artificial Sequence: Synthetic coding sequence
  source 1..1011: mol_type = other DNA
atgcccttttgtgataaggatcggacattgatgacaccagtccaaaatctagaacagagttacatgccacccgattcctcttctccagaaaataaaagcttagaagtctctgatacacggttccacagtttctcattttacgaactaaagaacgtgacaaacaatttcgacgaaagaccaatatcagtcggtggaaataaaatgggggagggtgggttcggcgttgtgtataaagggtacgtcaacaatacgaccgtggcagttaaaaaattagccgccatggtcgacattaccaccgaggagctgaaacagcagtttgaccaagagattaaagttatggcaaaatgtcagcacgagaatctggttgagctcctgggatttagctcagacggcgatgacctgtgcctggtgtatgtttacatgccaaacgggtctctgctggataggctgtcttgcctggacggcacaccccccttgtcgtggcatatgcgatgcaaaatcgctcaaggagcggctaatggaatcaatttcctgcacgaaaatcaccacattcacagagacatcaagtccgccaacattctgcttgacgaggcttttaccgcaaagatctccgactttggacttgcgcgcgctagtgaaaagttcgctcagacggttatgacctctaggatcgtgggaaccactgcatacatggcgcccgaggctttgaggggcgaaattaccccaaagtctgacatatattcattcggtgtggtcttgctggagattataaccggtctccctgccgttgatgaacaccgcgagccacagctgctgctagacattaaagaagagatcgaagatgaggaaaaaacaatagaggattatattgacaaaaaaatgaatgacgccgacagcacctccgtggaagcgatgtacagcgtcgcctcacagtgcctccacgaaaagaagaacaaacgccccgacattaaaaaagttcagcagctgctgcaggagatgacagcatcgtag

SEQ ID NO: 121088 - DNA, 1383 bp, synthetic construct
  misc_feature 1..1383: note = Description of Artificial Sequence: Synthetic coding sequence
  source 1..1383: mol_type = other DNA
atgaataaacctatcacaccctcaacttatgtgcgctgcctcaacgtcggcctgatcagaaagctgagtgactttattgatccacaggaaggttggaagaaattggccgttgccattaagaagccatccggagatgatcggtacaaccagttccacataagaagattcgaggccctcctgcagacaggaaaaagccctaccagtgagctgttgttcgactgggggacaaccaactgcacagtgggcgacctggttgacttactcatacagaatgaattctttgccccagcctctttgttgcttcccgacgcagttccaaagaccgctaacacccttccttccaaggaagccattacagtgcaacagaagcaaatgcccttctgtgacaaagatcggacattgatgacacctgtgcagaacctcgagcagagctatatgccacccgatagcagcagccccgaaaataagagcctggaggtatccgatacgagatttcactcattctcattctacgaattgaagaatgtcacaaacaattttgatgagcggcctattagcgttggcggcaacaagatgggagagggcggattcggtgttgtatacaaaggatacgtgaataatactactgtggcggtaaagaagctcgccgccatggtagatatcacaaccgaagaacttaagcagcagttcgatcaggagatcaaagttatggcaaagtgtcagcacgaaaacctggtggagctactgggattctcctctgacggtgatgacctgtgtctggtttatgtctacatgccaaatggatctcttctggataggttatcgtgtcttgatggcacgccgccgttgtcatggcatatgaggtgtaaaattgcccagggcgcggccaatggcataaactttctccatgagaatcaccacatccatagagatattaagtctgccaacattctgctcgacgaggcatttacagctaaaatcagcgatttcgggctggcacgcgcatctgaaaagtttgcacagacagtgatgactagtagaattgtcggcacgaccgcctacatggcccctgaggctttaagaggtgagattacacctaagtccgatatctactcattcggcgttgtcttgctcgagattatcactggcctgccagctgtggatgagcatagagaacctcaactgctcctcgatatcaaagaggagatcgaagatgaagaaaagacaattgaagactatattgataaaaagatgaacgatgcagattctaccagcgtcgaggctatgtactctgtcgcctctcaatgcttgcacgaaaagaagaacaagaggccggacattaagaaggttcagcagctattgcaggagatgacagcttcatag

SEQ ID NO: 121089 - DNA, 270 bp, synthetic construct
  misc_feature 1..270: note = Description of Artificial Sequence: Synthetic coding sequence
  source 1..270: mol_type = other DNA
atgaacaaaccaatcacaccctctacttatgtgcggtgcctcaatgtcgggcttattaggaagttatcagatttcatcgacccacaggagggatggaagaagctggccgtggcgatcaaaaagccatccggcgacgaccgatacaatcagtttcatattagacgcttcgaggcgttgctacagaccggaaagagcccgactagtgagctgctgttcgactggggcacgaccaactgtaccgtgggagacctggtggatctgctcatctag

SEQ ID NO: 121090 - DNA, 1383 bp, synthetic construct
  misc_feature 1..1383: note = Description of Artificial Sequence: Synthetic coding sequence
  source 1..1383: mol_type = other DNA
atgaacaaacccataacaccaagtacctacgtaagatgcctgaacgtgggactgatcagaaaactgagcgacttcattgacccacaggagggctggaaaaaattggcggtggctataaagaagccatccggcgatgatcgctacaatcaatttcatataagaaggtttgaagcactattgcaaactggtaaatcaccaacttccgagctactcttcgactggggcaccactaactgtaccgtgggggacctggtagacttgctgattcaaaacgagttttttgcacctgcgtctctgctgctccccgatgctgtgcctaagacagctaatactctcccttccaaagaagctatcacggtgcagcagaagcagatgccattctgcgacaaagacaggaccctgatgacacctgtgcagaatttagaacagtcatacatgccaccggactcttcctctcccgagaataaatccctggaagtgagtgatactaggttccattcattttccttctacgagctgaaaaatgtgacaaataattttgatgagagacccatttccgtgggcgggaataaaatgggtgaaggaggttttggtgtggtgtacaagggctatgtcaataatacaacagtggctgtaaaaaagttagcagcaatggttgatattacgaccgaggaactgaagcagcagttcgatcaggaaattaaagtcatggcaaaatgtcagcacgagaaccttgttgagctgctgggtttcagtagcgacggcgacgatttatgcctggtgtacgtgtacatgccaaatggatcactgcttgacagactaagctgcttagatggcacacccccgttgagctggcatatgcgatgcaagatcgctcagggcgccgccaacggtatcaatttcctgcatgagaaccatcatattcaccgcgatattaagtccgcaaatatcctcctcgacgaggctttcaccgctaaaattagcgacttcggactcgctcgagccagtgagaaatttgctcagacagttatgactagccggatcgtcggcacaaccgcctacatggcccctgaggcactgcgaggagagatcacccccaaatccgatatatacagcttcggcgtggtcttgctggaaatcattacaggactgcccgccgtggatgagcatagggagccccagttactgctcgacattaaagaagagatcgaggatgaagagaagaccattgaagactatattgacaagaaaatgaatgatgcagattctactagcgtcgaagctatgtacagcgtggcatcccagtgcttgcatgagaagaagaacaaacgcccggatattaagaaggtccagcaactactccaagaaatgacggcatcctag

SEQ ID NO: 121091 - DNA, 2394 bp, synthetic construct
  misc_feature 1..2394: note = Description of Artificial Sequence: Synthetic coding sequence
  source 1..2394: mol_type = other DNA
atgtacctggagactcggcgcgctatatttgtgttttggatttttctccaggttcaggggactaaggatataagcatcaatatctatcacagtgagacaaaggatattgacaaccctcctcgaaacgaaaccaccgaaagcactgagaaaatgtataagatgtccaccatgcgacgcatttttgatctcgcaaaacaccgtacaaaacggtctgccttcttcccaacaggagttaaggtctgcccacaggagagcatgaaacagatcttggactctctgcaggcctactataggctgcgagtctgtcaggaggcggtgtgggaggcttaccggatttttctcgacaggatccccgacaccggtgagtaccaggattgggtatctatttgccaacaagagacgttctgcctgttcgacattgggaagaacttttcaaactctcaagagcatttagacttactccagcagcgcataaaacagcgctcttttcccgaccggaaagatgaaatctcagctgaaaaaactcttggggagccgggggaaactatcgtgatcagcacagatgtggctaacgtgtctctgggcccgttccccctaacccccgatgacacactgctgaacgagattcttgataatactctgaatgatacaaaaatgcccacaactgaaagagaaacggagttcgcggtcctagaggaacagcgtgttgaactctcagtaagtctggtcaaccagaagttcaaggccgaactggccgattctcagtcaccatactaccaggaactagccggcaaatcgcaactgcaaatgcagaagatcttcaaaaaattgcctggctttaaaaaaatacacgttctcgggtttcgtcccaaaaaagaaaaagatggctccagcagcaccgagatgcagctgaccgctatttttaagaggcactcggctgaggccaagtctccagcatctgacctgcttagctttgactccaataaaatagagagtgaggaggtttaccacggaactatggaagaagataagcagcccgagatatatctgaccgcaactgacctaaaacgcctgatcagcaaggccctggaagaagaacagagtctggatgtagggaccatccagttcaccgatgagatcgccggcagtctcccagcgttcggccccgatacccagtctgagctccccacctcttttgcagttataactgaagatgcaacattgagtccggaactgccccccgtggaaccccagttagagaccgtcgatggcgcagaacatggactgccagatacctcctggtctcccccagctatggccagtacttccctgtctgaggcaccaccattcttcatggccagcagcatttttagtctcaccgaccaggggacgactgacacaatggccacggaccagaccatgctggtgcccggtttgacgatacctaccagtgactattctgctattagccaactcgcactcggcatatcccacccccccgcgtctagcgatgacagccgcagctcggccggtggagaggatatggtgcgccacctcgacgagatggacctgtcagacacacctgccccatccgaggtgcccgaattaagtgagtatgtcagtgtgcctgatcacttcctcgaggacactacacccgtcagcgccctgcagtatataactacctcctctatgaccatcgcacctaagggtcgagaactggttgtgtttttttcacttagggttgccaacatggccttctctaacgatctgtttaataagtcaagcctggagtacagagcccttgagcagcagtttacacagcttctggtgccctatttgagatccaacctgaccgggtttaaacagttggagatccttaatttcaggaatggttccgtaatagttaattccaaaatgaagtttgccaagagcgtgccatacaatttgactaaggcagttcatggtgtcctggaggattttagatctgccgccgcccagcagttacatctggaaatcgacagctatagtctgaacatagaaccagcggatcaagccgacccctgtaagttcctcgcctgtggcgagtttgcccaatgcgtaaagaacgagcggacggaggaggcagagtgccggtgcaaaccagggtacgactcccagggcagtcttgatgggctggagcccggcctatgtggacctggcacaaaagagtgtgaggttttgcaaggaaagggtgcaccttgtaggcttcctgaccactctgaaaatcaagcctataaaacgagcgtaaagaagtttcaaaaccagcaaaacaacaaagtgatctcaaagcgcaatagcgagctgctcactgtcgagtacgaagagtttaaccaccaggattgggagggaaactag

SEQ ID NO: 121092 - DNA, 477 bp, synthetic construct
  misc_feature 1..477: note = Description of Artificial Sequence: Synthetic coding sequence
  source 1..477: mol_type = other DNA
gaacggcctaacggaaccagtgcccaacctgcacaggtgaagcccgaattctaccggcaggcagaactgaagccctgtccttggaccgggtccaaccagagacgttgcataacattctgtcctaccccagaccaggcagacccctgtaagttcttggcctgtggggagttcgctcagtgcgtcaaaaatgaacgtacagaggaggctgaatgtcgctgcaagccaggatacgatagccaaggatcattggacggcctggaaccgggactttgtggccccggcactaaggaatgcgaggtattacagggaaagggggccccttgccgccttcccgaccattctgaaaaccaggcatacaagacgtcagtcaagaagtttcaaaatcagcagaacaacaaggtcatttctaaaaggaattcagagttgctgactgtcgagtatgaggaatttaaccatcaagattgggaaggaaactag

SEQ ID NO: 121093 - DNA, 444 bp, synthetic construct
  misc_feature 1..444: note = Description of Artificial Sequence: Synthetic coding sequence
  source 1..444: mol_type = other DNA
atgtaccttgagaccagacgggcgatcttcgttttctggatatttcttcaagtgcagggaacgaaggtctgccaggaggccgtgtgggaagcctaccgcatctttcttgacagaatccccgacactggggagtaccaggattgggtgagtatttgccagcaggagactttctgtctgttcgatataggcaaaaatttcagcaatagccaggagcaccttgacttgctgcagcagcgcataaagcaacggagtttccctgaccggaaggacgagatcagtgctgaaaaaacccttggggaaccaggtgaaaccatcgtgatatcgactgagaaaaacaaaggaaagacaaaacctttcaacatcctgcagtttggcaataaccatcatgagcacttgttgccaatcttttgtttgctgtctagcatcatctacacgtactattag

SEQ ID NO: 121094 - DNA, 3726 bp, synthetic construct
  misc_feature 1..3726: note = Description of Artificial Sequence: Synthetic coding sequence
  source 1..3726: mol_type = other DNA
atgataatgtttccgctgtttggaaaaatttcactggggatcctaatttttgttctgattgaaggcgacttcccaagcctcacggctcaaacctacctgtccattgaggagatccaggagccgaagtctgcggtgtccttcttgctgcccgaggagtctaccgatttgtctctggctacaaagaagaagcaacctctggatagaagggaaaccgagcgacaatggctcatccggagaagaaggtccattctttttcccaatggcgtcaaaatctgtccagatgaatctgtggcagaggctgtggctaatcacgtgaaatatttcaaagtccgagtgtgccaggaggccgtgtgggaggcttttcgaaccttctgggataggttaccaggccgagaagagtatcactactggatgaacttatgtgaggacggtgtaacgtctatttttgaaatgggaacaaacttttccgagtccgttgagcaccgctcactgattatgaaaaagctgacatacgccaaggaaacagtgagctcttccgaactcagttcacccgtcccggtcggtgacacttctactctcggagatactactctgtccgtgccacaccccgaggtggatgcgtacgaaggagcaagtgaatctagtttggaaagacctgaggagtctatcagcaacgagattgagaatgtgattgaggaagcaactaaaccagccggggagcagattgccgagttctctatccatctgctcgggaagcagtatcgcgaggaactgcaggacagttcctcgttccaccaccagcacttggaggaggagttcatcagcgaggtcgagaacgccttcacggggctgccggggtacaaagagattcgggtgctggaattccgctctccaaaggagaacgattccggtgtggatgtctactacgccgtgacattcaacggtgaggcgatcagtaacacgacctgggacctaatctcgctgcacagcaacaaggtagaaaaccacggtttggtagagctagacgacaagcccacagtggtctatactatatctaatttccgggattacatcgcagaaaccttgcagcagaatttccttctgggcaattcttcactcaaccccgaccctgactccctccaactcatcaacgtgcgtggagttctgcggcaccaaacggaggacctggtctggaatacacagagcagttccttgcaagcaacaccttcttccatcttagacaatacgttccaagctgcctggccgtcggctgacgagtccatcacaagcagtattccaccgctggacttctctagtgggccaccctctgccactggccgggaactgtggtctgagagtcccctgggagatctggtgagcacccataagcttgccttcccatccaagatggggctgagcagctctcccgaggtcctcgaagtaagcagtctgaccctacactctgttacccccgccgttctccaaacggggctgccagtggccagtgaagagcgcacgagcggatctcacctggttgaagatggactagcgaatgtggaagagtctgaggatttcctgtcgatcgactccttacccagtagttccttcactcagccagtgcctaaggaaaccatccccagtatggaggattctgacgtgagcttgacctccagtccttatctgactagcagcataccgtttgggctcgacagtttgacgagtaaagtgaaggaccagctgaaggtcagccccttcctgcccgatgccagtatggagaaggagttgatatttgacgggggtctaggcagcggcagcggtcagaaagtggacctcataacgtggccatggagcgagacctcaagtgaaaaaagcgcggaaccattgtcaaagccctggctggaagacgatgattccctgttgcctgccgaaattgaggacaagaagctggttttggtggataaaatggattccacagatcaaatttccaagcactctaaatacgagcacgatgacagaagcacccatttccccgaggaggaacctttatctggccccgccgtgccaatcttcgccgacacagctgccgaaagtgcctctctgacactacccaaacacatctccgaggtgccgggagtggatgactactccgtgacaaaggcccccctaattctgacatccgtcgccatctccgcttctaccgacaagtctgatcaggcggatgctattctgcgcgaagatatggaacagataacagagtcctccaactacgagtggttcgattctgaagtgtctatggtgaagcccgacatgcaaactctatggacgatcctgcccgagagtgagagagtgtggacaagaaccagcagtttagaaaagctctcacgagacatcttggccagtactccccaaagtgctgatcggttatggctttccgtcacccagtctacaaagctcccacctaccactatatctaccctcctggaggatgaggtgattatgggcgtgcaggatatttccctagagctagacaggattggcactgattattaccagcctgagcaggtgcaggagcagaacggtaaggtgggaagttatgtggaaatgtcaaccagcgtccacagcacagaaatggtgtcagttgcttggcccaccgaaggcggtgacgatttgtcctatacccaaaccagcggggcactagttgtgttttttagcctgagagtcaccaatatgatgttttccgaagatctttttaataaaaattctctcgaatacaaagctttggaacagcgatttcttgaactgcttgtgccctacctgcagtctaatttgaccggctttcaaaacctggagatcctcaatttcaggaacggaagtatagtggtgaattcaagaatgaagtttgccaactctgtgccccctaatgtgaataacgccgtgtacatgatcctcgaggatttttgtaccaccgcttacaacactatgaacctggcaatcgacaagtacagcctggacgtcgaatccggcgatgaggcgaacccttgcaaattccaggcatgtaacgaattctcggagtgtctcgtcaatccttggtcaggtgaggccaagtgtagatgctttcccggctatctctctgtagaggagcgcccgtgtcagagcctgtgtgatctgcagccagacttctgtctgaacgacggaaagtgcgacatcatgcctggacacggggctatctgcagatgtagagttggcgagaactggtggtataggggcaaacactgcgaagaatttgtgtcggagcccgttatcatcggaattacaatcgcgtccgtggtgggcctgcttgtgatcttctcagccataatttactttttcattcgaaccttgcaggcgcaccacgatcggagcgaacgagagtcacctttcagcggaagcagtcggcaacctgactccttgtcgagtattgaaaacgccgtcaagtacaatcctgtttacgaatcacatagggctggctgtgagaagtatgagggcccttacccgcagcatcctttctattcatctgcctctggtgacgtgataggagggctgtctcgtgaggagatccgacagatgtatgaaagcagcgagctttcccgggaggagatccaggagagaatgagggttctagaactgtacgcaaatgaccccgagtttgccgcttttgtgagagagcagcaggtcgaagaggtatag

SEQ ID NO: 121095 - DNA, 201 bp, synthetic construct
  misc_feature 1..201: note = Description of Artificial Sequence: Synthetic coding sequence
  source 1..201: mol_type = other DNA
ggttacctgtctgtcgaggaacgcccctgtcaaagcttatgtgacctacagcctgacttttgtctgaatgatgggaagtgcgacatcatgccagggcacggggctatctgctccggcagctcacggcagccagacagtctctcttcaattgaaaatgccgttaagtataaccccgtgtacgaaagtcaccgcgctggttag

SEQ ID NO: 121096 - DNA, 2745 bp, synthetic construct
  misc_feature 1..2745: note = Description of Artificial Sequence: Synthetic coding sequence
  source 1..2745: mol_type = other DNA
atggcccaatttcctaccccgttcgggggcagtctggacatctgggctattacagtggaagagagggccaaacatgatcaacaattccactctttgaagccgatatctggatttattaccggagaccaggcccgcaatttcttctttcagtccggcttgccacagccggtgctcgcccagatctgggcactcgctgacatgaacaatgatggaaggatggaccaggtcgagtttagtatagctatgaagctgatcaaattaaaactgcagggataccagctcccctctgcccttccccccgttatgaagcagcaaccagtggctatatctagcgctcccgcattcgggatgggcgggatcgctagtatgccgccactgacagccgtcgccccagtgcccatggggtctatcccagtggtggggatgagccctaccttggtttcctcagtccccacagccgccgtgccccctctcgccaacggagcaccccccgtcatccaacctttgcccgcttttgcccacccagctgcgactctgcctaaatcaagcagcttctcccggtctggcccaggctcccagctgaacaccaagctgcagaaggcccaaagctttgatgtcgcaagcgtgccccctgtggcagaatgggccgtgccccagagcagcaggttgaagtacaggcagctcttcaactcccacgacaagacaatgtctggtcatctcacagggccccaagcaaggacaatcctgatgcaatcttccctgccacaagcccaattggctagtatttggaacttgtcagacatcgatcaggatggtaagctcaccgccgaggaattcatcctcgcaatgcacctgattgacgtggccatgtcaggccaacccctgccgcctgtgctcccacctgagtatattcctccctcctttcgccgcgtaaggagcggatcaggcattagcgtcattagtagcacgagcgtggaccaacgcctcccagaagagcccgtgctggaagatgaacagcagcaactcgaaaagaaactgcctgtgacttttgaggacaaaaaacgagagaatttcgaacgcggaaacctcgagctggaaaagcgccgtcaggctctgctggagcagcaaagaaaggaacaggaacgtttggcccagctcgaacgggccgagcaagagcggaaagaacgagagagacaagagcaggaaaggaaaagacagcttgagctggagaagcagctggagaaacaacgtgagttagaacggcagagggaagaggaacggaggaaggagattgagcggcgagaggcagctaagcgcgaactagagaggcagaggcagctggagtgggagaggaatcggcgccaggagctcctcaaccagagaaacaaagaacaggaagatatcgttgtactgaaggccaagaaaaaaacgctggaattcgagctggaagcactgaacgacaaaaagcatcagctggaggggaaactgcaggatattaggtgtcggctcactacccagcgtcaggaaattgagagcaccaataaaagtagggagttgcggatcgctgagattactcacctccagcaacagctgcaagaaagtcagcagatgctggggagactcatcccagagaagcaaattctgaacgaccagttgaaacaggtacagcagaattcactccatcgagattcgcttgtcacattaaagagggccctcgaagccaaagaactcgcccgtcagcacttgagggatcagctggacgaggtagagaaggagacccgttccaaactccaggagatcgacattttcaacaaccagctcaaggagttacgcgagattcataataaacaacaactccagaaacaaaaatcgatggaggcggagagactcaaacagaaagagcaagaacggaagataatcgagctagagaagcagaaggaggaagcccagagacgagctcaggagagggacaaacagtggctggaacacgtccaacaggaggacgaacaccaacgtccgagaaaactgcatgaagaagaaaaactgaaaagggaggagagtgtcaagaaaaaggacggcgaagagaagggtaagcaagaagctcaggacaagcttggacgattatttcaccaacaccaggaacccgcaaagccggccgtgcaagccccctggagcaccgcagaaaagggacctctcaccatcagcgcccaggagaacgtaaaagtcgtctattaccgagctttgtatcccttcgagtcccgcagtcatgatgagatcaccatccagccaggggatatcgtcatggtcgacgagtcgcagacaggcgagccgggatggctcggtggcgaactgaaaggaaagactgggtggtttccagctaactatgcagagaagatccccgaaaacgaggtgcctgcacctgtcaagcccgtcaccgattcgaccagtgccccagcgccaaagctggcccttagagagacgccagcccctctggcagtgacctccagcgagccgtccaccacacctaataactgggccgattttagcagcacttggcccacttcgaccaacgaaaaaccggaaaccgataattgggacgcgtgggctgcacaaccctccctgacagtcccatcagctggacagctgcgacaaagatccgcatttacccctgccacggctaccgggtcgagcccttcacccgtactgggtcaacacggtttctggttctttagggagagctgctag

SEQ ID NO: 121097 - DNA, 954 bp, synthetic construct
  misc_feature 1..954: note = Description of Artificial Sequence: Synthetic coding sequence
  source 1..954: mol_type = other DNA
taacccctgatggagtcagagctcctcacagaaaaagaggtggccatgatcttcgtcaactggaaggaactgatcatgtgtaacataaagctcctcaaggctctccgggtgaggaaaaaaatgtcaggggagaaaatgcccgtgaagatgatcggcgacatactgtcggcgcagctgcctcacatgcaaccctacattcggttttgctcccgacagctgaacggagctgccctgatccagcagaagactgacgaagcgccagactttaaggaattcgtgaaacggttggcgatggatcctcggtgcaaagggatgcctctgtcatcgttcatactgaaacctatgcaacgggtgactcggtaccctctcattatcaagaatcagctggtgtttaacagcgtgacgaactgcctcgggccccggaagtttttgcacagtgggaagctgtataaggctaagtccaacaaggaactgtacgggttcttgtttaatgactttctcttattaacccagatcaccaagcctctgggctcatccgggacagacaaggtgttttcacccaagagtaacctgcagtataaaatgtacaaaacacccatctttttgaacgaggtgctggtgaagctgcccactgatccgtctggtgacgagccgatttttcacatcagtcacattgatcgagtgtatacactaagggctgaatcaattaatgagcgcacagcgtgggtccagaagattaaggcagcttcagagttatatatcgagacagagaagaaaaagcgcgagaaagcctatttagtcagatctcagcgggcaactggaatcggccgacttatggtaaacgtcgttgagggcattgagttgaagccctgccgctcccacgggaagtctaatccctactgtgaggtgacaatgggcagtcagtgccatatcacaaagacaattcaggactag

SEQ ID NO: 121098 - DNA, 5166 bp, synthetic construct
  misc_feature 1..5166: note = Description of Artificial Sequence: Synthetic coding sequence
  source 1..5166: mol_type = other DNA
atggctcaattccccacaccgttcggagggtccctcgatatctgggctattacagtcgaggaaagggctaagcacgatcaacagttccattctttgaaacccattagtgggtttatcactggagatcaggcgaggaatttctttttccagagcggcctcccacagcccgttctcgcccaaatttgggcccttgccgacatgaacaatgatgggcgaatggatcaggtcgagttttcaatagcaatgaaactcatcaagctcaaactccagggctatcagttaccaagcgccctccctccagtgatgaagcagcaacctgtcgccatctcctccgcacccgctttcggaatgggtggtattgcatctatgccgcctctgactgctgtggcccctgtgcccatgggttctatcccggtggtgggaatgagccctactttggtatcgtccgtgcccaccgcggcagtacctccactggctaatggcgccccacccgttatacagcctctgcccgctttcgcacaccctgcagccaccctgccgaaatctagctctttctcacggagcgggcctggaagtcagttaaacacgaagctacagaaggcccagtcattcgatgtagcctccgttcccccggtcgcagaatgggctgtgccacagtctagtcgccttaagtacaggcagctattcaattcccacgacaagacgatgagtgggcacctgactgggccgcaggccagaaccatcctgatgcagtcttccttgccacaggctcagttggcgtccatctggaatctgtcagacattgaccaggatggtaaattaacagcggaggagttcatactagcaatgcacctcatcgacgtggcaatgtccggccaacctttgccacccgtgcttccccctgaatacattccgcccagcttccggagggtgcgatccggctccggaatttccgttatttcgtctacctcagtggatcagcgactccctgaagaacctgtcctggaggacgagcagcagcaattagagaaaaaactgcctgtgacattcgaggacaaaaagcgcgaaaacttcgagcgtggaaatctggaactcgagaagagaaggcaagcattactcgagcagcagagaaaggagcaggaacggctggcccagttggaacgggcagaacaagagcggaaagagagagagcggcaagaacaagaacggaaacgacagttggaactagaaaaacaactggagaagcaacgagaactggaaagacagcgagaagaagagagaagaaaggagatcgagcggagggaggccgcgaagcgagaactcgagcggcaacgccaattggaatgggaacgcaaccgcagacaggagcttttaaatcagaggaacaaagagcaggaggacatcgtcgtgctaaaggctaagaagaagaccctggaattcgagctggaggctcttaacgacaagaaacaccagctggaagggaagctgcaagatatccggtgcaggctcactacacaacgacaggaaatcgagtccaccaacaagtcacgggaactccggatagcggagattacccatctacagcagcagttgcaggagtcacaacagatgctgggacgactcattccggagaagcaaatccttaatgatcaacttaagcaggtacagcagaactccctccatcgagatagtctggttactctaaaaagagctctggaggcgaaagagcttgcccggcagcatctgcgggaccagctggatgaagtggagaaagagacccgcagcaaactccaggaaattgacattttcaacaaccagctgaaggaactcagggagatccataacaaacagcagctgcagaagcagaaaagcatggaggccgagcgcctgaagcagaaggagcaggagcgcaagataattgagttagagaagcagaaggaagaagcgcagcgccgtgctcaagagcgcgacaaacagtggctggaacatgttcagcaagaggacgagcatcaaagacctcgcaaactgcatgaggaagaaaagctgaaacgcgaggaatccgttaaaaagaaggatggtgaggagaagggtaaacaggaggctcaagataaactcggaaggctgttccaccagcatcaagaaccagcaaagccagcggttcaggccccatggagcaccgctgagaaaggtcccttaaccatttccgcccaggaaaatgtgaaggttgtctactaccgtgctctctacccttttgagtcaaggagccacgacgaaataaccatccagcctggcgatattgtgatggtcatcggttgctgggtggatgagtcccaaaccggcgagcccgggtggctaggcggtgaactgaaaggcaagacgggatggttccccgcgaactatgccgagaagatccctgaaaatgaggttccggcgcctgttaagcctgttacagattccacatcagcccccgccccgaaactggcactgcgggagacgcctgctcctctcgctgtgaccagcagtgaaccatccaccacgccaaataattgggcagacttttcctcaacttggccaacgagtacgaatgaaaaacctgaaacggacaattgggacgcttgggcagcccaacccagcctaaccgtgccctcagcgggccaacttagacaaaggtcagccttcaccccagccaccgccacagggagctcaccaagcccagtcctgggtcagggtgagaaagtggaggggttacaggctcaggcactctacccttggagggccaaaaaagacaatcacttgaactttaataagaacgatgttatcactgttctggagcagcaggacatgtggtggtttggggaggtacaaggacagaaaggctggttccccaaaagctacgtgaaactgattagtggaccaatcagaaaatctaccagcatggacagcggatcctctgagtcacctgcgtccctgaagcgggtcgcttctccagctgcaaagccagtggtctccggggaagagttcattgcgatgtacacttacgaaagctcagagcaaggcgatctcacattccagcagggtgacgtcatcctcgtaactaaaaaggatggggattggtggaccgggactgttggagacaaggccggtgtctttccttcaaactatgtgagacttaaagacagcgaggggtcgggcactgccgggaaaacaggttctctaggcaagaaaccagagatcgcccaagtgatcgcctcctacaccgcgacagggcccgaacagctgaccctggcccccgggcaacttatactcattcgtaagaagaatcctggaggctggtgggaaggcgaactgcaggctcgcgggaaaaaaagacagatcgggtggttcccagccaattacgtgaaactcctgtccccaggaacatctaagataacacctaccgaacccccgaagagcactgcactggccgcggtgtgtcaggtaataggcatgtacgactacacagcacagaacgacgacgaactagccttcaacaagggtcaaattattaacgtcttaaataaagaagatccggattggtggaagggagaggtcaatggccaggttgggctgtttccctccaactacgtgaagttaaccactgacatggatccatctcagcaatggtgctccgacctgcatttgctggacatgcttaccccgactgagagaaagagacagggatacattcacgagctcattgttacggaagagaactatgtgaatgatctgcagctggtgacagaaatattccaaaaacctcttatggagtccgagctgctcaccgagaaagaggttgcaatgatcttcgtgaactggaaggagctaataatgtgtaatattaagctgctcaaagccctcagagtcaggaagaaaatgagtggagagaagatgccggtgaaaatgatcggggacatcctatctgcacagttgccccacatgcagccatacatacgtttctgctctcggcagctgaatggggctgctcttattcagcagaagaccgatgaagccccagattttaaagaattcgtgaaaaggcttgctatggatccccggtgcaagggcatgccactgagttcctttatcctcaagccaatgcagcgcgtgacaagatatccgctgattataaaaaacatcctcgagaacaccccagagaatcaccccgatcattcccatctcaagcatgcccttgaaaaggctgaggaactatgttcccaggtcaacgagggggtacgtgagaaagaaaacagcgatcgattggagtggattcaagcgcacgtacagtgcgaaggattatctgaacagctggtgttcaactccgtgacaaattgtcttggcccgcgtaagtttctgcacagcgggaagctgtacaaggcgaagtcgaacaaggaactgtacgggttcctatttaatgacttccttctgctgactcagattactaagcctcttggatccagtgggactgataaagtgttttcaccaaaatcgaatttacagtataaaatgtataagactcccatatttctgaacgaagtgctagtgaaactccctaccgatccaagtggcgatgaaccaatttttcatattagtcatattgaccgggtatacactctgagagctgaatctataaatgaacgcacagcctgggtccagaaaattaaagccgcgtccgaattgtatattgagacagagaagaagaagagagagaaggcatacctcgttcgttcccagcgggcgacaggaattggacgattaatggtgaacgtggtagaaggtatcgaattgaaaccatgccggtcccatggcaaatcgaatccctattgtgaggtgacgatgggatctcaatgccacattacaaaaactatacaagacacactcaaccctaagtggaacagcaactgtcagtttttcatcagagatttggagcaggaagtgctctgtatcacagtgttcgagagagatcagtttagtcccgacgattttctgggccgtacagagatccgggtggcagacattaaaaaagatcaaggtagcaaggggcccgttactaaatgtctcctcctccatgaagtgcctactggtgagatcgtggttagactcgatcttcagctcttcgacgagccatag

SEQ ID NO: 121099 - DNA, 4953 bp, synthetic construct
  misc_feature 1..4953: note = Description of Artificial Sequence: Synthetic coding sequence
  source 1..4953: mol_type = other DNA
atggctcaattcccaacgccttttggtggcagtctggacatttgggcaataaccgttgaggagcgcgccaagcatgaccaacagtttcactcgctgaaacctatctccgggtttataacgggtgaccaggcgcggaatttttttttccaaagcggacttccgcagcccgtactggcccagatctgggctctcgctgatatgaacaatgatgggcgcatggatcaagtggaattcagcattgctatgaaattgatcaagctgaaacttcagggataccagcttccgagcgcgttgccaccagtcatgaagcagcaacctgtggccatctcatctgcccctgcatttggtatggggggcatcgcgtcaatgccacctctgactgcagtcgcccctgtgcccatgggctctatcccagtcgtaggcatgtcacctaccttagtcagcagcgtacctaccgcagccgtccctcccttagctaatggcgctccacccgtaatccagcctcttcccgcttttgctcacccggccgccaccttgccgaagtcctccagcttttcccgcagcgggccaggaagccaactcaacacaaagcttcagaaggcccagagttttgacgtcgccagtgtccccccagtcgccgagtgggcggtgccgcaaagttccaggcttaagtaccgccagctgtttaactctcacgacaaaacaatgtctggccacctgacaggccctcaggcacgcactattcttatgcaaagttcgctaccgcaagcccagctggcatcaatttggaatctgtcggacatagatcaggatggaaaactgacagccgaagagtttattctcgccatgcacctgatcgacgtggcaatgagcggacagcccctcccaccggtgctaccccccgagtacattccacccagctttagaagggtgagaagtgggagtggcatttcagtcatctcctccaccagtgttgatcagaggctgccggaggaacctgtgttggaggatgagcagcagcagctggagaaaaagctgcccgtaacttttgaagacaagaaacgggaaaacttcgagcgtgggaatctggaactggagaagcgacgccaggcactgctcgagcagcagaggaaagagcaggagcgcctggcacagctggaacgagcagaacaagagagaaaggaaagggagcgccaggaacaggagaggaagcgtcagcttgagttagagaaacagctcgagaaacagagggaactggagcgccaaagggaagaggagagacgcaaagaaattgaaagaagagaagccgcaaagagagagttggagcgacagcgccaattagagtgggagaggaaccgaagacaggagctcttaaatcagaggaacaaggagcaggaggatatcgtcgttctgaaagccaagaaaaagacacttgagttcgagctggaggcattgaatgataaaaagcaccagctggaagggaaactgcaggatatcaggtgtcgcctgacgacacaacgccaggagatcgagtcgaccaataaatcacgggaactgaggatcgctgagatcacacatctgcagcaacagcttcaggagagtcagcagatgctgggtcgattaatccccgagaagcagattctgaacgatcaactaaagcaggtgcagcagaattctttgcatagggattcactcgtgacactgaagcgagccttagaagctaaagagctcgcccgccaacacctcagagaccagcttgatgaagtggaaaaagagacaagatccaagcttcaggaaattgacatcttcaataaccagctcaaggaactgagggagatccacaataagcagcagttacaaaagcaaaagtcaatggaagccgagcggctcaagcagaaggagcaggagcggaaaatcattgaactggagaagcaaaaggaagaagcgcagcgcagggctcaggagcgcgataaacagtggcttgaacacgtgcagcaggaagacgaacaccagagaccacggaagcttcatgaagaagagaaactgaagagagaagagagcgtgaagaaaaaagacggggaggaaaaagggaagcaggaagcccaggacaaactgggtcggctgtttcaccaacaccaggaacccgctaagccagccgtccaagctccatggtccaccgccgagaagggcccactaaccatctccgcccaggagaacgtgaaggttgtgtactaccgtgcgctgtacccatttgaatcaagaagtcacgatgagattactattcagcccggtgatattgtgatggttattggctgctgggtggacgaaagtcaaactggtgagcctggttggttaggtggagagctgaaagggaaaaccggatggttccccgctaattacgccgagaaaatccctgaaaatgaggtgcctgcccccgtaaaaccggttaccgacagtactagtgcccctgcccccaagctggcacttcgagagacacccgcccctttggctgtgacctcttccgaaccgagtactacaccaaacaactgggcagacttttcgagcacctggcccactagtactaacgagaagccagagaccgacaactgggacgcctgggccgcacagcccagcctgactgttcccagtgctggccagctccgccagaggagcgcatttacccccgccaccgccactggctcatccccttccccagtattaggccagggagagaaagtggaaggcctgcaagcccaagccctgtacccatggagagccaagaaggacaaccatcttaattttaacaagaatgacgtgatcactgtgctggagcagcaggacatgtggtggtttggcgaggtgcagggtcagaaagggtggtttccaaagtcatatgtgaagcttatatctgggccaattaggaaaagcactagtatggatagcggttcttcagagtctcctgccagtctcaagcgggttgcgtcaccagccgccaaaccggtagtgagtggcgaggagatcgcccaagtgatcgcttcctacactgccacgggtcctgagcaactcacactggcccccggccagctgatactgatccggaaaaagaacccgggcggctggtgggaaggcgagcttcaggccaggggcaagaaacgccaaatcggctggtttcctgcaaactatgtaaagttactctcacctggcacttcaaagatcacaccgacggagccacctaagtcaaccgcactggccgccgtttgtcaggtgatcggcatgtacgactataccgcacaaaacgacgatgagctggccttcaacaagggacagatcataaacgtgctaaataaggaggatccagattggtggaagggagaggttaacgggcaagtcggacttttcccatcaaattacgtcaaattgacaaccgacatggacccatctcaacagtggtgttctgatctccatctcctggacatgctgaccccgacggaaaggaagagacagggctacatccacgagctgattgtgactgaggagaattacgtcaatgacctccagctcgtgacagagatcttccagaagcctctaatggaatcagaacttcttaccgagaaagaagtcgcaatgatctttgtcaattggaaagagctaatcatgtgtaacattaagctgctgaaagccctccgcgtcaggaaaaaaatgtctggggagaagatgccggttaagatgatcggggacatactatcggcccagctgcctcacatgcagccgtacatcaggttttgttctcggcaactcaatggagccgctcttatacagcagaagaccgacgaggcccccgattttaaggaatttgttaaaagactggcaatggaccctcgctgcaaaggtatgccactgagtagttttattctgaagcctatgcaacgggtcaccagatacccgctgattattaagaacatactggaaaatactccggagaaccaccctgatcactcccacttgaagcatgcccttgagaaggcagaagaactctgtagtcaggtgaacgaaggagtgagagagaaagaaaacagtgatcggttagaatggattcaagctcacgtccaatgcgaaggactttccgagcagctggttttcaactcagtgacaaattgtttaggaccgcggaagtttcttcactccgggaaactgtacaaagccaagagtaataaagaactatacgggttcctgtttaacgattttctgctgctgacccagattacaaaacctttaggttcttctggaacagacaaggtgttctcacctaagagcaacctccagtacaagatgtacaaaacacctatcttccttaatgaggtcctggtgaagttacccacagatcccagcggtgacgaaccaatttttcacattagccatatcgacagggtttataccctcagggccgagtctatcaacgagaggaccgcctgggtgcagaagattaaagctgctagcgaattgtatattgagactgaaaagaagaagagagaaaaggcttacctcgtgcggtctcagcgcgccaccgggattggccggctgatggttaatgtggttgagggaatcgagcttaagccatgtaggagccacggaaagagtaacccctattgcgaagtgacgatgggtagtcagtgccacatcactaaaacgatacaggacacactgaaccccaagtggaatagtaattgccaattttttatccgagatcttgaacaggaagtgctgtgtattaccgtgttcgaacgggaccagttctcacctgatgacttccttgggagaaccgagatccgggtggctgacatcaagaaagaccaaggctccaaggggcccgtcacaaagtgtctgctgctgcacgaagtgcccacgggagagatcgtggtgaggttggatttgcaattgtttgatgagccctag

SEQ ID NO: 121100 - DNA, 3237 bp, synthetic construct
  misc_feature 1..3237: note = Description of Artificial Sequence: Synthetic coding sequence
  source 1..3237: mol_type = other DNA
atggcccaatttccaaccccctttggaggaagcctcgacatttgggccattacagttgaggaaagggccaaacacgatcaacagtttcacagcctgaagccgatttcgggcttcattacaggcgaccaagctaggaacttctttttccagagcggactgccacagcctgtgctcgctcagatctgggcactggctgacatgaacaacgatggtcgaatggatcaggtggagttttcgatcgcaatgaagctgatcaaactcaaactgcaggggtatcagttgccctccgccctgcctcctgtgatgaaacagcagccagtggctatatctagtgcacccgcattcgggatgggaggaatcgccagcatgccacctctgaccgccgttgcgccagttccgatgggctctattccagtggtgggtatgagcccaaccctagtctcctcagtaccgactgccgcagtgcccccgctcgccaatggtgcaccccccgtgattcagcctctgcccgcctttgcccatcccgccgctacactgccaaagtctagcagcttttcccgcagcgggcccggatctcagctcaacaccaaattacagaaagcccaaagcttcgacgtggcctctgtacctccggttgccgaatgggccgtgccacagagcagccgattgaagtaccggcagctcttcaactctcacgataaaactatgtccggccacctgactggcccacaggcccgaaccatccttatgcagtccagtttaccacaggcgcaattggcaagcatttggaatttgtccgatatcgaccaggacggtaaacttactgctgaggagtttattttagctatgcatctgattgacgtcgccatgtcagggcaacctcttccacccgtacttccaccagaatacatcccaccatccttccggagggtcagatccggatctgggatatctgtgatatctagcaccagcgtggaccagcggcttccagaggaacccgtcctggaggacgagcagcagcagctggaaaaaaaactacctgtcacttttgaggataaaaagcgtgagaatttcgagcgagggaacctggaactcgagaagcgtcggcaggcattgctggaacagcagcggaaggagcaggagaggcttgctcaattggaaagagctgagcaagagcgcaaggagcgggagcgccaggaacaggagagaaagcggcagttagagttagagaaacagcttgagaaacagagagagctagagagacagagagaagaggagcggcggaaagagatagagaggagagaagcagcgaagagggagctggagcgccagaggcagctggagtgggagaggaatagacgccaggagctgctaaaccagagaaataaagagcaggaagacatcgtcgtgctgaaggctaaaaaaaagactctcgaatttgaactggaagcactcaacgataaaaaacatcagctcgaaggaaagttgcaagatataagatgtagactaactactcagcggcaagagattgagagcacaaacaagagcagggagctacgcattgctgagattacccatctccagcagcaactgcaggagtcccaacaaatgctcgggaggctgatccctgagaagcagatcctgaacgaccagctgaagcaggtccagcagaactctctgcacagagacagcctggttaccctcaagagggccctggaagccaaagagctggcgagacaacatctcagagaccagcttgacgaagtggaaaaggagactcggagcaaactgcaggagatcgatatattcaataatcaattaaaggaactgcgcgaaatacacaacaagcagcaactccagaaacaaaagtctatggaggccgagcggcttaagcagaaagagcaggaaagaaaaattatagagctggagaaacaaaaggaggaagcccagaggcgggctcaggagcgggacaagcagtggctcgagcatgtgcagcaggaagacgaacaccagcgacctcgtaaactgcacgaagaggaaaagcttaagcgggaagaatccgtcaaaaaaaaggacggggaagaaaaaggcaaacaggaggctcaggataagcttgggcggctgttccatcagcatcaggagcccgctaaacccgctgtccaagctccctggtccacagcggaaaaaggccctctgaccatcagcgcccaggagaatgtgaaggtcgtttactatagggctctttacccctttgagtcgcgaagtcacgatgagataaccattcaacctggagatattgtcatggtcgacgagtcgcagaccggcgaacccggttggttgggtggggagctcaagggaaaaactggatggttcccagctaactacgccgaaaaaatacctgagaacgaagtacctgccccggtcaagcctgttaccgactccaccagcgcacccgctcccaagcttgcgctcagggaaaccccggcgccccttgcagtgacctcctctgaaccctcaaccacgcccaataattgggccgattttagctccacctggccgactagcacaaacgagaagcctgagacagataattgggatgcctgggcagcccagccatccctgactgtccccagcgcaggccaactcagacaacggtccgcatttaccccagccaccgctacagggagcagtccatccccggtcctcggtcagggagagaaggtggaaggcctacaggctcaggctttgtatccgtggcgtgccaagaaggataaccacttaaactttaataagaacgatgtcattacggttcttgagcaacaggatatgtggtggttcggggaggttcagggccagaaggggtggtttcccaaatcatacgtgaagctaatcagcggccccattcgaaagtccaccagcatggatagcgggagctctgagtctcctgccagtctgaaacgagttgcatcacctgcagctaagcccgttgtttctggggaggaattcattgccatgtacacctatgaatcatctgaacagggcgacttaacatttcagcagggagacgtgattcttgttacgaagaaggatggcgactggtggaccggaaccgtgggcgataaagccggcgtcttcccaagcaactatgtgagactaaaggattccgaaggaagtggcaccgcaggcaaaaccgggtctctgggaaagaagcccggcccttcatgcaacgtcaaatag

SEQ ID NO: 121101 - DNA, 3663 bp, synthetic construct
  misc_feature 1..3663: note = Description of Artificial Sequence: Synthetic coding sequence
  source 1..3663: mol_type = other DNA
atggctcaatttcccacaccgttcggcgggtctctggatatatgggccatcacagtcgaagagagagccaaacacgatcaacagtttcattctctaaagccaatcagcggcttcatcacaggcgatcaagccaggaacttcttcttccagtccggactccctcagcccgtgctggctcagatctgggccctggcagatatgaataacgatgggaggatggatcaggtggagtttagcattgctatgaagcttatcaaactcaagttgcagggctaccagctcccttcagccttgccccccgtcatgaagcagcaacctgttgcaattagctctgctccagcatttggtatggggggcatcgcatccatgcccccactgaccgctgttgctcccgtgccgatgggctccatcccggtggtgggaatgagcccaacactagtgtcctcggtgccgactgcagcggtccctccattggcaaatggcgcccctccagtcattcaacccctgccggcctttgcccatccagccgccactctgcccaaaagtagctccttctcccggtctggccccgggagccagttaaacaccaaactgcaaaaagcacagtctttcgacgtagcaagcgtgccccccgtggccgaatgggccgtgcctcaatccagtcgattgaagtatcggcagctctttaatagtcacgataaaacaatgtccggtcacctgacagggccacaagctcggaccatcctgatgcaatcctcattgccccaggctcagctggcctccatctggaatctgagcgacatcgaccaggacggtaaactaaccgcagaggagttcatcctcgctatgcatctgattgatgtggccatgagcgggcagcctctgcctcccgtgcttcctcctgagtacataccaccctctttcaggcgagtgcggtccggtagcggcattagtgttattagcagcacatctgtggaccagaggctgcctgaggagcctgtgcttgaggatgaacagcaacaactcgagaagaaactgccagtaacgttcgaagataaaaaacgggaaaacttcgaacggggcaatctcgagctggagaagcgtcgccaggcactcttggagcaacagcggaaggagcaggaaagattggcacagttggaacgggccgagcaagaaagaaaggaacgcgagcgccaggagcaagagcggaagcgccagctggagctggagaaacagctggagaaacagcgggagcttgagcggcagcgggaagaggagagacgtaaggagatagagcggcgtgaggcggccaagcgggagctggagcggcagaggcagttggagtgggagagaaaccgacgccaagaacttttgaaccagcgaaataaagagcaagaggatatagttgtcttgaaagctaagaagaagactctggagtttgaattggaggccctgaatgacaaaaaacatcagctcgagggcaaactgcaggatattcgctgtagactgactactcagagacaggagatcgaatccactaataaaagccgtgagttgcgaatcgccgagatcacacacctacagcaacagctgcaggagtcgcaacagatgttgggtcgcctgatcccagaaaaacagattctgaacgatcaactgaagcaggtgcagcagaacagtcttcatagagattctctagtcactctcaaacgagccttggaggccaaagagctggcacgacagcacttgcgagaccaactggacgaggtagagaaggagacgcgctctaaattacaggaaatcgacattttcaacaatcagctgaaagaactgcgcgagatacacaacaaacagcagctgcagaaacaaaagtccatggaggctgagaggttgaagcagaaagagcaagaaaggaagataatcgaacttgagaagcagaaggaggaggctcagcgccgggcccaggagcgggataagcagtggctcgagcacgtgcaacaagaggacgaacatcagaggccacggaagctccatgaggaagagaaactgaagagagaggagtctgtcaagaaaaaagatggagaagagaaaggcaagcaggaagcgcaggataaactgggtagactttttcatcagcaccaggaaccggccaaaccagctgtgcaggcgccctggagcaccgcggagaaagggcccttaacgatcagcgcccaggaaaatgtcaaggtggtatattacagggccttataccctttcgaatcacgctcccacgatgagattacaatccagccaggagatatagttatggtaaagggcgagtgggtcgatgaatcccagaccggcgaaccagggtggctcggtggcgagttgaagggtaagactggttggtttccagccaattatgctgaaaaaattcctgagaacgaagtccctgctcctgtgaagcctgtcactgattcaaccagcgcaccagcccctaaactggctctgcgggagacccccgcccccctggcagtcacaagctccgagcccagtaccacacccaataactgggctgatttctccagtacctggcctacgtctaccaacgagaaacctgagacagataactgggacgcatgggctgcccaaccttcattgaccgtgccctctgcaggtcagctgaggcagcgttcagccttcacgcctgctaccgctacgggatcaagcccctcccctgtgctgggccagggggagaaagtagaagggttgcaggctcaagccctttatccctggcgagccaaaaaggacaatcaccttaacttcaataagaatgatgtgattactgtcttggaacagcaggacatgtggtggttcggcgaagtgcaggggcagaagggatggtttcccaagtcttatgttaagctcatttccggtccaattagaaaatctacctccatggattctgggagctccgagagcccagcctcgctgaagagagtggcatctcccgcagcaaaaccagtggtttctggcgaagagtttattgctatgtatacttatgagagttcagagcagggtgacctcacatttcagcaaggagacgtgatcttggtcactaaaaaagatggcgattggtggactggcactgtgggggataaggctggggtgtttccaagtaactacgttaggctcaaggattctgaaggaagtgggaccgctggcaaaacaggctctctgggaaaaaagcccgaaattgcccaagtgatagccagttacactgcgaccgggccagagcagctgactctcgcccctggccagctgatcttgattcgcaaaaaaaatcctggaggctggtgggaaggagagttgcaggcaagagggaagaagcgacagattgggtggttccccgccaattacgtgaagctgctctcgccaggaacatctaagattaccccaactgagccacccaagagtacagccttggcagcagtgtgtcaggttatcggaatgtacgactataccgcccagaacgacgacgagctagccttcaataagggacaaatcatcaacgtgttgaacaaagaggaccccgactggtggaaaggggaagtcaatgggcaggtgggcctcttcccatccaattatgtgaagcttaccaccgacatggacccctcacaacagtag

SEQ ID NO: 121102 - DNA, 5166 bp, synthetic construct
  misc_feature 1..5166: note = Description of Artificial Sequence: Synthetic coding sequence
  source 1..5166: mol_type = other DNA
atggcacagttccctacaccattcgggggctcactagatatctgggcaatcaccgttgaggaacgggctaagcatgatcaacagttccattctcttaagcccattagcggttttattacaggggatcaggcccggaattttttctttcagtcagggcttccccagccggtactcgcacagatctgggcattagcagatatgaataacgacgggagaatggaccaggtcgagttcagtattgccatgaaacttataaagcttaagctgcagggctaccaactcccgtcggccctgccgcctgtaatgaaacagcaacccgtggctattagcagtgctccggcatttggcatggggggcattgcaagtatgccccctcttaccgccgtggccccagtgccaatgggctccatccccgtggtcgggatgagcccaactctggtttcctccgtgcctacagccgccgtgcctcccctggcaaatggcgcccctcctgtaattcaacccctacctgcattcgctcatcccgcggctacattgcctaagagctcttcctttagcaggtccgggccaggatcccagctgaacaccaaactgcagaaagcccagagtttcgatgtggcgtctgtgccgccggttgccgaatgggcagttccacaaagtagtagactcaagtataggcagctgtttaactcacatgacaagactatgagcggccacctgacaggcccccaggcacgtacaatcctcatgcagagttcactaccacaagcacagcttgcatcaatctggaacttatctgatattgatcaggacgggaagctgactgcagaggagttcatcctggctatgcatctgattgacgtggcaatgagtgggcagcccttgcctcccgtgctccctccggaatatattcccccttcatttaggagagtccgctctggcagcggaatcagcgtcatcagtagcacatccgtagaccaacgattacccgaggagcccgtactagaggatgagcagcagcagcttgagaaaaagctgcccgtgaccttcgaggacaaaaaacgtgagaattttgagcggggtaacttagaactggaaaagaggcggcaggcgttactggagcagcaaaggaaggagcaagagagactcgcccaacttgagcgcgctgaacaggagcgcaaggaaagggaaaggcaggaacaggaacgaaagagacagctcgagctggagaaacaactggagaagcaaagagaactggagagacagcgcgaagaagagcgcagaaaggaaattgagcgccgcgaggccgccaaacgggaattggagagacagcgccaactggaatgggagcggaacagacgccaggaattattaaatcagaggaacaaggaacaggaggacattgtcgttctgaaagctaagaaaaaaaccctggaatttgagctggaggctctcaacgacaagaaacaccaactggagggaaagctgcaggacattcggtgccggttgacaacccagcgccaggagattgaatctacaaataagtcacgcgaactgcgtatcgccgagattacacatttacagcagcaacttcaggaatctcagcagatgttaggccgcttaatcccggagaaacagattctcaacgaccaactcaaacaagtgcagcagaactcactgcacagagattccttggtgactcttaaacgagccttggaagcgaaggagctggcacggcagcaccttcgggatcagttggatgaagtggaaaaagaaacaaggagtaaactccaggagattgacattttcaataatcagctgaaagagctgagggagatccataataaacaacagctccagaagcagaagagcatggaggctgagcgccttaagcaaaaagagcaggagcgaaagatcatcgagctggagaaacagaaggaggaggcccagcgacgtgcacaggaaagggacaagcagtggctggaacatgtgcaacaggaggatgagcaccagcgtcctcggaagttgcacgaggaggagaagcttaagcgtgaggaatcagtcaagaagaaggatggggaagaaaaagggaagcaagaagctcaggataagctcgggagactgttccatcagcatcaggaacccgccaaacccgccgtgcaggcaccatggtccactgcagagaaaggccccctcaccatttctgcccaggagaacgttaaggtggtgtactaccgggccttgtaccctttcgaaagtaggtcacacgacgagatcacaatacagcccggggacattgtgatggttaaaggcgaatgggtggatgagtcccagacgggagagcccggatggctcggtggtgagctgaaaggaaagacaggatggtttcccgcaaactacgctgaaaaaatccccgagaacgaggtgccagcacccgtgaaacccgtgacagactccacaagcgcccctgctcccaaactcgccttgcgcgaaaccccggcccctctggccgtaacgtcatccgagccatctactactcctaacaactgggctgacttttcctctacctggcccacctcaaccaatgaaaagcccgagactgacaactgggatgcgtgggccgctcagccctctctcacagtgccaagcgccggacagttacggcagagatcagcattcacccccgcaactgccactggctcatctcctagccccgttctgggccagggggagaaggtagagggcctgcaggcacaggccctgtacccatggcgcgccaaaaaagacaaccacctgaacttcaacaaaaacgatgtaatcaccgtgttagagcagcaggatatgtggtggtttggagaggtacaaggtcaaaagggttggtttccgaagagctatgtgaagctcatcagtggccctatacggaaaagcacaagcatggactcgggcagctccgagtcccctgcaagtctcaagagggtggctagtcccgccgcaaaaccagtggttagcggcgaagaatttatcgcgatgtacacatacgagtctagtgagcagggggaccttactttccagcaaggagacgtaatcctcgtgacaaagaaggacggtgactggtggactggaacagttggtgacaaagcgggcgtgtttcccagcaactacgtgcgcctcaaggattcggaagggtccggaaccgccggaaaaacgggctctttaggaaaaaagccagagatcgcgcaggtgatagcttcctacactgctaccggccccgaacagctcaccctcgcgcctggacagttgattctgattagaaagaaaaaccctggaggttggtgggagggagagcttcaggcccgcgggaaaaagcgccagatcgggtggtttccagctaactatgttaaactgctgtctccaggaacaagcaaaatcacacccacagagcctcccaaatccacggctctggccgctgtctgccaggttatcgggatgtatgattatacagcccaaaatgacgacgagctggctttcaacaagggccagatcatcaatgttttaaacaaggaagatccagactggtggaagggcgaggtcaacggccaggtcggcctgtttcctagcaactacgtcaaactcaccaccgacatggatccctcccagcaatggtgcagtgatctgcacctgcttgatatgctgacacctacagagaggaaacgacaaggatacattcatgagctgatcgtgacagaagagaattacgtgaatgatctccagctcgtcactgagatctttcagaaaccacttatggagagtgagttactgactgagaaagaagttgccatgatatttgtgaattggaaagaactgatcatgtgtaacataaaactgctaaaggcactgagagtgcgcaagaagatgagcggggagaaaatgcccgtgaagatgatcggagacatactaagtgcccagttgccgcatatgcaaccttatatccgtttctgctctagacagctgaatggtgcagcgttgattcagcagaagaccgacgaggcgcccgatttcaaagaattcgtcaagcggctagccatggacccccggtgcaaagggatgcccctgagctcttttatcctaaagccgatgcagcgggtgactaggtaccccttgattattaagaacattctcgagaatacacctgagaaccacccggaccactctcacctgaagcatgcccttgagaaagcagaagaactatgttcgcaagtgaatgaaggggttagggaaaaggaaaacagcgatagacttgagtggattcaagcccacgtgcagtgtgagggtttatccgagcaactcgtcttcaattctgtcactaattgtctgggccccagaaagtttttgcatagtgggaagctgtacaaagcaaagtctaacaaggagctctacggctttctgttcaatgatttcctcctgctgacccaaattaccaaacccctcggtagctcagggaccgacaaggtgttctctcctaagtcaaacctgcagtacaagatgtacaagacgccgatatttttgaatgaggtgttagtaaagctgcctacagaccctagcggagacgagcccatctttcacatttcacacatcgatcgagtttatacgctgcgtgctgaatccatcaacgaacgtaccgcctgggtccagaagataaaagctgcttcagagctgtacatcgaaacagaaaaaaaaaagcgcgaaaaagcctacctggttcggagccagcgtgcaaccggaatcggacgtttaatggtgaacgtggtagagggaatcgagctaaagccttgccgtagtcacggcaagtctaatccctattgcgaggttacaatggggagccagtgtcatattaccaagacaatccaggacacactcaaccctaagtggaactccaactgtcaattttttatcagggatctggagcaagaggttttatgtattactgtatttgagagggatcaatttagtccagacgatttcctgggacgcaccgagatccgagtcgctgacatcaaaaaggaccagggtagcaagggcccagtgacaaagtgcctactgctccatgaggtgcctaccggggaaattgtagttaggttggacctgcagctattcgatgagccatag

SEQ ID NO: 121103 - DNA, 3048 bp, synthetic construct
  misc_feature 1..3048: note = Description of Artificial Sequence: Synthetic coding sequence
  source 1..3048: mol_type = other DNA
atggctcagtttcctaccccattcgggggtagcttggacatatgggctatcaccgtcgaagagcgggccaagcatgatcagcaatttcacagtctcaagccgatttccggtttcataacaggagatcaagctaggaactttttctttcagagcgggttgccccagccggttctagcacagatctgggccctggcagacatgaacaacgatggccgtatggaccaagttgaattctcaatcgctatgaagctgataaagctgaagctccagggataccagcttcctagcgcactgcctccagtaatgaagcagcaaccggtggccatcagttcggcaccggcattcggtatgggtggcatcgccagtatgccccctctgactgccgtggcccccgtgccaatgggtagcatccctgtagtggggatgtcacctacgcttgtgagcagcgtgccgaccgcggccgtgcctcctctcgccaatggagccccccctgtgatccagcctcttcccgctttcgctcatcccgccgcaacactgccaaaaagttcatcctttagtagatccgggcctggctctcagctgaacacaaaactgcagaaggcccagtcttttgatgttgcctccgtgccccccgtcgctgaatgggcagtaccacagtccagccggctgaaatacagacagctgttcaactcgcacgataaaacaatgtccggccatctcaccggtccacaggcccgtacaatcctcatgcagtcctctttgccccaggcccaactggccagcatctggaacctgtctgacatcgaccaggacggcaagctgactgccgaagaattcatattagccatgcatcttattgacgtcgctatgagcggccagcccctccccccagtgctcccacccgagtacatcccaccatcgttcagaagggtccggtcagggtccggcataagcgtgatcagcagcacatccgttgatcaaagactgcccgaggaaccagtgttagaggatgaacagcaacagctggaaaagaagctacccgttacctttgaagataagaagcgggagaattttgaacggggaaatcttgagctcgagaagaggcgacaggctctccttgaacaacagaggaaagagcaggaaaggctggcgcaattggagcgggctgaacaggaacgcaaggagcgagagagacaggaacaggagcggaaacgacagcttgagttggaaaaacagttggagaaacagcgggaactggaacgtcagagggaggaagaaagaaggaaggagattgaaagacgcgaggcagccaaaagagagctggagagacagcgccagttggaatgggaaagaaatagacgtcaggagttgctcaaccagagaaacaaagagcaggaggacatcgtagttctgaaggccaagaaaaaaaccctggaatttgagttggaagcactgaacgacaagaagcatcagctggagggcaaactacaggacattcgttgcaggctgactacccagagacaggagatcgagagtaccaataagtcacgcgagttacgcatcgcagagattacacatctgcagcagcagctacaagagagccagcaaatgctgggacgcctaatcccagagaaacaaatcctgaacgatcagctgaaacaggtgcaacagaactcattgcatagggatagcctagtcacacttaaaagagcactcgaagccaaagagctggcccgacagcatctgagagatcagttagacgaggtggagaaagaaacccgctccaagcttcaggaaatcgatatttttaataaccaactgaaagaattgcgggagatccacaacaaacagcagctgcaaaaacaaaagtctatggaagctgagaggttaaagcagaaagaacaagagcggaagataatcgaactcgagaaacaaaaagaggaggctcagcggcgcgcgcaggaaagggataaacaatggctggaacatgtgcagcaggaggacgagcatcaacgcccaaggaaacttcatgaggaagagaaactcaagcgggaggaaagtgttaaaaaaaaagacggtgaagagaagggcaagcaggaggctcaggacaagctagggcgactgtttcaccagcaccaggaaccagccaagcccgccgtgcaggccccctggagcacagctgagaaaggaccactcaccatctccgctcaggaaaatgtcaaggtggtgtactacagggctctttatcccttcgagtctcgcagccatgatgaaatcactatccagcctggggatatcgtgatggtcgatgagagccaaacgggtgagcctgggtggttaggcggcgaactgaaaggaaagacagggtggttccctgccaattatgccgagaaaatcccagaaaacgaagtgcccgctcctgtgaaacctgtaacagactcaactagtgccccggcccctaagctcgccctccgagaaacccccgccccactcgctgtgacttcaagcgagccctccacgacaccgaataattgggccgatttttcctccacctggccgacttccaccaacgagaagccggaaacggataattgggacgcctgggcagcacagcccagtctcacagtcccctcggccgggcaactgcgccagcggtccgccttcacaccagctaccgccaccggctcctcaccaagccccgttttggggcaaggtgaaaaagtcgaagggcttcaagcccaggccctgtacccatggagggccaagaaggacaaccacctcaacttcaataaaaatgacgtgataaccgtgctggaacagcaggacatgtggtggttcggcgaggtgcagggccagaagggctggttccctaagagctatgtgaagctcatctcggggcccattcgaaagtccacgtcgatggattctggctcctcagagagtccagcatcccttaagcgagtagccagccccgccgcaaaaccagtcgtgtccggagaaggcctgtggaactgctgggagaatcgtgaattcagaaagaagacttag

SEQ ID NO: 121104 - DNA, 3063 bp, synthetic construct
  misc_feature 1..3063: note = Description of Artificial Sequence: Synthetic coding sequence
  source 1..3063: mol_type = other DNA
atggctcaatttcccaccccattcggaggatctctagatatctgggcaataaccgtggaagagcgtgccaaacatgatcaacagttccactctctgaagccgataagcggctttattaccggagatcaggcgcggaatttttttttccagtctggcctcccgcagccagtgctggcgcagatatgggccttggccgacatgaataatgatgggcggatggaccaggttgagttttctattgccatgaaactcattaaacttaaacttcaaggttatcagctgccttctgccctccctcccgtgatgaagcagcagccagtcgccataagcagtgcacctgcctttggcatgggaggtattgcatcaatgcccccactgaccgctgttgcacctgttcccatgggtagcattcctgtggtgggaatgtcgccaactctggtaagctccgtgcctacagccgccgtacccccactggctaatggtgcacctcctgtcattcagccccttcctgccttcgcccaccctgccgccaccttgcctaagtctagttcattcagtagaagcggccccggatcccagctgaatacaaaactgcagaaagctcagagcttcgacgtggcctcagtaccgcccgtagcagaatgggcagtcccccagtcatcccgcttgaaatatcggcagttgttcaacagtcatgataagaccatgtcaggtcaccttactggccctcaggcaaggacgatcctgatgcagagtagcctcccccaggcccagctcgcgagtatttggaatctcagtgatattgaccaggacgggaagctcacggctgaggagtttatcctggccatgcatctgattgatgtggccatgtcaggacagccgcttcctcctgtgctccctcctgagtatatacctccatccttccgtcgggtgcggtcaggctctggcatctctgtgatttcttctacctccgtggatcagaggcttcccgaggagcctgtactggaggatgagcaacagcagttggagaaaaagctccccgtgacgtttgaggacaagaaaagggagaactttgagagagggaatctggaactggagaagaggaggcaagcgcttttagaacagcagcgtaaggaacaagagcgcctggctcagttagagagagcagaacaggagcgtaaagaaagagagaggcaggagcaggagcgaaagaggcagctggaattagaaaagcaactcgagaagcagagagagctggaacgccagagagaagaagaacgaaggaaggagatcgagcggagagaagcagcgaagagagagctggaaaggcaaagacagttagaatgggagcggaatcgcagacaggaattgctgaatcagcgcaacaaagaacaagaggatatagtggtgcttaaggctaagaagaagaccctggagtttgaactggaggcccttaatgacaagaagcaccagttagagggaaagcttcaagacatccgttgcaggctcacaactcaacgccaggaaatagaaagtactaacaaatccagagaactgagaatcgctgaaatcacccatttgcagcagcagttacaggagtctcagcagatgctgggtcggctgatccccgagaagcagattctgaatgatcagctgaagcaggtacagcagaacagcctacaccgcgattctctcgtcaccctgaaaagggcccttgaagcaaaagaattggctcgccagcacttgcgcgatcagctggacgaagtcgagaaagagacccggagcaagctgcaggagatcgacatctttaacaaccagctaaaagagttaagagagattcataacaagcagcagctacagaagcagaagtcaatggaagctgagaggttaaagcagaaagagcaggagaggaaaatcatagaattggagaaacagaaagaggaagcacagcgtcgggcccaagaacgcgacaaacagtggctggagcacgtgcagcaagaggacgagcatcagaggccgagaaaactgcatgaagaggagaagctgaaacgtgaagaaagcgtgaagaagaaggatggtgaggagaagggtaagcaggaggcacaggataagttaggtagactttttcatcagcaccaggaacccgcaaagcccgccgtacaggccccatggagcaccgcagaaaaagggcccctcaccattagcgctcaggagaatgttaaagtggtgtactacagagcactataccccttcgaatcaagaagtcatgatgagatcactatccagcccggcgacattgtcatggtagacgaatcccaaacaggagagcctggatggcttggcggggagctcaagggcaagacaggttggtttcctgcaaactatgctgagaaaatccccgagaacgaggtgcccgccccggtgaaaccagtgacggacagtacgagtgcgcccgctccgaaactggctttacgcgaaaccccggcccccttggcagtgacctcaagcgagccaagcactacacctaataactgggcagatttttcttccacctggcctacctcaacaaacgaaaagccagagactgataattgggacgcttgggcagcccaaccaagcctgacggtaccttcggccggacaactgcggcagcggtcagctttcaccccagccactgcaacggggtcgagtccatccccggtgttgggccagcccgatttccttctgcaccctagcatgcgcttaggccatatgcagccacgtattgttctgctcttccctgatccgctacagtgctccacaagtcgtcttctgcccatgctgcggcccaggccaggcgtgcctttcctccggagtccatcttgccaatcaccaagtcacccatcccgtcccatctctgatgcagcccctagcgtgaagtttaccctcatgccaccagggagaatacatccatgtttcttgtttatcccggccgtgaacagccggaactcattccttgtgtacttcatactgccgggcggtaccctagggtgtttttatctttgcctgccccactatctgtag

SEQ ID NO: 121105 - DNA, 3435 bp, synthetic construct
  misc_feature 1..3435: note = Description of Artificial Sequence: Synthetic coding sequence
  source 1..3435: mol_type = other DNA
atggcacaatttcccacgcccttcggaggcagtttagatatctgggctatcaccgtggaagagagagccaagcatgaccagcagtttcactcactgaagcccataagtggtttcattacaggggatcaggcccgcaactttttctttcagagtggactgccccagcctgtcctggcacagatttgggccttggctgacatgaacaatgacggtcgaatggatcaagtcgagtttagcatcgctatgaaactgatcaaactgaaactgcaaggatatcagctgcctagcgctctaccccctgtaatgaaacagcagcccgtcgctatctcttctgcccccgccttcggcatgggggggattgccagtatgcccccacttaccgccgttgctcctgtgcccatgggatcaatacccgtggtcggtatgtcacctacacttgtgagctcagtcccaaccgccgcagtcccgccccttgccaatggtgccccacccgtgattcagccattgccagcattcgctcacccagctgcaactctaccaaaatcaagtagcttttctcgctcggggcccggcagccagctgaacactaagttgcagaaagctcagtcttttgacgtcgcgtccgtgcctcccgtggctgaatgggccgtccctcagagctccagacttaagtatcggcaattgtttaacagtcatgacaagacgatgtcaggtcacctgactggtccgcaggctaggacaattctaatgcagagcagtctccctcaagcgcagctggcgtccatctggaatctttccgatatagatcaggatgggaagcttacggccgaggagtttatcctggccatgcacctgatcgacgtcgctatgtccgggcagcctctgccccccgtgctcccacccgagtacatcccaccatcatttcgccgagtcagatctggttccggcattagtgtgattagcagcacctccgttgatcagcggcttcctgaggagcctgttctggaagacgaacagcaacagctggaaaaaaaactgcctgtgacatttgaggataagaaacgagaaaatttcgagcgcggcaacctggagctggaaaagagacgtcaagcgctgctggaacagcagcgtaaggagcaggagcgccttgcgcaattagagagagccgagcaggagagaaaagagagggagcgccaggagcaggaaagaaagaggcagctcgagctggaaaaacagctggaaaagcagagagaactcgagcgccagcgggaggaggagagacgtaaggaaattgagcgccgggaggccgccaaaagggagctggagcggcaaaggcagctggagtgggaaaggaacaggcgacaagagctactaaaccaaagaaataaagaacaggaggacatagtcgtgctgaaagccaaaaaaaagaccctggagtttgagttggaggcccttaatgacaagaagcaccagctggaaggcaaattgcaggacataaggtgtcgcttgacaacacaacgccaggaaatcgagagtacaaataagagccgcgagttgcgtatcgcagaaataacccatcttcagcaacagttacaggaatctcagcagatgctaggtcgactgatccctgaaaaacagatcctgaacgaccaactcaagcaggtccagcaaaattctctccacagggactcattggtcacacttaaaagggccctggaggccaaagagctggctcggcagcacctgcgcgaccaattagacgaggttgaaaaggagacgcggagtaagctacaggagattgacatctttaacaaccaacttaaggagcttcgcgaaatccacaacaaacagcagctgcagaagcagaaaagcatggaggcagagcggctcaaacaaaaagagcaggagcggaagatcatagagctggagaaacaaaaggaagaagcccagcgccgcgcacaggaaagagataaacagtggttagaacacgtgcaacaagaggacgaacatcaaagaccccgcaaactgcacgaggaagaaaagcttaagcgggaggagagcgtcaagaagaaagacggggaagaaaagggcaaacaggaggctcaggacaaacttgggcgcctgtttcatcaacaccaggagccggctaagccagccgttcaggccccctggtccactgcagagaaaggcccattaactatctccgcacaggagaacgtcaaggttgtttactatagggccttgtatccctttgagagtagatcccatgatgaaatcaccatccagccaggcgacatcgtcatggtggatgaaagccaaactggtgaaccaggctggcttggcggcgaattaaaaggaaagaccggatggtttcctgctaactacgctgagaaaatcccagagaatgaggtgccggctcccgtaaaacccgtcaccgatagcacctcagcaccagccccaaaactagcactgagagaaacccctgcgcctcttgcagtgacctccagcgagccttctactacacccaataattgggccgacttctcaagcacatggccaacaagtacaaatgagaagcctgagactgacaactgggatgcatgggccgctcagccgtcacttaccgtgccgtcagccggccagctgagacaacgatcagccttcacaccagccactgccaccggttcgtcaccatcacctgtgcttggccagggcgagaaagtggagggactccaggctcaggccctttacccctggagagccaagaaggataaccacctcaattttaacaagaacgatgttattactgtgctggagcagcaggatatgtggtggtttggagaagtgcagggccagaagggctggtttcccaaaagttacgtgaagctgatctctggaccaattcgtaagagcacatccatggattccgggagttccgagagcccagcatccctgaagcgggtcgcctcccccgctgctaagcctgtcgtcagcggtgaggaaatcgcccaggttattgcttcttataccgcaaccggacctgagcaactcaccttggcccctggccagctcatactgattcggaagaaaaacccggggggttggtgggaaggagagctccaggcacggggtaagaagcggcagattggatggttccccgccaattacgtcaaactgttgtcccccgggacatccaagataacgccgactgagcctcccaaatccaccgccttggccgctgtgtgtcaggtgattggtatgtatgattacacagcacagaacgacgacgaattggcatttaacaaaggtcaaattatcaacgtactgaacaaagaagaccctgattggtggaaaggcgaggtcaatggacaggtgggactgtttccttcaaactatgtcaagcttacaaccgatatggacccgtcacagcagtag

SEQ ID NO: 121106 - DNA, 3648 bp, synthetic construct
  misc_feature 1..3648: note = Description of Artificial Sequence: Synthetic coding sequence
  source 1..3648: mol_type = other DNA
atggcccagtttccaaccccatttggggggtccctagatatttgggcaataacagtggaggaacgggccaagcatgaccagcagtttcactccctaaaaccaatttccggttttattacaggagatcaggccaggaatttcttcttccaaagtggcctgccccagccagtgctggcacagatttgggccctcgcagacatgaacaatgacggtaggatggatcaggttgagttctccatcgccatgaagctgatcaaactgaagttgcagggatatcagctgccctctgcactaccccccgtgatgaagcaacagccagtggctatcagctccgcgcccgccttcggcatgggtgggattgcatccatgccaccactgacagctgtggccccagtcccaatggggtctattcccgtggtaggaatgtctcctacgctggtgtcaagtgtgccgaccgccgccgtcccacctctggctaatggcgctccaccagtaatacagcccctcccagctttcgcccaccctgccgccaccctccctaagtcctcctcgttctcgcgtagtggccccggctcacagctaaatacaaagctgcagaaggctcagtcattcgatgtggcttcggtgccacctgtggccgaatgggcggtaccgcagtcgagtagactcaagtacaggcaactgttcaacagccacgataaaacaatgtctgggcacttaactggtcctcaagcacggacaatcctgatgcagagctccctgcctcaggctcagttggcttctatctggaacctgtcagacattgatcaggacggaaagctgaccgcagaagaatttatactggctatgcacctgatcgatgtggctatgtctggacaaccactgccacctgtgctgccgccggagtacattccccccagttttagaagggtcaggtcaggatccgggatctcagtgatttctagcacgtctgtcgaccagcgcctccctgaggagccagttctagaagatgaacagcagcagctggagaaaaaacttcctgtgactttcgaagacaaaaagcgggagaattttgagaggggaaatttggaactcgagaagcggagacaggctcttcttgagcagcaacggaaggaacaagaaagactggcacagctggagagagccgagcaggaaaggaaggagagggagcggcaagagcaggagcgaaaaaggcaactggagctagagaaacagttagagaaacaacgcgaacttgaaagacagagagaggaggagcgtaggaaagaaattgagcgccgtgaagccgcaaagcgggagctggagcgtcagagacaacttgagtgggagcgaaatagacggcaggaactcttgaatcagcgcaataaggagcaggaagacatcgtggtgctgaaagccaagaagaagactctcgagtttgaactggaggcactcaacgataagaaacatcaattggaaggcaagctccaggatatacggtgtcgattgactacacagcggcaggagatcgagtcaactaataaatctagagaactgagaatagcagagataacacacctccagcaacagctccaggagagccagcagatgctcgggagactgatacccgagaagcagatattgaacgatcagctgaagcaggtccagcagaattccctgcaccgggattccttggtgacgctcaaaagagccctggaggccaaggagttagccaggcagcatctccgcgaccagctcgacgaagtcgagaaggagactagatcgaagctgcaggaaattgacatctttaataatcaactgaaggaactccgggaaattcacaacaaacagcagcttcaaaaacagaaatctatggaagccgagaggttgaagcagaaggagcaggaaagaaagatcatcgagcttgaaaagcagaaggaagaggcacagagacgagcgcaggaacgcgacaaacagtggctggagcatgtgcagcaggaggacgagcaccagaggcctcggaaattgcacgaggaagagaagctcaagcgtgaggaatctgtcaaaaagaaagatggagaagaaaaggggaagcaggaagcccaggacaaattgggtcgtcttttccaccagcaccaggagcctgccaaaccagcggtgcaggctccctggtccacagctgagaagggtcccttgacgatttctgcccaagaaaacgttaaggtggtgtactacagagcgctgtatcctttcgagagccggagtcatgatgagattacaatccagcccggtgatatagtgatggtcgatgagagccagacaggggaacccggctggctcggaggtgagctcaagggcaaaaccggatggtttcctgctaactatgccgagaaaatacccgagaatgaggtgccggccccagtgaaacccgtgacggattccaccagcgcacccgcccctaaactagctttgcgcgagactccggcacccctggccgtcacgtcctcagaaccgagtacgacaccaaacaactgggcggacttttcttcaacgtggccgacttctaccaatgaaaagcccgagaccgataactgggacgcatgggcagcacagccttctctgacggtacccagcgcaggccagcttcgccaacgctccgccttcactccagctacagcaacaggaagttcaccatcacctgtccttggccagggagagaaagttgaaggtctccaggcacaggcactatacccatggagagccaaaaaagataaccatttgaactttaacaaaaatgacgtgattactgtgctggaacagcaagatatgtggtggttcggggaggtccaagggcagaaaggatggttcccaaagagctatgttaaactaatatccggccctatcagaaagtctacctccatggactccgggagctccgagtcccccgcaagccttaagcgcgtggcctccccggccgccaagcccgtagtcagcggggaagagttcattgccatgtatacatatgaatcatctgaacagggcgatttgacattccagcagggcgatgtgattctggtaactaagaaagacggggactggtggactggcacagttggagacaaggccggcgttttccctagcaactatgtgagactcaaagactccgagggatcagggaccgctgggaaaaccggatcgcttggtaaaaagcccgagattgcccaggtgattgcatcctataccgcaaccgggccagaacagctcaccctggcgcccggacaactcattcttattaggaaaaagaaccctggcggctggtgggaaggtgagctccaagcgcgcggtaagaaacgtcagatcgggtggtttcctgctaactacgttaaactgttgtccccgggtacgtcaaagataaccccaactgagcccccaaagtctactgctttggccgcagtttgtcaggtgatcggtatgtacgattacactgcacaaaatgacgacgagctggctttcaacaaggggcagataattaatgtgctgaacaaagaggatcctgactggtggaagggggaggtaaatggccaggtggggctgtttccatctaattatgtgaagctcaccaccgacatggacccaagtcagcagtag

SEQ ID NO: 121107 - DNA, 3537 bp, synthetic construct
  misc_feature 1..3537: note = Description of Artificial Sequence: Synthetic coding sequence
  source 1..3537: mol_type = other DNA
atggcccagtttccgactccctttggcggatcactcgacatatgggcaatcacagtggaagaaagggcaaaacatgaccagcagttccacagtctgaaacccatctccggattcattacaggagaccaggcgagaaactttttctttcagtccggcctaccacagccagtgttagctcagatatgggccctggcagacatgaacaacgatggccgtatggaccaggtcgaattcagcattgcgatgaaactgattaaactgaagttgcagggatatcagctgcctagtgccctgcctccagtcatgaagcagcagcccgttgccatctcgagtgcccctgcctttgcagccgtgccacccctcgctaacggcgctccccctgtgattcagccgctcccggcatttgcacacccggccgctacactgccaaagagttcctccttcagtcgctcaggccccgggtctcagctgaacacaaaattacagaaagcgcagtccttcgacgtggcatccgtgccacccgtggccgagtgggccgtgccccagtctagtcgtctcaagtacaggcaactctttaattctcacgataaaacgatgtccgggcatttaacagggccccaagcaagaactatactgatgcagtcttcactgccacaggcccagttggcctccatctggaacctgagcgatatcgatcaggatggtaagttaacagctgaagaattcattcttgccatgcacttgattgatgttgccatgtccggccagccgctacctcctgtgcttcccccagagtacattcctccatccttccgccgagtccggtcgggctctgggatctccgtcatctctagcaccagcgtcgaccaacgactgcctgaggagccagtgctcgaggatgagcaacaacagctggaaaaaaagctgcctgtgacattcgaggataaaaagcgggaaaactttgagagagggaatctggaactcgagaaaaggaggcaggcattactggaacagcagcgaaaggaacaagagcgtctggcgcagcttgagcgagccgagcaggagagaaaggagcgggagaggcaggagcaagagcgcaaaagacagctggagctggagaagcaactcgagaaacagcgagagctcgagaggcagcgcgaggaggaacggagaaaagaaattgagcgacgtgaggctgcgaaaagagagcttgagcgtcagcgccagctggagtgggagcgcaatagaagacaggagctgctgaaccagcggaataaggaacaggaggatatcgtcgtcttgaaagctaagaagaaaacactcgagtttgaactcgaggccctaaatgacaaaaaacaccagcttgagggaaagctccaggatatcaggtgtaggctcactacccagaggcaggaaattgaatctactaacaaatcccgcgaactgcgcattgctgaaatcacacatctacagcaacagttgcaggagtctcagcagatgttaggcaggcttattcctgagaagcagatcttgaacgatcaattaaaacaagtgcagcagaatagcctgcatcgggacagcctagtgacattgaaaagagccctggaagccaaggaactggcacgccagcacctcagggaccagctggatgaggtcgaaaaagagacccgctccaagctccaggagatcgatatttttaacaatcagctgaaagagttgcgtgaaatacacaacaagcaacagttacagaagcagaagtccatggaagcagaaaggcttaagcagaaggagcaggaacgcaagatcattgaactcgaaaaacaaaaggaggaagctcaaagacgggcccaagagagagataaacaatggttggagcacgtgcaacaggaagatgaacatcagagacctcgtaaacttcatgaggaggagaaactgaagagggaagaaagcgtgaaaaagaaggacggagaggaaaagggcaaacaggaagcacaggacaagcttgggcggctttttcaccaacaccaggaacccgccaagcctgccgtacaagccccctggagtactgcagaaaaagggccactgaccatttccgctcaggaaaatgttaaggtcgtgtactaccgcgccttgtacccttttgaatcccggagtcatgatgagataaccatacagccgggcgacatcgtgatggtcgatgagagccagaccggcgaacctggctggctgggcggtgagctgaaaggtaagaccggctggtttcccgcaaattacgctgagaaaataccggagaacgaagtgccagcgcctgtgaaaccagtgacagattccactagtgccccggcgcctaaacttgccttaagggagacccccgcaccactggccgttacctctagcgaacccagtaccacacccaataattgggctgacttcagctcgacatggcctacttctactaatgaaaaacccgaaaccgacaactgggacgcctgggccgctcagccgtcactaactgtgcctagcgctggtcagcttcggcaacggagcgcctttacacccgcaaccgcaaccggctcgtctcctagcccagtgctgggacagggcgaaaaagtggaaggcttacaagcccaagccctgtacccttggcgggccaaaaaggataatcacctgaattttaacaaaaacgatgttatcacagtactggagcagcaggacatgtggtggtttggagaagtccaggggcagaaaggatggtttcccaagtcatatgtgaaactgatcagtggaccaattcgaaagagcacaagtatggatagtgggagttcagaatcccctgcaagtctgaagagagtggcgtccccagcagccaaacccgtggtgagcggggaggaattcatcgctatgtatacctacgagtccagcgagcagggggacctgacttttcagcagggggacgtgattctcgtgacaaagaaggatggcgattggtggactggcactgtgggggacaaggccggcgtgtttccaagtaactatgtgcgcctaaaggactccgaaggaagcgggaccgcaggaaagactgggtcactggggaaaaagcctgagatagctcaagtgatagccagctatacggcaaccgggcccgaacagttgacactggctcccgggcagctgattctgatacggaaaaagaatccaggggggtggtgggaaggcgagctccaggcacgcggcaagaagaggcaaatcggttggtttcccgccaattacgtgaaacttctgagtcctggaacaagtaagattacacccaccgagcctccaaagtctactgctctggccgcagtctgccaagtgatcggtatgtatgactatacagcgcagaacgatgacgaattggcatttaataaaggccagattattaacgtccttaacaaggaagacccagactggtggaagggggaagtcaatgggcaggtgggcttgttcccttcgaattacgttaaactcacaacagatatggacccttcccagcagtag

SEQ ID NO: 121108 - DNA, 3450 bp, synthetic construct
  misc_feature 1..3450: note = Description of Artificial Sequence: Synthetic coding sequence
  source 1..3450: mol_type = other DNA
atggcgcagtttcctaccccgttcggtgggtctctcgatatatgggccattactgttgaagaacgcgcaaaacacgaccagcagttccacagccttaaacccatcagcggctttataacaggtgatcaggctcggaacttcttcttccagagcggcttgccccagcctgtcctcgctcagatctgggctctcgcagacatgaataacgacggacggatggaccaggtcgagttctccattgccatgaagctcataaaattgaaactgcagggttaccaattgccttcagctctgccacccgttatgaagcagcaacctgttgctatttcaagcgcgcccgcattcgggatggggggtatagcatccatgccacccctcactgctgtagccccagtgcctatgggtagtattcctgtggtgggcatgtcaccaacactcgtgagctcggttcccaccgctgccgtcccccccctggcaaacggggccccacccgtcatacagcctctcccagcttttgctcaccctgcagccacgctaccaaagagttcctccttcagtcggtccgggccgggtagtcagctgaatactaagctccagaaggcacagagtttcgatgttgcctcggttccccctgtggccgagtgggccgtaccccagagctcccggctgaaatatcgccagcttttcaattcccacgacaagaccatgtccggtcatctgacaggccctcaagcacggactatccttatgcagtcctcgctgccacaggcacagttggcatctatctggaatctgtctgacatagaccaggacggcaagttaacggctgaggagttcattctggccatgcatctgatagatgtcgcgatgtctggacagccactcccccccgtgttaccaccggaatacatcccaccctccttcagaagggtaagaagcgggtccggaatctcagtcatctcatccacttctgttgaccaacgcctaccagaggagcctgttctggaggatgaacagcagcagctggaaaagaaactgcccgtgacttttgaggataaaaagagagaaaacttcgagcgagggaatctggagctcgaaaagagacgccaggcccttctggagcaacagcgtaaggaacaagagcgtctggcccaactggagcgggccgagcaagagcgaaaagaacgggagagacaggagcaggaaaggaagcggcagctggagttagaaaagcagttggaaaaacagagagagctggaaaggcaacgagaggaagaaaggaggaaagagatcgagaggcgcgaagctgctaaaagagagctggaaagacagagacagctggagtgggagcgcaataggagacaggagcttttgaaccagcggaacaaggagcaggaggacatagttgtgctcaaggccaagaagaagactctggagtttgagctcgaagcactaaatgataagaagcatcagttggagggaaagctacaggacattcgctgcaggttgactactcagaggcaggagatagagtccactaacaagagtagagagctaagaattgcggaaatcactcacctgcagcagcaactccaggagtcgcagcagatgctgggacgattaatcccggagaaacagattttgaacgatcaactcaagcaggttcaacagaatagtctacatagggattccttagtgacactgaagcgcgcactcgaagctaaggaactggcgcggcaacacctgagggaccagctggacgaggtcgagaaggaaacccgatcgaaactccaggagattgatattttcaacaatcaattgaaagaactgagagaaattcacaataagcagcagctccagaagcagaagtccatggaagcggaaaggctgaaacaaaaggagcaggagcgcaaaattatcgagctggagaagcagaaggaggaggcacagcggagagcacaggagcgagacaaacagtggctcgaacacgttcaacaggaggatgagcaccagcgccccagaaagctgcatgaagaagagaaactcaaacgagaggaaagtgtcaaaaaaaaggacggcgaagagaaaggtaaacaggaggcacaagacaaactggggaggttatttcatcagcaccaggaacctgccaagcccgcagttcaggccccttggtcaacagcggagaaaggccctttaaccataagcgcccaagaaaatgtcaaagtagtctattatagggcattgtacccattcgaaagccgtagtcatgacgaaatcacgattcaacccggcgacatcgtgatggtgaaaggggagtgggtggacgagtcgcagactggagaacccggctggctcgggggggaactcaagggcaagactggttggttccccgccaactatgctgaaaagatacccgagaacgaggtgccagcccctgtcaaacccgtgaccgactccacttcggctcctgccccaaagctcgcgcttcgggaaactcccgcccccttggccgttactagtagcgaaccaagcaccacaccaaataactgggctgatttcagctctacctggcccacatctacaaatgaaaagcctgaaaccgacaactgggacgcatgggctgctcagccatccctcaccgtgccctcagctggtcagctgaggcagaggtctgcatttaccccagccaccgccacgggctccagtccttcacccgtcctggggcagggggaaaaggtggaaggccttcaagctcaggccctctatccgtggagagccaagaaggacaaccacctcaactttaacaagaatgatgtgataaccgtcctggaacagcaggacatgtggtggtttggcgaggtacagggccagaaaggttggtttcccaaatcttacgttaaactgattagcggcccaatccgcaagtcgaccagcatggatagtgggagttctgaaagtccagcgtccctcaagagggtagcgagcccagcggccaagcctgtagtttccggagaggagatcgcacaagttatcgcatcttataccgcaaccggcccggaacagctcactctggccccaggtcagctgattctcattcgtaagaagaatccaggggggtggtgggagggcgaactccaagcaaggggcaagaagaggcagatcggatggttccccgccaactacgtgaagctccttagtcctggtacttccaagatcacacccacggagcccccaaagtctacggctctcgctgctgtttgtcaagtgataggaatgtatgattatacggcccagaacgacgacgagctggctttcaacaaagggcagataattaacgtacttaataaggaagatcccgactggtggaaaggagaagtgaatggacaggttggcctctttcctagtaattacgtgaagctcactactgacatggatccctcacagcagtag

SEQ ID NO: 121109 - DNA, 5151 bp, synthetic construct
  misc_feature 1..5151: note = Description of Artificial Sequence: Synthetic coding sequence
  source 1..5151: mol_type = other DNA
atggctcagttcccgacccccttcggaggctcattggacatatgggctattactgtcgaagagcgtgctaagcatgaccagcagtttcacagtctgaaacctatctcgggttttatcacaggtgatcaggcacgaaacttcttctttcagtctggactccctcagcctgtgctggcccagatctgggctcttgccgatatgaacaacgatggaaggatggaccaagtggagttcagtatcgccatgaaactgattaaactcaagttgcaaggatatcagttgccaagtgctttgccccctgttatgaaacaacagcccgtagctattagttctgctcccgcgttcggtatgggcggcatcgcctccatgccaccactgaccgctgttgcaccagtccctatgggttctattcccgtggtcgggatgtctccaacattggtgtccagtgtgcccacagctgccgtacctccactggcaaacggcgccccaccagtgatacagccattgcctgcatttgcgcatcccgctgctaccttgccaaagagttctagttttagtcgttctggaccggggtcccagctgaacacgaaattgcagaaggcccagtcatttgatgtagccagcgttcctcccgttgcagaatgggcagtccctcagagctccaggctgaaataccgccagctgttcaattcccatgataaaacaatgagtggacatctgacagggcctcaggcgcggactatcctcatgcaaagcagcctgcctcaagctcaactcgcctcgatctggaatctgtctgatattgaccaggacggcaaactgactgccgaggaatttatcttggcgatgcatttgattgacgtggccatgagtggacagccacttccacctgtcctgccacccgaatatattcctccctcttttagacgcgtccgtagtggtagtggcatcagcgtgatctcctcaacatccgtggaccagcgtctgcctgaggagccagttctagaggacgaacaacagcaactcgagaagaagcttcccgtcacgtttgaagacaagaagcgggagaactttgagagggggaacctggagctcgagaagagaaggcaggctcttctggaacagcaaaggaaggagcaggaacgccttgcccagctggagcgagctgaacaagaacggaaggagcgtgagcggcaggagcaggaacgaaaaaggcaattggagcttgagaagcaactcgagaagcagagagaactggagcgacagcgcgaggaggaacgaaggaaggaaattgaaagaagagaggccgctaagcgggaattagagagacagagacagttagagtgggagcggaataggaggcaggaactgctaaaccaaagaaacaaggagcaggaggatattgttgttctgaaggccaaaaaaaagactctggaatttgaactggaggctcttaacgacaagaaacatcagctggaagggaaactccaagatatcagatgccgtcttacgacccaacgccaggagattgagtcaacaaataaaagtcgcgaactaagaattgctgaaatcacccacctgcagcagcagctgcaagagagccagcaaatgctcggacgactgattccggagaaacagattctgaatgatcagctgaagcaggtgcagcagaacagcctgcatagggatagccttgtcactctcaagagagcattggaagcgaaggagctcgctcgacagcatttgcgagaccagctggatgaagtcgaaaaggagacgcgctctaaattgcaggaaatcgacatatttaacaaccagttaaaggaactgcgagagatccataataagcagcaacttcagaaacagaaatccatggaggccgaacggctgaagcagaaggaacaggaaaggaagatcattgagctcgagaaacagaaagaggaggctcagagacgggcccaggaaagagataagcagtggcttgagcatgtgcaacaggaagatgagcaccagcggcccagaaagctgcacgaagaggagaagcttaagcgagaggagtctgtcaagaaaaaggacggcgaagaaaagggtaagcaagaggctcaagacaaactgggccgactgttccaccagcaccaggaacctgccaagcccgctgtgcaggctccctggtctactgctgagaaggggcctctgactataagtgcccaagagaatgtcaaggtcgtctactatcgtgcgctgtaccctttcgagtctaggagtcatgatgagatcactatacagccaggggacatcgtgatggttgacgaatctcaaaccggggaacctgggtggcttgggggagaacttaaaggtaagactggatggtttccagcaaattacgccgaaaagatacctgagaatgaagtgcccgccccagtgaagccagtgacagactccacctccgcgcccgcccccaagctagcactcagagagacaccagctcccctggcagtgacttcctcagaaccttccacaacacccaataattgggcagacttctccagcacctggcctactagcactaacgagaagcctgagaccgataactgggatgcctgggcggcccagccctccctaactgtgccgagcgccggacagctcagacaaagatccgcattcactcctgctacagccactggtagctcaccttctccagtgttgggtcagggtgaaaaagtggagggtctgcaggcccaggctttgtacccctggcgtgctaagaaagataaccatttgaactttaataaaaatgatgtaatcactgtcttagagcagcaagatatgtggtggtttggcgaagtgcaaggccaaaaaggatggtttccaaaatcttacgtaaagctcatatctggaccaatccgcaagtctacttcaatggacagcggttcctcggaatcacctgcctccttgaagagggtcgcaagcccagctgcaaagcctgtcgtttctggcgaggagtttattgccatgtatacctatgaatcctctgaacaaggcgatttgacattccagcagggcgatgtaatcctcgtaacgaagaaggatggagactggtggacagggacagtgggcgataaggcgggggtgttcccttccaattacgtgcgcctaaaggatagcgaggggtctggcactgctggcaagacgggaagcctaggtaagaagcccgaaatcgcacaggtgatagccagctataccgccacaggccctgagcaactgaccctggctccgggtcaactcatcctgatccggaaaaagaatcctggcggctggtgggagggggaactccaagccagagggaaaaagcgccagatcgggtggtttcccgctaattatgtgaaattgctgtcacctgggaccagcaagattacccctacagaaccccccaagtctaccgcactggccgctgtctgccaggtcattggcatgtacgattacactgctcagaatgacgatgaactcgcattcaataagggacagattattaacgtccttaacaaggaagatccagactggtggaagggcgaagtcaatggtcaggtgggtttgtttcctagcaattatgtgaaactcacaactgatatggatccgagccaacaatggtgctctgacctgcatctgctggacatgcttactcctactgagaggaagcgacagggatatatacacgagcttatagtaaccgaggaaaattacgtgaatgacctccaattagttactgagatcttccaaaaacccctcatggagtcggagctgcttactgagaaagaggtggctatgatattcgtgaattggaaggagctcattatgtgcaatatcaagttactcaaggcactgcgcgtgaggaaaaagatgtcgggtgaaaagatgccggtaaaaatgatcggcgatatcctgagcgctcagctccctcacatgcagccatatatacgattttgctctcggcagctcaatggtgccgccttgattcagcagaaaaccgacgaagctcctgactttaaagagttcgtaaagagactagctatggatccaagatgtaagggcatgcccctcagttccttcatactaaagcctatgcagcgagtgactagatacccgctgatcatcaagaacatcctcgaaaatacacctgaaaatcaccctgaccacagccatctcaaacacgcccttgaaaaagcagaggaactgtgctcacaagtgaatgaaggtgtgagagagaaggagaatagcgaccgattagaatggattcaagcccacgtccagtgtgaaggacttagcgagcaactagtctttaattctgtgaccaattgtctgggaccacggaaatttcttcattctgggaagttgtacaaggccaaatcgaacaaagaattatatggatttctcttcaatgactttctcctgcttacccaaattaccaagcctctgggctccagcggaacggataaggtatttagcccaaagtccaacctccagtacaagatgtataagacaccaatttttctgaacgaagtgttagtgaaactgcctactgatcctagcggggatgagcctatattccatatctcgcacatcgacagagtgtacacacttcgagcagagtcgattaatgagaggacggcctgggtgcagaaaatcaaggccgcttctgagctctatattgaaaccgagaaaaagaagcgtgaaaaggcttacctggttcgatctcagcgagctacaggcattggacgccttatggtgaatgtggtcgaaggaatcgagttgaaaccctgccggtcccacgggaagtcaaatccctactgcgaagtaacgatgggctcccagtgtcatatcacgaagaccatccaagacacgctcaatcctaaatggaattctaattgtcagttcttcatcagggatctcgaacaggaggtgctctgcatcactgtgtttgaaagggaccagttcagcccagatgatttcttgggcagaactgaaattagggtggctgatattaaaaaggaccagggctccaaaggccctgtgaccaaatgtctgctcctccacgaagtgccaactggcgaaattgtggtgcgcctggacctgcagctgttcgatgagccgtag

SEQ ID NO: 121110 - DNA, 4983 bp, synthetic construct
  misc_feature 1..4983: note = Description of Artificial Sequence: Synthetic coding sequence
  source 1..4983: mol_type = other DNA
atggcgcagttcccgaccccattcgggggatctctggacatttgggctattaccgtggaagaaagggctaaacacgaccaacagtttcacagccttaagcctatttccgggttcattactggagaccaggctcgtaactttttcttccagtccggcttgccacagccggtgcttgctcagatttgggctttagctgatatgaacaatgatggccgcatggaccaggtggagtttagcatcgctatgaagcttatcaagcttaagctccaaggttatcagctgccctcagcactcccgcctgtgatgaagcagcagccggtggcaatcagttcagctccagcatttggaatgggaggaatcgcgtcaatgcctccattgactgcagtcgctcctgtacccatgggatctatccccgtagtcggcatgagtcccacgctcgtctcgagcgttccgacagctgctgtgccacccctggccaatggcgcaccccctgtgatccaacccctgccagcattcgcccacccggcggcaaccttgcccaaatcgtcctctttttccagatctggcccaggatctcaactgaatacaaagcttcaaaaggcccagtctttcgacgtggcctcggtcccgccggtggctgagtgggccgtgccgcagtcatcgcgtctgaagtatcgccaactgtttaactcacacgacaagactatgagcggtcatcttactggcccgcaagctcggactatactgatgcagagctctctccctcaggcacagctggctagtatatggaacctgagtgacattgatcaagacgggaaactcaccgctgaagaatttattctggccatgcatctaatcgacgtagccatgtccggccaacctctgcctcctgtgctgcctcctgaatatatccccccttcattccggcgcgtgcgatcaggaagtggcatcagcgtcatcagcagtacctctgtcgaccagaggttgcccgaagagccagttctggaggatgagcaacagcagttggagaaaaagctccccgtgacctttgaggacaagaaaagggagaattttgaacgcggaaatctcgagttagagaagcgccgccaagcactgttagaacagcagcggaaggagcaggaaagactcgctcagcttgagcgggctgaacaggagcgtaaagagagggagaggcaggagcaagagcgcaagaggcaactggagctcgaaaagcagcttgagaagcagcgcgaactcgaacgacaacgggaggaagaaagacgcaaggaaatagaaagacgggaagcagccaagcgcgagctcgaacgccagcggcagttagagtgggaacggaaccgtcgtcaagagctcctgaatcagcgcaacaaagaacaggaggatatagtagtcctgaaggcaaaaaagaaaaccctggagttcgagctcgaggccctcaatgacaaaaagcaccagcttgaaggcaagctgcaggatatcaggtgccgcctgaccacacagcggcaggagattgagagtactaataagtccagggagctgcggatagcggagattacccatctgcagcaacaactgcaggagagtcagcaaatgctcgggcggttgattcctgaaaagcagatcctgaacgaccagttgaaacaggtgcaacagaacagcctgcacagggactctctcgtcacactgaagcgagccctggaagctaaggagcttgctcggcagcaccttagggaccaactggatgaggtcgagaaagagacaagatctaagctccaggaaattgacatatttaacaatcagctaaaggagttgcgtgaaattcacaacaaacagcagcttcagaaacagaaatccatggaggctgagaggctcaagcagaaggagcaggagcggaagattattgagctggaaaaacagaaagaggaggcacagcgcagggcacaggagcgggacaagcaatggctcgagcacgtgcaacaggaagacgagcatcagagaccccggaaattgcatgaggaagagaagctgaaaagggaagaatccgtcaaaaagaaggacggagaagaaaagggtaagcaggaggcccaagataagctggggcgtctgttccaccagcaccaggaacccgccaagcccgcagtccaggccccatggagcactgccgagaaggggccgctgactatctccgcacaggaaaacgtgaaagtggtgtactatagagcactgtacccattcgagtcccgatctcacgacgagatcactatccagccaggggacattgtgatggtagacgagtcccagaccggagaacctggatggcttggtggagaactgaaggggaaaactgggtggttcccagccaattacgccgagaagatccccgagaatgaggtccccgccccagttaaacccgtcaccgactcgaccagcgctcccgcaccaaaactagcactacgcgagactcctgcgcctctggctgtcacatctagcgagccttcaaccacacccaataattgggcagatttctccagtacatggcccactagtactaatgagaaacccgagaccgacaactgggacgcctgggccgcccagccaagtctgactgtcccttctgctggccagctgaggcagaggagtgccttcacacctgctacggcaaccggaagctctcccagccccgtcctgggccagggcgaaaaagtagaaggccttcaggcccaagccctctatccatggcgggccaagaaggataatcacttgaatttcaataagaacgacgttatcacggtgcttgaacagcaggatatgtggtggtttggcgaggtccagggacagaagggctggtttcccaaaagctatgtcaagctaatatccgggcccatcagaaaaagtacttctatggactcagggtcatcagagagtcccgcctcacttaaacgagtggcttcccccgcagccaaacctgtcgtttctggggaggagtttattgcgatgtatacttacgagagtagtgaacagggagaccttacctttcagcagggagatgtcatcctggtcactaagaaggatggagactggtggactggcacagtgggagataaggcgggcgtattcccttccaactatgtgcggctgaaagatagcgagggttctggtacagccggaaagacaggtagtctgggaaagaaaccggagatcgcacaggtgatcgccagctatacagccaccggaccggaacaacttaccctggcacccggccagctgatacttattagaaaaaaaaatcccggtggctggtgggagggcgagctacaagctcgaggaaagaaacgacagatcggctggtttccagcgaactatgtcaagttattgtccccaggaacaagtaaaatcaccccaaccgagccaccgaagagcacggctctggcagccgtgtgccaagtaataggaatgtacgactatactgcgcagaatgatgacgaactggccttcaataaaggccagattatcaatgtgttgaataaagaggaccccgattggtggaagggagaggttaacggacaggtagggttgtttcccagcaattacgtaaaattaacaactgacatggatcctagccagcaatggtgcagcgaccttcatttgctcgacatgctcacccccacagaacggaagcggcagggatatattcacgaattaattgtcactgaagaaaattacgtgaatgatctccagctggtgaccgagatatttcaaaagcccctgatggagtccgagcttctgactgagaaggaggtggccatgatttttgtgaattggaaggagctcattatgtgtaacatcaagctgctaaaggccttgcgggtacgaaagaagatgagcggcgagaaaatgcccgtcaaaatgattggtgacatcctgtctgctcagctaccccacatgcagccttatatccgattctgctcacgccagctgaacggggctgctttgatccaacaaaagaccgatgaagctcccgattttaaagagttcgtaaagcgactggcaatggatcctcgatgtaaagggatgcctctgtcgtctttcatcctgaaacccatgcagcgcgtcacgcggtacccactgatcattaaaaaccagctcgtattcaattcagtaacaaactgcctcggcccccggaaatttctgcactccggtaaactttacaaggctaagtcaaataaggagctttacgggtttcttttcaacgactttctacttctgactcagatcacgaagcctctcggctcttctggcaccgacaaggtattctctccgaaatccaacctccagtataaaatgtataagacccccatcttcctgaatgaggtcttggtgaagctgccgaccgatcccagcggcgatgagcctatcttccatatttctcacatcgatagagtgtatactctaagggcggaatcaattaacgagcgcaccgcatgggtgcagaaaatcaaggctgcttcagaactctacatcgaaacagaaaagaagaaacgggaaaaggcatatctggttagaagccagcgggcaacggggatcggaaggttgatggttaacgtcgttgagggcatagaacttaagccatgccgatcgcacggtaagagcaatccatattgtgaggtgaccatgggctcacagtgccatattaccaaaactatccaggatacactgaatccgaagtggaatagcaattgtcagttctttatcagggacctggagcaagaggtgctctgcattaccgtgttcgaacgtgatcagtttagtcctgacgactttcttgggcgaacagaaatccgtgtggcagacataaaaaaggatcaaggaagcaaagggccggtgaccaaatgtcttctgctgcacgaagtgccaacaggcgagattgtcgtccgcttggacctacagctttttgacgagccctag

SEQ ID NO: 121111 - DNA, 348 bp, synthetic construct
  misc_feature 1..348: note = Description of Artificial Sequence: Synthetic coding sequence
  source 1..348: mol_type = other DNA
atggcacagttcccaacgccctttggcgggagtctcgacatctgggccatcaccgtagaggaacgagccaagcacgaccagcaatttcactctcttaaacccatatccggcttcatcaccggtgaccaggctcggaattttttttttcagtccggactcccacaacccgtgctggcccagatttgggccctggcggacatgaacaacgatgggaggatggatcaggttgaatttagtatcgccatgaaattaattaaacttaagttgcagggttatcagctgccttccgctctgccgcccgtgatgaagcaacaacctgtcgctattagctctgcccctgccttttag

SEQ ID NO: 121112 - DNA, 237 bp, synthetic construct
  misc_feature 1..237: note = Description of Artificial Sequence: Synthetic coding sequence
  source 1..237: mol_type = other DNA
atggcacagttccctacacctttcggggggagtctggatatctgggctattaccgtggaagaaagggccaagcacgatcagcagttccactctctgaagccaatctccggatttattaccggagaccaggcccggaattttttcttccaaagcggcctgccacagcctgtgttagctcagatctgggcacttgcagacatgaataatgacgggcggatggaccaggtagagttctag

SEQ ID NO: 121113 - DNA, 5094 bp, synthetic construct
  misc_feature 1..5094: note = Description of Artificial Sequence: Synthetic coding sequence
  source 1..5094: mol_type = other DNA
atgatggcccaattccccaccgcaatgaatgggggacctaacatgtgggccattaccagcgaggagaggaccaagcacgacagacagtttgataacctgaagccatccggcgggtatatcacaggcgaccaagctagaaacttctttttgcagtccggcctgcccgccccagttctggccgagatctgggctctctccgaccttaacaaagacggtaaaatggatcaacaggaattcagcatcgccatgaaactgatcaagcttaagctgcaggggcaacagctcccagtagtgcttccgcctattatgaagcagcctcctatgttttctccactcatctcagcccgatttgggatgggctccatgcccaacctgtcgatcccacagccacttcctcctgctgcgcctattacttcactctccagcgccacaagcggaaccaatctgccgcccctaatgatgccgactcccttggtgccaagtgtctcaacctcctcccttccaaatgggactgccagtttaatccagccgctgcccataccatactcctccagcactctgccacacggatctagctactctctgatgatgggcggatttggaggcgcaagcatccaaaaggcccagtcactgatcgatttgggctcctcatctagtacaagctctaccgccagcctctctgggaattctcctaagaccggaaccagtgaatgggccgtgccccagccgactagactaaaatatcgtcagaagttcaacacccttgacaaaagcatgtccggatacttaagcggcttccaggcccggaatgccctccttcagtccaatctgagccagacgcagctcgcaactatatggacactggcagacgtcgatggagatgggcaactcaaagcagaggagtttattcttgcaatgcacctcaccgacatggcaaaggccggacagcccctacccctgacccttccacctgagctcgtgccgcctagttttaggggtggaaagcagatagattcaatcaatgggactctccccagctaccaaaagatgcaagaggaagagccccagaagaagctgccggttacatttgaagataaacggaaagctaattatgaaagagggaacatggagcttgaaaaacgtcggcaggcccttatggaacaacagcagagagaggcagaaaggaaggcacagaaggaaaaggaagaatgggaacggaagcaacgcgaactgcaagaacaggagtggaaaaaacagttggaactcgaaaagagactggagaaacagcgcgaacttgaacgtcagagagaagaggagaggcgcaaagacatcgaaagaagggaggcagcgaagcaggaacttgagaggcagagacgattagaatgggaacgaatccgcagacaggagctgctcaaccagaagaatcgagaacaggaggaaatagttcgtctgaactccaagaaaaaaaacctccacttggagctcgaagctttaaacggaaaacaccagcagatttcagggcgattgcaggatgtgcggctaaaaaagcaaacacaaaagaccgaactcgaggtactggataagcagtgcgacctagagatcatggaaattaagcagctgcaacaggaattgcaggaataccagaacaagttgatttatctcgtgcctgaaaaacaactcctgaatgagaggataaagaatatgcagtttagcaatacgccagactccggcgtgagtcttctgcacaagaagagtctagagaaagaggagttgtgccaaaggctgaaggagcagctggatgcactggagaaggagactgccagcaagctcagcgagatggactcattcaataaccaactgaagtgcgggaacatggatgactccgtcctgcagtgtctcctcagcctcctgagttgcctgaacaacctgttcctacttctgaaggagctgcgggaaacttacaatactcagcagttggccttggagcaactgtacaaaatcaaacgggataagctcaaagaaattgagcggaagcgcctggagctcatgcagaagaaaaagctggaggatgaagcagcccgtaaggccaagcagggcaaggagaatctctggaaggaaaacctgcgaaaggaggaagaggagaagcagaagcgcctacaagaggaaaagacccaggagaagatccaagaagaagaaaggaaggccgaagaaaagcagcgcaaagacaaggacacattaaaagctgaggagaagaaacgtgaaacagcaagcgtcctggtgaattacagggccttatacccattcgaggccaggaaccatgatgagatgtcatttaacagcggggatatcatacaggtggacgagaagaccgttggcgaacccggttggctgtacggaagctttcaggggaattttggttggtttccctgtaactacgtcgagaagatgccaagcagcgagaatgaaaaagcggtgtcccccaaaaaggccctactgccccccaccgtgtcgctgagcgccacctcgacgtcaagcgagcccctgtcttcaaatcagcccgccagtgtcaccgattatcagaacgtctcattctctaacctcaccgtgaacacttcttggcagaagaaatcggcgtttacccgcactgtcagccccggcagtgttagccctatccatggccaggggcaggttgtggagaacttgaaggcccaggccctttgctcttggaccgccaaaaaagataaccatctgaacttctcaaaacacgatattatcaccgtactcgagcagcaggagaattggtggttcggggaggttcatggcggtagggggtggttccccaaaagctacgtgaagattataccaggctccgaggttaagcgagaggaaccagaagccctctacgcagctgtcaacaagaagccgacaagcgccgcctattctgtcggagaggagtacattgccctctatccatactcatccgtagagccgggagatctgacttttaccgaaggtgaggaaattctcgtaacccagaaagatggagagtggtggacagggagcattggggatcgcagcgggatttttccctccaactatgtaaaacccaaggaccaggaaagcttcgggagcgcctccaagagcggggcttcaaacaagaaacctgagatagctcaggtaacctccgcctacgttgccagcggctcagaacaactgtcactcgcccccggccagcttatcctgatcctaaagaaaaatacttccgggtggtggcagggtgagttgcaggcccgggggaaaaaacgccagaagggctggttccctgcctcgcacgtgaagttattagggccatctagtgaaagagcaactccggccttccatccagtctgccaggttattgctatgtatgattacgctgccaataatgaggatgagctctcttttagcaagggccaattaattaacgttatgaacaaagacgaccccgattggtggcagggtgagataaacggtgtcacaggactattccctagcaattacgtcaagatgacaaccgattccgacccaagccagcaatggtgtgcagacttacaaactctagacactatgcagcccattgagcgaaagcggcagggttacattcacgagctgatacagaccgaggaacggtatatggccgatcttcagctggtcgtggaggtgtttcagaaaaggatggccgagagcgggtttctgaccgagggcgagatggcactaatatttgttaactggaaagaacttataatgtccaatacaaaactgctgaaggctctgagagtgaggaaaaaaactggaggcgagaagatgccagtgcagatgattggcgatatcttggctgctgagttgtcccatatgcaggcatatattaggttttgctcttgccagttaaatggagcggcattactccagcagaaaacggacgaggatacagatttcaaggaattcttgaaaaagctagcctctgaccctcgatgcaaaggaatgcctctgtcctcttttctgctcaaacccatgcaaaggattactcgctatcccctactgatacggtctatactggagaacaccccagagtctcatgctgatcattcttccctgaaactggcactagagagggctgaggagctctgttcgcaggtcaatgagggagttcgggagaaagagaacagcgaccgcctcgaatggatccaggctcatgtgcagtgcgaaggactagctgaacagttgattttcaattccctgactaactgtctggggccacggaaattgctgcactccggcaaactgtacaagacaaagagcaacaaagaattacatggattcttgtttaatgattttctgttactgacatatatggtgaaacaattcgccgtgtctagtgggagtgaaaagctgttctctagcaagagcaacgcccagttcaagatgtacaagactcccatattcctgaacgaggtgctcgtgaagctccccactgatcccagcagcgacgagcccgtctttcatatatcccatatcgatcgagtgtatacgttgcggacagacaatattaatgagcgaaccgcgtgggtgcagaagatcaaggcagctagcgaacagtacatcgatacagagaagaagaagagagagaaagcgtatcaggctagatcgcagaaaacctccggcattggacgcttgatggtgcacgttattgaggcaacagagctcaaagcttgtaagcccaacgggaaaagcaacccatactgtgagatcagtatgggtagtcagagttacaccacaagaactatccaggacactttgaacccaaaatggaacttcaactgccagttcttcattaaggatctgtaccaggatgtactgtgtctgacgttgttcgacagggaccagttcagcccagacgacttcctgggccggacggaaatcccggttgccaagattcggacggagcaggaaagcaaggggcctatgactcggagactcctgctgcatgaggtccctactggggaggtctgggtgagatttgacctgcagctgtttgagcagaaaacgcttttgtag

SEQ ID NO: 121114 - DNA, 5013 bp, synthetic construct
  misc_feature 1..5013: note = Description of Artificial Sequence: Synthetic coding sequence
  source 1..5013: mol_type = other DNA
atgatggcccagtttcccaccgcgatgaatggaggtcctaatatgtgggccatcacgagcgaagaacggaccaaacacgatagacagttcgacaacctgaaacccagcggaggatatattaccggcgaccaggccagaaatttctttctgcaaagtggcctccccgcgcccgtgttggccgaaatttgggcattgtccgatctgaacaaagatggcaagatggaccagcaggaattttccattgctatgaaactcatcaagctgaaactgcaggggcagcaattgccggtggtccttccaccgatcatgaagcaacccccgatgttctccccattgatcagcgcgcgctttggaatgggcagcatgccgaatctatcaattccccagcccttgccacctgctgcccccatcacgtctttgagcagtgcaacgtccggaacaaacctgccaccactaatgatgcctaccccgcttgtgccctctgtgagcacatcgtccctgcctaatgggaccgcgagcctgattcagcctctcccaatcccgtatagttcatccacactgccacatggaagttcttacagcttgatgatgggcggattcgggggcgccagcatccagaaggcccagagcctgattgatctgggatcttcctcaagcacatctagtacagcaagcctgagcggtaattctccaaagaccggaacctctgagtgggccgtgccacagccaaccaggctcaaatacaggcagaaatttaacacgcttgataaatcaatgtcggggtatctctctggcttccaggccagaaatgcacttctacagtcaaatttgtcacagacacagttggcgactatttggaccctagctgacgtggatggtgatgggcagctgaaggccgaagagtttatcttggcgatgcaccttacggacatggccaaggcaggccagccactgccactaacactgcccccagagctcgtcccacctagtttcagaggaggcaaacagattgactctatcaatggtacgctgcctagttatcaaaagatgcaggaagaggaacctcagaagaagctacctgtcacctttgaagataagcggaaggctaactacgaacgtggtaatatggagctggagaagcgtaggcaggccctgatggagcagcagcagcgcgaggccgaaaggaaggcgcaaaaggagaaagaagaatgggaacggaaacagcgtgaactgcaagagcaggagtggaagaagcaactggaattggagaagagactagagaaacagcgggagctcgagagacagcgcgaagaagaacgccgcaaggatatcgagcgaagagaggcggccaagcaggagctagagcgccagcggcggctcgagtgggagagaattaggaggcaggaactcctcaaccagaagaatagagagcaggaggaaattgtccggctgaattccaaaaagaagaatctacatctggagctggaggccctgaatgggaaacatcagcagatttccggtcgcctgcaggatgtgaggctgaaaaagcagacccagaaaactgagctggaagtactcgataaacagtgtgatctggagattatggagatcaaacagttgcagcaggagcttcaagagtatcagaacaagctgatctacctcgtgcctgaaaaacagctgctgaatgagcgcatcaagaacatgcagtttagtaatacgcccgactccggcgtttctctgctgcacaaaaagtctctggagaaggaggagctgtgtcaacgccttaaagaacagctcgatgccctagagaaagagaccgcaagcaagctgagtgagatggattcttttaataaccagttgaaagagctgagggaaacctacaacacacaacagctggcactggagcagttatataagattaaaagagataaattaaaggaaatcgaaaggaagcgcctcgaattgatgcagaagaagaaattggaggatgaggccgcacgcaaagctaagcaaggcaaagagaatctgtggaaagaaaacctgcgcaaggaagaggaagaaaaacagaaaagactacaagaggaaaagactcaggaaaaaattcaggaagaggagcgcaaggcagaggaaaaacagcggaaggataaggacaccctgaaggccgaggagaagaaacgcgaaaccgctagtgttctagtgaattatagagccctgtaccctttcgaggcaaggaaccacgatgagatgagttttaactccggtgatatcatccaggtggatgaaaagaccgttggtgaaccgggctggctgtatggctcctttcagggcaactttggatggttcccatgtaactacgtggagaagatgcccagctccgagaacgagaaagccgtgtcccccaaaaaagccctgctgcccccgactgtttccctgtctgccacctcaacgagctctgagccgctttcttccaaccagcctgcaagcgtgacagactaccagaacgtctcttttagcaacctaacggtcaatacatcatggcaaaagaagagcgcatttaccagaaccgtgtctcctggttcagtctcacctatccacgggcagggacaggtagtggaaaatttgaaagcccaggctttatgctcttggacagcgaaaaaagacaaccacctgaacttctccaagcatgatatcatcactgttttggagcagcaggaaaactggtggttcggagaggttcatggcgggcgcggatggttcccaaaatcttacgttaaaattatacccgggtcagaggtcaaacgtgaagagcctgaagccctgtatgccgccgttaataagaagcctacatccgctgcctatagtgttggcgaggaatatattgccctctacccctattcttctgtggagccaggagacttaacttttacagagggggaagaaatactggtgacgcagaaagacggcgaatggtggactggcagtatcggggaccgttctggtatttttccatcgaattacgtcaagcctaaggaccaggagagcttcgggtctgcaagtaaaagcggagcatcgaacaagaagcccgaaatcgcacaggtgacgtctgcttatgttgccagcggaagcgaacagctgtccctggccccaggacaacttatcctgatccttaaaaaaaacactagcgggtggtggcagggggaactccaggctcgaggcaaaaaaaggcagaagggctggtttcctgcttcacacgtaaagctcctcggtccctcaagcgaacgcgcaacacctgcgttccaccccgtttgccaggtcatcgcgatgtacgattacgctgcaaataacgaagacgaactgtctttctccaaaggtcaactcataaacgtgatgaataaggacgatcccgattggtggcaaggtgagattaatggtgttacgggtcttttcccgagcaactacgtgaaaatgactaccgatagcgatccttcccagcaatggtgcgctgatctgcagaccctggatacgatgcagcctattgagaggaagaggcagggttatatacatgagctgatacaaaccgaggagcgctacatggctgatcttcagctcgtggttgaagtattccagaaaagaatggctgagtcaggctttttgactgaaggcgagatggccctcatttttgtgaattggaaggagcttataatgagcaacaccaagctgctcaaggctctgagagtacgtaagaagactggtggcgagaagatgcctgtgcaaatgatcggggatatccttgcggctgagctaagccatatgcaggcttatataagattctgttcctgccagcttaacggggctgccctgctccagcagaagacagatgaagacactgactttaaagagtttctgaaaaaacttgcgtccgacccacgctgtaaaggaatgccactttcttcattcctcctcaagccaatgcaaagaatcacccgctaccccctgctcatacgatcaatcctggagaacacaccagaatcccacgctgaccactccagccttaaactcgcccttgaaagggccgaggagctctgctcccaggtcaatgagggagtccgcgaaaaggagaattcagacagactggaatggattcaagcccatgtccaatgcgaaggcctggctgagcagcttatcttcaattcacttaccaattgcttgggccccagaaagctcctgcattcaggcaagctctacaaaaccaagagtaacaaggaactgcacggattcttgttcaacgactttttgcttctcacctacatggtcaagcagttcgctgtgagctccggcagcgagaaactcttctcgagcaagtctaacgcacagtttaaaatgtataaaaccccaatcttccttaacgaggtgctggttaaattgccgactgaccccagtagcgatgagccagtgtttcacataagccacatcgatcgagtttacaccctgcgcaccgacaatattaatgaaaggacagcctgggtgcagaagattaaggccgcctccgagcagtatattgatactgagaagaagaaacgcgaaaaagcctatcaggccagatcccagaaaacctcagggatcggtagacttatggtgcacgtgattgaagccaccgagctgaaagcgtgcaagccaaacggcaagagcaacccctattgcgagatctccatggggtctcaatcctatactaccagaactatccaggacaccctcaatcccaaatggaatttcaattgtcagttctttatcaaagacttataccaggatgtgctgtgtctcaccttattcgatagagaccagtttagccccgatgattttctgggcagaaccgagatacctgttgcaaaaattcggactgagcaggagtcaaagggacctatgacaaggaggctcttgttgcatgaggttcccaccggcgaagtgtgggtgagattcgaccttcagttgtttgagcagaaaacgttactttag

SEQ ID NO: 121115 - DNA, 5013 bp, synthetic construct
  misc_feature 1..5013: note = Description of Artificial Sequence: Synthetic coding sequence
  source 1..5013: mol_type = other DNA
atgatggcgcaattccctactgcaatgaatggcggccccaacatgtgggccataacctctgaagaacgtacaaaacacgatcgccaatttgataacctcaagccctcaggaggttatataaccggtgatcaggcccggaactttttcctgcaatcaggcttgcctgcgcctgttctggcggaaatctgggctctgagcgaccttaataaagacggcaagatggaccagcaggagttctcgatcgcaatgaagttgataaagctgaagttgcagggacaacagcttcctgtcgtccttccgcctattatgaagcagccgccaatgttcagccccttaatcagtgccaggttcgggatgggatctatgcccaatttgtccataccacagcctctaccaccagccgcccccatcaccagtctgtccagcgcaacaagcggaaccaatctgcccccattgatgatgcccactcctctcgtccctagcgtgtccaccagcagcctgccaaatggcaccgcatctcttattcagcctctgccaatcccgtactcttcaagcacactgccacacggtagctcatatagcctgatgatgggcggctttggcggcgcatccattcagaaggcgcaatctctgatcgacctcggcagcagtagcagcacatccagtacggccagtttatcaggaaattctcccaaaactggcacttccgaatgggctgtgccccaacccacaagactgaagtacagacagaaatttaatactttggacaagtccatgtctggctacctgtccggcttccaggcaaggaacgcacttttgcagagtaacttaagccagacccagctcgccaccatatggactctggcagatgtcgatggggacggccagctcaaggccgaagagtttattcttgccatgcaccttacggatatggccaaggcagggcagcctctccctctcaccttaccacccgaattggtgccaccatcctttcgcggcgggaaacagatcgatagcatcaatggaacactcccatcatatcagaaaatgcaggaggaggaaccacagaagaagctgccagtaacatttgaggacaagaggaaggccaattacgaacggggcaacatggagttggaaaagaggagacaggccttgatggaacagcagcagcgggaggccgaaaggaaagctcagaaagagaaggaggagtgggagagaaagcagcgggaactgcaggaacaggagtggaaaaagcagcttgagctagaaaaacgactggagaagcagagggaactagagagacagcgggaagaagaacggcggaaagatattgaaagaagggaggccgcaaagcaggagctggagaggcagcgtcgactcgagtgggaacgcatccgaagacaggaactgctgaatcaaaaaaatcgggagcaagaggaaatcgtgcggttgaacagtaagaagaaaaatcttcatctggaactagaggcattgaacgggaagcatcagcagatttcgggccgactgcaggatgtccgactgaaaaagcagactcaaaagaccgaactggaagtactggataagcaatgcgatctggagataatggagatcaagcagctccagcaggagttgcaggagtatcaaaataaattaatctacctcgtgccagaaaagcagctgttaaatgaacgtataaagaacatgcagtttagcaacaccccagattcgggagtgtctcttctccacaaaaaatctctggagaaagaggagctgtgccaacggctgaaagaacagctcgacgccttagagaaggagacagcctcgaagctgagtgaaatggattcctttaataaccagctaaaggaattgcgcgagacttacaatacacagcaactggccctagaacagctgtacaagattaagcgcgataaacttaaagagattgaacggaagcgtttggaactaatgcagaaaaagaagttagaggacgaagctgctcggaaggccaagcagggtaaggaaaacttgtggaaagagaacctgcgcaaggaggaggaggagaagcaaaaaaggctgcaggaggagaagacacaggagaaaatccaagaagaggagcgtaaggctgaggaaaagcagcggaaagataaggacactttgaaagccgaggaaaaaaaaagggagacggcgtctgtcctcgtaaattatagagcattatatccattcgaggcgcgcaatcatgatgagatgtcatttaattcgggcgatatcattcaggtggatgagaaaaccgttggtgagccaggctggctgtatggtagctttcaaggaaactttgggtggtttccctgcaattacgttgaaaagatgccctcctccgagaatgagaaggctgtgagccctaaaaaggctttgctcccccctacggtgtctttatcagccacctcgacttcatcagagcccctgagttccaaccagcccgctagcgtcaccgactatcagaatgtgagcttcagcaatttaacagtgaacacttcttggcagaagaagtccgcattcacccgcacggtgtctcccggatccgtttccccaattcacggccaaggtcaggttgtagagaacctgaaggcgcaggccctttgctcctggactgcaaaaaaagataaccatttaaacttttcaaaacatgatataattaccgtgctcgagcaacaagaaaattggtggtttggtgaggtgcacggcggacggggctggttcccaaaatcttatgtgaagataatccccggatctgaggttaaaagggaggaaccagaagccttgtatgcggctgtgaataagaagccaactagcgctgcctatagtgtgggcgaggagtacatcgcactatatccctacagttctgtagagccgggcgatcttacatttaccgagggggaagagatactcgtcactcaaaaggatggtgaatggtggacaggaagtataggcgacaggtcaggaatttttccaagcaattacgtcaagcccaaagatcaggagtcattcggctccgcctctaagtctggggcatctaataagaagccagaaatagcccaggttacttcagcctacgtagctagcgggtcggagcagctctctctggcccctggccagttgattttaatcttgaagaaaaacaccagcgggtggtggcagggggagctccaggccagaggcaaaaagcggcaaaaggggtggttccccgcatcccacgttaagctcctgggcccatcttccgaaagagctacccccgcctttcacccagtgtgccaagttatagcgatgtacgactatgccgccaacaacgaggatgagctcagcttctccaaaggccagttaatcaatgtgatgaataaggacgatccagactggtggcagggggagattaatggcgtgacagggctctttccttcaaattatgtgaaaatgaccacagactcggaccctagtcagcaatggtgtgcagatttgcagactttggatacaatgcagccaatcgagaggaaacggcaggggtatatacacgaattgattcaaactgaggaaagatacatggccgacctacagctggtcgtcgaagtctttcaaaaacggatggcggaatcaggatttctgaccgagggcgagatggccctgatctttgtgaactggaaagaactcatcatgagcaacacaaagcttttgaaggcactacgggtgaggaagaaaaccggcggagaaaaaatgccagtgcagatgatcggagatattctggccgctgagctgtcccacatgcaggcctacatccggttctgctcttgtcaacttaatggagccgcactgttgcagcagaagacggacgaggatacggactttaaggagtttctcaaaaaactggcctccgacccccggtgcaaaggaatgcctctgagctccttcctgcttaagccgatgcaaaggatcacccggtatcccttactgatccggtctattctagaaaatacacctgagtcgcatgctgaccattcttccctgaagcttgcactggagcgagccgaggagctgtgtagccaggtcaatgaaggtgtgcgcgaaaaggagaactctgacagactcgaatggatccaggcccacgtgcagtgtgaggggctagcagaacaattgatatttaacagcctgaccaactgcctaggcccaaggaagctgttacacagcggaaagttatacaaaacgaagtctaataaagagcttcacgggtttcttttcaatgactttctactcctgacctacatggtaaaacaattcgctgtgtcctcagggagcgaaaagctgttctcatccaaatccaatgcccagtttaagatgtataagacacctattttcctgaatgaggtgctcgtgaagctgcccaccgacccctcgtcggatgaacctgtctttcatatttcacatatcgacagggtgtacacactgagaacggacaacatcaacgaaaggacagcttgggtccagaagatcaaggcagcctccgagcagtatattgacaccgagaaaaagaagagggagaaggcataccaggcacggtcccagaagacctccggcattggtcgactgatggtccatgtcattgaggccacagagttgaaagcatgtaagcctaacgggaagagcaatccttactgtgaaatttcaatggggtcccaatcatatacaacgcgcaccatccaggacacgcttaatcccaaatggaactttaattgtcaatttttcattaaggacctgtaccaggacgtcttatgtctcactttgtttgacagagaccagtttagtccagatgacttccttggaaggacagaaattccggtcgctaaaatccggaccgagcaagaatccaagggcccaatgactcgccggctgctcctccacgaggtccctacgggtgaagtgtgggtccgatttgacttgcagttatttgaacagaagaccctattgtag

SEQ ID NO: 121116 - DNA, 1836 bp, synthetic construct
  misc_feature 1..1836: note = Description of Artificial Sequence: Synthetic coding sequence
  source 1..1836: mol_type = other DNA
atggcacagtttcctaccgccatgaatgggggacctaacatgtgggccattaccagcgaggagaggacaaaacacgaccggcagttcgataacctcaagccctcagggggatacataacgggggaccaggcccgaaatttcttcctgcaaagcggtttgccagcgccagttctcgctgagatatgggcactcagtgacttgaataaggatgggaagatggatcagcaggaattcagcatcgcaatgaagctgattaagctgaagctgcagggtcagcagctgcccgtggtacttccgcctatcatgaaacagccacccatgttttcccctctgattagtgccagattcggcatgggcagcatgccaaacctgtctattccccagccactgcctccagctgcaccgatcacaagcctgtccagcgcaacttctgggacgaatctgcccccattgatgatgcccacaccattagttcccagcgtcagcacttccagcctgcctaatggcacagcttctctaattcagcctcttcccatcccctactcttcatcaaccttgccccatggcagttcctacagtttaatgatgggagggttcggaggcgcaagcatccagaaggcacagagcctgatcgacctcggtagcagtagaagctggagctcaggctcttctgcccacagccccgccacccaccgcgcccccctgtccagcccagtgcctaactcctctacttccagtacagcgtccctaagtgggaactctccaaaaactgggacaagcgagtgggcagtaccccagcccacaaggctgaagtaccggcagaaatttaatactttggataaatccatgtccggttacctgtctggattccaggctagaaatgccctcttgcaatcgaatctgtcccagactcaactggcgactatttggacactcgcagatgtagacggggatggccagcttaaggcagaagagtttatcctggctatgcatctgactgatatggctaaagcggggcagccacttccgctgacactgcctccggagctggtgcctccctccttccgggggggaaagcagatcgactctattaatgggaccctcccctcatatcagaagatgcaagaagaagaaccccagaaaaaacttcccgtgaccttcgaagacaagagaaaagctaactatgaaagaggcaacatggaactcgagaaacggagacaggctctcatggaacagcagcagcgcgaggccgaaagaaaggctcagaaggagaaagaagagtgggaacgaaaacagcgagaactacaggagcaggaatggaagaagcagttggaactggagaaaaggcttgaaaagcagcgggaactggagagacagagggaggaagagcgccgtaaagacatcgagcggagggaagcagccaaacaagaactggaacggcagagaaggctcgagtgggaaaggatacgccggcaggagctgctcaatcagaagaatcgggagcaggaggaaattgtgcggcttaatagtaaaaaaaaaaatctccatctggagctcgaagctctaaacggcaagcaccagcagataagcggccgactgcaggacgtgcgactgaagaagcaaacgcaaaagactgaacttgaggtactagataagcaatgcgatttggaaatcatggagatcaagcaactgcagcaggagttgcaggagtatcagaacaaattgatctatttggttcctgaaaagcagctgcttaatgaaaggataaaaaatatgcaattcagcaatacccccgactctggagttagcttactgcacaagaagagcctcgaatag

SEQ ID NO: 121117 - DNA, 3750 bp, synthetic construct
  misc_feature 1..3750: note = Description of Artificial Sequence: Synthetic coding sequence
  source 1..3750: mol_type = other DNA
atgatggctcagtttcctactgccatgaacggaggaccgaatatgtgggcaattacatcagaagagaggacaaagcacgaccgccagtttgataacttaaaaccaagtggcgggtatatcactggagaccaggcgcgcaatttctttcttcagagtgggcttcccgcccctgtgctggctgaaatttgggctctcagcgacctgaataaagacggtaaaatggaccagcaagagttcagcatcgcgatgaaactcatcaaattgaaactacagggacagcagttgccggtcgtgctgccacctattatgaagcaacctcccatgttttccccactgatcagcgcccgcttcggcatggggagcatgcccaatctctcaatcccgcagcctctgccccctgcagccccaatcacttccctctcatctgctacctccggcacaaacctgccacctttaatgatgcccactccactggtccctagtgtgtcaacgagcagcttacccaacgggacggcttcacttatacaacctctgcccatcccatatagtagttccacgcttcctcacggttcttcatatagcctcatgatgggcgggtttgggggcgcttccatccagaaagcccagtctctcatcgaccttggatcaagttccagcactagctcaacagctagcttaagtgggaatagcccaaaaactgggacatctgagtgggccgtgccacagcccacccgactgaaatacagacagaaatttaacactctggacaaaagcatgtccggctatctctctggcttccaagcccgcaacgcacttctccagagcaacctaagtcagacacagttggcaaccatctggaccctggccgatgtggacggggatgggcagttaaaagccgaggaatttatcctggccatgcatctgacggatatggccaaggctggacagccgctgccccttacactgccacctgaactcgtgcctccatcatttaggggaggcaagcaaatcgattccattaatggcactttaccaagttatcagaagatgcaggaagaggagccacaaaagaaactcccagtgacttttgaagataagagaaaggccaactatgagaggggcaatatggaacttgagaaacgccgccaggctctcatggagcaacaacagagagaggccgagcgcaaggctcagaaagaaaaagaggagtgggaacgcaagcagcgtgaactgcaggagcaggagtggaaaaagcagctggagttagagaaacgtttagaaaagcagagggaactggagaggcagcgtgaggaggagcgacggaaggacattgagaggcgggaggccgccaagcaggagctggaaaggcagagaaggctcgagtgggagaggatccggcgacaggagctgctcaaccagaaaaatcgggaacaagaagaaatcgtacggttgaactcaaagaaaaaaaacttgcatctggagttagaagccctgaacggtaaacaccagcaaatcagcggaagactccaggacgtcaggcttaagaagcaaacacagaaaactgaactagaagtgcttgataagcagtgcgatctggaaatcatggagataaagcagctgcagcaggaacttcaagaataccaaaataaactgatttatttagtgcctgaaaagcagctcctcaatgaaaggatcaagaacatgcaattttcaaatacccctgactctggcgtctccctccttcacaagaagtctcttgagaaagaggagctctgtcaacggctgaaagagcagctggatgctctcgagaaggagacggcatccaagctttccgagatggactccttcaataatcagctgaaatgcggcaatatggatgattctgtgttacaatgtctgttgagtctgctgagttgtctaaataatttattccttctgctgaaggagctgagggagacatataacacccaacagttggctctggagcaattgtataaaatcaagagagataagctgaaagagatcgagaggaaaaggctggaactcatgcaaaaaaaaaaactggaagatgaggccgcaaggaaggctaaacagggaaaggaaaatctctggaaggagaatctgagaaaagaagaagaagagaagcagaagcgcctccaggaggaaaaaactcaggagaagatccaggaggaagagaggaaagcagaagagaagcagagaaaggacaaagataccctgaaagcggaggagaaaaagcgcgagaccgcctccgtgctggttaactaccgggccctgtacccatttgaagctcgcaatcatgatgagatgagcttcaactcaggagacattatccaagtggacgagaaaacagtgggggaacctgggtggctctatggatccttccaaggcaatttcgggtggttcccatgcaattatgtggagaagatgcctagctctgagaatgagaaggccgtttcccccaaaaaggcgctgctgccgccaacagtgagtcttagcgcaacaagtaccagctcggaacccttgtcatccaaccagccggctagtgtgacggattatcagaatgtttccttctctaatctgacagtcaatacgagctggcagaagaaaagcgcctttacccgtacggtgtcgcctggaagcgtgagtcctatccacggacaggggcaggttgttgagaatctgaaagcccaggcactttgcagctggacagccaaaaaagacaaccacctgaacttctcgaaacacgatatcattaccgtgctggaacagcaagagaattggtggttcggcgaggttcatggtggacgcggatggttccccaagtcgtatgttaagattatccctgggagcgaggttaagcgggaggagccagaagctctatacgccgcagttaacaaaaagccaacatcagcggcctattcggtcggcgaggaatatatcgctctgtatccctactctagcgtggaaccgggagacctcacgttcaccgagggcgaggagatccttgttacccagaaagatggagaatggtggaccggatctatcggagatagaagcggaatctttcccagcaactatgtcaagcctaaagatcaagaatcgtttggcagcgcttctaagagcggggccagtaataagaaacccgaaattgcccaggtgacgagtgcctacgttgcaagcggatcagaacagctatctttagctccaggacaactgattctcattctgaaaaaaaacactagcggatggtggcagggagagctgcaagcccgggggaagaagaggcaaaagggctggttcccagcaagccatgtgaagctactgggaccttctagtgagcgggccacaccagcgtttcacccggtttgccaggttatcgctatgtatgattacgcagcaaacaacgaggacgagctcagcttttccaagggccagctgatcaatgtgatgaacaaggacgaccctgattggtggcagggagagatcaacggcgtgaccggcttgttcccctcaaattacgttaagatgacaaccgacagtgacccctcccagcagtggtgtgctgatctgcagacactggacaccatgcaacccatagaacggaagaggcaggggtatatacatgagttgatacaaacagaggagcgctacatggccgacttgcaactggtggtggaagtgcgccggttgcttcttgcatcctcccgaggcatttgttgtctcagctag

SEQ ID NO: 121118 - DNA, 1899 bp, synthetic construct
  misc_feature 1..1899: note = Description of Artificial Sequence: Synthetic coding sequence
  source 1..1899: mol_type = other DNA
atgaacagatatacaactattcggcaattgggagatgggacctacggatctgtcctccttgggaggtctatcgagtctggtgagctgatcgcaatcaagaagatgaagcgaaaattttatagctgggaggagtgcatgaacctgagggaggtcaagtcactgaaaaagttgaaccatgcaaacgttgtgaagctgaaggaagtgatcagagagaacgaccatctttactttatttttgagtacatgaaagagaatctgtaccagctcataaaagagcggaataaactctttcctgagtcagcaattcgcaatataatgtatcagattttgcaagggttggccttcatccataagcacggcttctttcacagggatctcaaacctgagaacttgttgtgtatgggacctgagctcgttaaaattgccgatttcgggctggctcgcgagatcaggagcaaaccaccgtacactgactatgtctcaacaagatggtatcgggcaccggaggtactactgcgcagtacgaattattccagcccaattgatgtgtgggccgtgggttgtattatggctgaggtttatactctgcgcccactgttccctggggcctccgaaatcgataccatttttaagatctgtcaagtcctggggacccccaagaagacggactggcccgaggggtaccagctcagttctgctatgaattttcgctggcctcagtgcgtgccaaataacttaaaaactctcatacctaacgcctcatccgaggcagtgcagctcttacgggatatgctacagtgggatcccaagaagagaccaacagcctctcaagcgctgcgttacccatatttccaagttggccaccctctggggtccacgacacagaacctgcaggatagcgagaaaccccaaaaagggattctggaaaaggctgggcctcccccgtacataaagcctgtgcctccggcgcagccacccgcaaagcctcacacaagaatttctagccggcagcaccaagcaagtcagcctcccctccacctcacatacccctacaaagctgaggtcagtcgcacagatcacccttcacacctacaggaagacaagcctagccccttactttttccatctcttcacaacaaacacccgcagagcaagatcacagctgggctggaacacaaaaacggggaaatcaagccaaagagcaggagacgatggggcttgatatccagaagcaccaaggactctgatgattgggccgacttggacgacctggatttttcaccctcactctcccgcatagatcttaagaacaagaagcgccagtctgacgatacgctgtgtcgtttcgagagtgttctggacctgaaacccagcgagcctgtcggtactggaaacagcgctccaacccagacgtcctatcagcgccgcgacacaccaacccttaggagtgctgccaagcagcactacctaaaacactcccgctatctgcccggcatatccatacgtaatgggatactctccaaccctggcaaagagttcattcctcctaacccttggtcttcctctgggcttagcggcaagtcaagcgggaccatgagcgtcattagcaaggtcaactccgtcgggtcgtcatctacaagctcctcaggtctgaccggaaattacgtgcctagctttcttaaaaaggagatcgggagcgctatgcaacgcgtccacctggcaccgattcccgacccgtctcccggctactcatctttgaaggctatgcggccacatccgggaaggcccttttttcatacgcagccccggtctacgcctggtttgataccccgaccacctgctgcacagccagttcatggaagaaccgattgggcaagcaagtacgcttcccgacgctag

SEQ ID NO: 121119 - DNA, 1899 bp, synthetic construct
  misc_feature 1..1899: note = Description of Artificial Sequence: Synthetic coding sequence
  source 1..1899: mol_type = other DNA
atgaacagatatactaccatccggcagttgggcgatggcacctatggctcggtgctgctgggccggagtatagaaagtggcgaacttattgccatcaaaaagatgaaacggaagttttacagctgggaagagtgtatgaacctgagagaagtgaaaagcctgaagaagttgaatcacgccaatgtggtcaaactcaaggaagtcatcagagaaaatgaccacctctattttatcttcgagtacatgaaagaaaatctgtaccagctgatcaaggagagaaataagctgtttcctgagtctgccatccgcaacatcatgtaccaaatcttacaagggctggccttcatccacaagcatggctttttccatcgcgacctgaagccagaaaatttattatgcatgggacctgaactcgtgaagattgcagattttggcctggcgcgtgaaatacgctcgaagcccccgtatactgactatgtatctacgcgctggtaccgggcccccgaggtactgctgcggagtactaattactcatcccccatcgatgtatgggctgtcggctgcataatggctgaagtatacaccttaaggcctctcttccctggagcttcggaaattgacaccatctttaagatttgtcaggtcctaggcacgcccaaaaagacagattggcccgaaggctatcaactgtccagcgctatgaactttagatggcctcagtgtgtccctaacaatcttaaaaccctcatccccaacgcaagcagcgaggccgttcagttactgagagatatgctacaatgggatccaaagaagagaccaactgcgtcacaggcactgagatacccatatttccaggttggccaccctctgggttccaccacacaaaaccttcaggacagtgagaaaccccaaaagggcatcctcgagaaagctggcccacccccttacattaagccagtgcctcctgcacagccgccagccaaacctcatacccgtataagttcccgccagcatcaggccagccagccacccttgcatctaacatacccctataaagcagaggtcagccgaaccgatcatcctagccacctgcaggaagataagccgagccccttgcttttccctagcctccacaacaaacaccctcagtctaagattactgccgggcttgagcacaaaaatggtgagatcaagcccaagtccaggcgccgttggggcctgatctctagaagcacgaaggacagcgatgactgggcagacctcgacgacttagacttctcccctagtctttctagaatcgacttaaagaacaagaagaggcagagcgacgacactctgtgtcggtttgagtctgtgctcgacctgaaaccatccgaacctgtcggaaccggcaatagtgcccccacccagacgtcatatcaaagaagggacacgcccaccttaagaagcgcagctaagcagcactacttaaagcacagcaggtatctgccaggcatttcgatacgaaacgggatactgtccaatcctggaaaagaattcatccctcctaatccctggtcaagctccggcctgtcaggaaagagcagcggcacgatgagcgtcataagcaaagtgaacagcgttggcagtagctcaaccagttcctcagggttaactggcaattacgtccctagtttcctcaaaaaagagataggaagtgctatgcagagggtgcacctcgctcctatccccgacccttccccaggctattcatcactgaaggcaatgaggcctcaccctggcaggccgttcttccacacccagcctagatctactcctggtctgattcccaggcctccagctgctcagccagtacacggtcgaaccgactgggcctcgaagtacgcctcccggcggtag

SEQ ID NO: 121120 - DNA, 738 bp, synthetic construct
  misc_feature 1..738: note = Description of Artificial Sequence: Synthetic coding sequence
  source 1..738: mol_type = other DNA
atgtgtgccgaggtcggcccagccctgtgcagaggcatggaacgtaattctctgggctgctgtgaggccccaaaaaaactttctctgagtttttctatagaggccatcctgaaacggccagctcgaagaagcgatatggatcgacccgaaggccctggagaagaaggacctggtgaggcagcagcctctgggagcggcttagagaagccaccaaaggatcaaccacaggaagggcgcaaatcaaagaggcgcgtccgaaccacattcactactgagcagctccacgaactcgagaagatcttccatttcacccattacccagatgtacacatcagaagccagctggcagcccgcatcaatttgcctgaggcccgagtgcaaatttggttccagaaccagcgcgccaagtggcgaaagcaggagaagatcggcaatctaggcgccccgcaacagctgtctgaggcttcagtagcccttccaacaaacctagacgtcgccggacccacctggacctctactgctctgcgacgactcgctccccctacatcatgctgcccatccgcacaggaccagcttgcttcagcttggtttccggcatggataacactactgccagcacatccctgggagacccagcccgttcctgggctgcccattcatcagacctgcatccctgtcctttgtatcctgccacccccacacccaaagtgggggtctatctgcgctacatccacgtag

SEQ ID NO: 121121 - DNA, 738 bp, synthetic construct
  misc_feature 1..738: note = Description of Artificial Sequence: Synthetic coding sequence
  source 1..738: mol_type = other DNA
atgtgtgccgaagtcggccccgcattgtgccgcgggatggagcgtaactcactggggtgctgcgaagcacccaaaaaactatccctgtctttcagcattgaagctattctcaagcgcccagccagacgatctgacatggataggccagaggggcccggagaggaaggccccggtgaggctgctgctagcggatctgggctagagaagcctcctaaggatcagccccaggagggacgtaaaagcaagcgccgagtcagaactacctttacaactgagcagcttcacgaactggaaaaaatattccactttacccactatcccgacgtgcacattaggagccagctcgctgcgcgaataaatctgcccgaggcgcgggtacagatctggttccagaatcagagggccaaatggcggaaacaggagaaaatcggcaatctgggggcgccccaacagctgtcagaggcaagtgtggctctccctaccaacctggacgtagccggccccacatggacctcgacggccctgcggagactggccccgcccacatcgtgctgcccctctgcccaggatcagttagcctccgcatggttcccggcttggatcactctgctacccgcccatccctgggaaacccaaccagttcctggcctgcctatccatcaaacttgcatccctgtgctgtgcatcttacctccaccacacccaaagtggggcagtatatgcgcaacttcaacctag

SEQ ID NO: 121122 - DNA, 1749 bp, synthetic construct
  misc_feature 1..1749: note = Description of Artificial Sequence: Synthetic coding sequence
  source 1..1749: mol_type = other DNA
atggctaacgaggactgtcctaaggcagctgatagccctttttccagcgacaaacatgcccaactgattctggcacagattaacaagatgaggaatgggcagcacttctgcgacgtccagttacaggtggggcaagagtctttcaaagctcaccggctggtgctggcggcctcctccccgtatttcgccgccctgtttaccggaggtatgaaagagtccagcaaggatgtggtcccgatcctgggtatcgaggccgggattttccagatcttgctagattttatatacaccggcatagtcaatatcggagtgaataacgtgcaagagctaatcatagcggccgacatgttgcagctgacagaggtcgtgcatctgtgttgcgagttcctaaaggggcagatcgaccctcttaactgcattgggatctttcaattttccgagcagattgcatgccacgacttgctcgaatttagtgagaactatatccacgtccactttctcgaagtgcatagcggtgaagagttcctggccctgactaaagatcagctgataaaaattttgagatcagaggagctatctatcgaggacgagtaccaggtgtttctagcagccatgcagtggattctgaaagaccttggcaaaagaagaaagcatgtggtcgaggtacttgatccaattaggtttcccctgctgccgccgcaaaggctgctgaagtacattgagggcgtctctgacttcaatctgagagtagcccttcagacactccttaaggagtattgtgaggtttgtaagagtccaaaagagaataagttttgttccttcctacagacctccaaagtccgccctcgtaaaaaagccaggaaatacttatacgcggtcgggggctacacccggctccaggggggccgttggagcgactccagagctctgtcttgcgtcgagagattcgatacttttagccaatactggaccacagtcagttccctgcatcaggcccgatccggtctgggcgttactgtactcggaggtatggtgtacgccatcgggggggagaaagattcaatgatatttgactgtacagagtgttacgatccggtgaccaagcaatggactactgtggccagtatgaaccatccccggtgcggactcggcgtgtgcgtgtgttacggagccatctacgcccttggagggtgggtaggcgcagagattgggaacaccattgagagattcgatccggatgaaaataagtgggaagtcgtgggtaacatggctgtaagccgatattacttcggctgctgtgaaatgcaagggctgatttatgtaatcggcgggatcagcaatgaggggatcgagctgcgaagctttgaggtctatgatccactcagcaagcggtggtcccctctaccaccaatgggtacccgccgcgcatacctgggcgtagctgctctgaacgactgcatctactcagtagggggctggaatgagacacaagatgcactgcacacagtagagaagtactccttcgaggaggaaaagtgggtggaagttgccagcatgaaggtgccacgggccggaatgtgcgtggtagccgtgaacggactgctgtatgtcagcggcggcaggagttcgagccatgactttctggctcctgacactcaccggtacgaggtattcagacttaaatgggaaaacatgtgtatcctgtttaacgatcataagaccctcacaaaaggaatttttaacctctag

SEQ ID NO: 121123 - DNA, 1755 bp, synthetic construct
  misc_feature 1..1755: note = Description of Artificial Sequence: Synthetic coding sequence
  source 1..1755: mol_type = other DNA
atggccaatgaggactgccctaaagccgctgattctcctttcagttccgacaagcacgcgcaactgattctagcccagatcaataagatgcgaaatggccagcacttctgcgacgtccagctccaagtcggccaggagtctttcaaggctcaccggctagtcttagcagcatcgtcaccttatttcgccgctctttttacaggcggtatgaaagagtccagcaaggatgtcgttcctatcctaggcatagaggctgggatctttcagatattgcttgatttcatttacactgggattgttaatattggcgtgaacaacgttcaggaactcatcattgcggcggatatgctgcagctcactgaggtggttcacctctgctgtgaatttttgaaaggccagattgaccctctgaattgtatagggattttccagttttctgaacaaattgcctgtcacgatctccttgaattctctgaaaactatatccacgtgcattttctggaggtccacagtggagaggagtttctggcccttacaaaagatcaattaattaaaatcctgcggtcagaggagctctcaattgaagacgagtaccaggtgttcttagcggccatgcagtggatcctgaaagacctcggcaaacggcgaaagcacgtcgtggaggtgctggacccaattcgattccccctattgcctcctcaacggctcctgaaatatatcgaaggggtttcagactttaacttaagagttgccctgcaaaccctactcaaggaatattgcgaagtttgtaagagtcctaaagaaaacaaattttgcagttttctgcaaacatccaaggtgagaccgcggaaaaaggctaggaagtacctttacgccgttggcggatataccaggctccagggggggcgttggagcgactcaagggccctgtcctgcgtcgaaagattcgataccttcagtcagtattggacgactgtgagttccctgcatcaggcacgttccggtctgggtgtcaccgtcctgggcggaatggtttatgccattgggggagaaaaagacagtatgatattcgattgtactgagtgctacgatcccgttactaaacagtggacaaccgtggcaagcatgaaccatcctaggtgtggcctgggtgtgtgcgtctgttacggtgccatttatgcattagggggctgggtgggcgccgagattggaaacactatcgagcgtttcgatcccgatgaaaataagtgggaggtggtcggaaatatggccgtttcgaggtactatttcggctgctgtgaaatgcagggcttgatctatgtgattggagggataagcaatgaagggattgaactaaggagctttgaagtgtacgaccctctgtccaagagatggagcccccttccaccgatgggaaccaggagagcttacttaggagtggccgctctcaatgactgtatctattccgtcggtgggtggaatgaaacacaagacgccttacacactgtggaaaagtatagcttcgaggaagagaaatgggtggaggttgccagcatgaaagtccctcgtgctggaatgtgcgtcgtcgcggtgaatggccttctgtacgtgtctggcggccgaagctccagccatgactttctggcaccagggaccctggacagcgtcgaggtgtacaatccccactccgatacatggactgagattggcaatatgattacttctaggtgtgaggggggcgtcgctgtactgtag

SEQ ID NO: 121124 - DNA, 3879 bp, synthetic construct
  misc_feature 1..3879: note = Description of Artificial Sequence: Synthetic coding sequence
  source 1..3879: mol_type = other DNA
atgagggccgtgctcacttggagagacaaggccgaacattgcatcaatgatatcgcattcaaacctgacggcactcaactcatcttagccgccggatccagactgctagtatacgacacctcagacggaacattgctgcaaccacttaagggccataaggatacagtatattgtgtcgcatatgccaaagatggcaaacgcttcgcatccggcagcgcagacaagtccgttatcatctggacatcaaagcttgagggcatcctcaagtacacttcgtggtctgtgatgtcctcactgcaccttcatttaccatttttgggcctccacaaaactgttagagtgaccgccacggacaaagcccccaaaggacagggcggccgtatcgactgtctgaggcccagcgtgcagaaccagccaggtcagaagcataacgatgccattcagtgtgtatcctacaaccccattacgcaccaactggctagttgttctagcagcgacttcggactttggtcacccgagcaaaaatctgtgtctaagcataagtccagtagcaaaatcatttgctgtagttggacgaacgacgggcagtacctcgctctcggtatgtttaatggtataatatcaatccgtaacaaaaacggggaagagaaggtgaagatcgagcggcccggtggctcgctgtctcctatttggtctatatgttggaacccttctagtcgttgggagtccttttggatgaacagggaaaacgaggacgctgaagacgtgattgtgaatcgttacatccaggagattcctagtacgctcaagtcagctgtttactcgtcacaggggtccgaggctgaagaagaggaacctgaagaggaagatgactcccctcgcgacgacaacctggaagagcggaacgacatactggccgtggccgattgggggcagaaagtgtcattctatcagctgtcagggaaacagattggcaaagatagagccctgaattttgacccttgttgcattagctattttactaaaggggagtacatcctcctgggcggtagcgacaagcaggtgtccctgttcaccaaagacggcgttaggctcgggaccgtgggggagcaaaactcttgggtttggacctgtcaagctaaacccgattcaaactatgtcgtagtaggctgccaggacggtaccattagtttttatcagctgatcttcagtacggtgcatggtctgtataaggacagatatgcatatcgagattcaatgacggatgttatcgtccaacacctcataactgagcaaaaggtacgaataaagtgcaaagaactggtcaagaaaatcgcgatctaccgcaataggctggcaatacagctacccgagaaaattctaatctacgagctgtactccgaagacctgtccgacatgcattatcgcgtgaaagagaaaatcataaagaagtttgagtgtaacttgctcgtggtgtgtgccaatcacatcatcctctgtcaggaaaagaggctccaatgtctgagcttttcaggagtgaaggagcgcgagtggcaaatggaatcactcattagatacatcaaagtgattggtggaccccctggcagggagggtcttctggtaggtctgaaaaacgggcaaatcctgaagattttcgtggacaacctgttcgcaatcgtcttactgaagcaggctaccgccgtacgttgcctcgacatgtctgccagccggaagaagctggctgtggtcgacgagaacgacacttgcctggtgtacgacattgacaccaaagagctgctgttccaggagccgaacgccaactccgtcgcgtggaatacacagtgtgaggacatgttgtgtttctcaggcggcgggtacctgaacatcaaggcgagcactttccccgtccatcggcagaagttacagggcttcgtggtagggtataacggtagcaaaatcttctgtctccatgtcttctctatctcagccgtggaggtgcctcagagcgcacctatgtatcaatacctggatcgcaagctatttaaggaggcataccagattgcttgccttggagtcaccgacaccgactggagagagctggctatggaggcactagaagggttagactttgaaacagcgaaaaaggcctttattcgcgttcaggatctgcgatatctagaattgatcagctctattgaagaacgaaaaaagcgaggcgagactaacaatgacttgtttctggctgacgtgttcagttatcaggggaaatttcacgaggctgcaaagctttataagcggtcaggtcatgaaaacttggccctggagatgtacaccgacctgtgcatgtttgagtatgctaaagattttctagggagcggagatccaaaggaaacaaagatgctgattactaagcaggccgactgggccagaaacatcaaagaaccgaaagctgctgtcgagatgtacatctccgcaggcgagcatgtaaaggccatcgagatatgtggcgatcacggctgggtcgacatgttgatcgacatcgcccgtaaactggataaagctgaaagagaacctctgctgctctgcgcaacctatctgaagaagctcgactctcctggctacgctgctgagacctatctgaaaatgggtgatctgaaatccctggtccagctgcatgtagagacacaacgctgggacgaagcctttgcactgggcgagaagcacccggaatttaaggacgacatctacatgccctacgcccagtggctcgctgaaaatgaccgcttcgaagaagctcagaaagcttttcacaaagcgggacgccaaagagaggccgtgcaggtcctggagcaactgactaataacgccgtcgcagagtcccggttcaacgatgccgcctactattactggatgctgagcatgcagtgcctcgatatcgcacaggaccctgctcagaaagatactatgttaggtaaattttaccactttcagcggctagccgaactgtatcacggataccacgccattcatagacatactgaggatcccttcagtgtccatcgtccagaaacattgttcaatatcagtagattcctgttacactcccttcccaaagatactccatccggtatctcaaaggtgaaaatcctatttacgctcgcgaagcagagtaaagctctgggcgcctatcggctggccagacatgcttacgataaactaaggggcctgtacatacctgcccgcttccagaagtcaatagaacttggaacccttacaatcagggctaagcccttccatgatagcgaagagctcgttcctctctgctacaggtgcagtactaacaaccctttactcaacaacctgggtaatgtgtgtattaattgccggcaaccgttcatctttagtgcctcgagctacgacgttctgcatctggtcgagttttacctggaggagggaataaccgatgaagaagctatctcactgattgacctggaggtgctgcgtccgaagcgagatgatcggcagctggaaatcgcgaacaattcttctcagattcttcgattggttgagacaaaggattcaataggcgatgaggatcccttcactgcgaagctgagctttgaacagggcggctcagaattcgtcccagttgttgtgtcccgactggtacttcgctccatgtcccgcagagacgtcctgattaagagatggccacctccgttgcggtggcagtacttcaggagtctgcttcccgacgcctcaattacaatgtgtccatcatgcttccagatgtttcacagcgaggactacgagttgttggttcttcagcacggctgctgcccatattgcagacgctgcaaggacgatccagggccgtag

SEQ ID NO: 121125 - DNA, 3549 bp, synthetic construct
  misc_feature 1..3549: note = Description of Artificial Sequence: Synthetic coding sequence
  source 1..3549: mol_type = other DNA
atgagagccgtgctgacatggagagacaaagctgaacattgcatcaatgatatcgcttttaaacccgatggaacacaattaattctcgcggcaggaagtcggttgctggtatatgatacttccgatggtaccctgctgcagccattgaaggggcacaaggacactgtctactgcgtcgcctacgcaaaggacggtaagcgtttcgcatccggctcggccgataagagtgtcattatctggacttctaagctggaaggtattctgaagtacacacataatgacgctatccagtgcgtctcatataaccccataacacaccagcttgcgtcttgctcctccagcgattttgggctctggagcccagagcagaagagcgtgtctaaacataagtcctcttccaaaatcatttgctgcagttggaccaacgacggacaatatctcgcgcttggcatgtttaacggaattatctctatccggaataagaatggagaagagaaggttaaaattgagagacccgggggatcccttagtcccatctggtcgatctgttggaatccttctcgcgaggaacgcaatgacattttagcagtcgcagattggggccagaaagtttctttttatcagctgtcaggaaaacaaattggcaaggatagagcccttaatttcgatccatgctgtatctcctactttaccaaaggagagtacatattattggggggctctgataaacaggttagtctcttcacgaaagacggtgtccgtctgggcaccgtgggtgagcagaattcctgggtgtggacgtgtcaggctaagcccgacagcaattacgtggtagtcggatgccaggatggaactatcagtttttaccagctcatattcagcaccgtgcatggattatacaaggatagatacgcttaccgagactccatgacagacgtcatcgtgcaacatctgatcactgaacaaaaggtacgtataaagtgtaaggaactggttaagaagatagcaatctaccgaaaccgcctggccatacagctgcctgagaagatattgatctacgagctatactctgaggacctctctgacatgcattacagagtgaaggagaaaatcatcaagaagttcgagtgtaacctactagtggtctgtgcaaatcatattattctgtgccaggagaaaaggttgcagtgcctgtctttctcaggagtgaaagagcgggagtggcagatggagtctttgataagatatattaaagtgattgggggcccgcccggtagagaaggtctcctggttggactaaaaaatggccagattttgaagatatttgtcgataatttatttgcaattgtcctccttaagcaggccaccgccgtgcgatgtcttgatatgtcagccagtagaaagaagttagcagtggtggatgaaaatgacacctgtctggtctacgacattgatacgaaagaactgctgtttcaagaaccgaatgccaatagtgtggcatggaacacacagtgcgaggatatgctgtgtttttcaggaggcgggtacctgaatattaaggccagcaccttcccagttcaccgccagaaactgcaaggattcgtagtcgggtataacgggagcaagattttctgcctgcatgtgttctctatcagtgccgtggaagtcccccagagtgcacctatgtatcagtacttggacaggaagctgtttaaagaggcataccagattgcatgcctgggcgtcaccgatacagactggcgtgaactggcgatggaggccctggaaggcctcgacttcgaaactgccaaaaaggcctttatacgagtgcaggacctgagatacctggaactgattagttcgattgaggaacgaaagaaacgaggcgagactaacaatgatcttttcctcgcggacgtttttagttaccaaggaaagttccatgaggcggctaagctctacaaacggtcaggccacgaaaacctcgccttagagatgtacactgacctgtgtatgtttgagtatgctaaagatttcctggggtctggcgaccctaaagagactaaaatgctgatcactaagcaggctgactgggcccggaacataaaggagcccaaagcagcggtcgaaatgtatatttccgccggggaacacgtgaaagcaatagagatttgcggggaccacggctgggtcgatatgctgatcgacatcgccagaaagctcgacaaagctgagcgtgaaccgctgctattatgtgccacctatcttaaaaaacttgactcccccgggtatgctgcagaaacgtatctgaagatgggggatctcaagtccctcgtccagctgcacgtagaaacacagcggtgggatgaagcctttgcactgggtgagaagcatcccgaattcaaagatgatatctatatgccgtatgcccagtggcttgccgaaaacgacaggtttgaggaggcacagaaagcctttcacaaagcagggaggcaacgcgaggccgtccaggtgctggagcaactcaccaacaacgcagtggcagaatctcggttcaatgacgcggcctactattactggatgttatctatgcagtgtttggacattgcccaggatcctgctcagaaggatactatgctaggcaaattctatcactttcagcgccttgccgaattataccatggctaccatgcaattcatagacacactgaggaccccttttcggtacaccgccccgagactctgtttaatattagcagattcttactgcattctctacccaaagacacacccagcggaattagcaaggttaagatcctcttcacacttgctaagcagagcaaggctctgggcgcctaccgtctggccaggcacgcttatgataagctaagggggctgtatattcctgcccgcttccagaagtccatcgaactgggtacattgaccatccgcgctaagcccttccacgattccgaggagctcgtaccactttgttaccgatgctcgactaataatcctctattgaacaatctcggcaatgtctgcattaattgtcgccaaccattcatcttttccgcctcctcttatgatgtactgcacctggttgaattttacctagaagaaggtattacggacgaggaggcgatcagcctgatcgacctggaagtgcttcgcccgaaacgggacgatagacaactggagatcgccaacaattcatcgcaaattcttcggttggttgagacgaaggactcgattggcgatgaggacccgtttaccgcaaaactcagcttcgaacagggcggatctgaattcgtcccagtggtggtgagcaggttggttctccgatcaatgtcacggagggacgtgctgatcaaaagatggcctcctcccctgaggtggcaatacttccgcagcctgctgcctgatgcaagcataactatgtgcccttcgtgttttcagatgtttcactctgaggattatgaacttctcgtgctgcaacacggatgctgtccttattgtaggcgctgcaaggacgacccagggccctag

SEQ ID NO: 121126 - DNA, 3726 bp, synthetic construct
  misc_feature 1..3726: note = Description of Artificial Sequence: Synthetic coding sequence
  source 1..3726: mol_type = other DNA
atgagagccgtactgacctggagggacaaagctgagcattgtatcaacgatatcgcattcaagcctgatgggactcagctaattttggccgctgggtcccgtcttctggtatacgacacaagtgatggaactctgctccagcctctgaaaggacacaaagataccgtgtactgcgtggcgtacgcaaaggacggaaagcgcttcgcaagcggtagtgcagataagtcggtaattatctggacaagtaaacttgagggcattctcaaatatactcataacgatgcgattcagtgcgtgtcctacaatcctattacccaccagctggcaagctgttccagctcggatttcggcctttggagccccgaacaaaaatccgttagtaaacacaagtcctcttcaaagatcatatgttgctcttggactaatgatggccaatacctggccctgggcatgttcaatggcatcatcagtatccggaacaaaaatggcgaagaaaaagtgaagatcgaacgtccagggggctctcttagtcctatttggtcaatatgctggaatccttcaagccggtgggagtcattttggatgaaccgagaaaacgaagacgccgaggacgtcattgttaaccggtatatccaggagatcccatccaccctcaagtcggctgtgtattcatcccagggcagcgaagccgaggaagaggagccggaggaagaagacgacagcccaagagatgataacctggaagaaagaaacgatattcttgcagtcgccgactggggacaaaaagtgtctttctaccagctatccgggaagcaaattgggaaagaccgcgcactgaattttgacccatgctgcatatcatatttcacgaagggagaatatatattattgggcgggagcgataaacaggtcagtctattcacaaaggacggagtgaggcttggcaccgtcggggagcagaactcttgggtctggacatgccaagcgaaacccgattccaactatgtcgtggtgggctgccaggacggtacgatatctttctaccagctcattttcagcacggtgcacgggctgtacaaggaccggtatgcttaccgggattctatgaccgacgtgatcgtgcaacacttaattaccgagcagaaagtgcgaataaagtgtaaggagctggtgaaaaaaatagctatataccggaacaggcttgcaatccaactcccagagaagattttgatctatgaactttacagtgaggaccttagcgatatgcattatagagtgaaggaaaaaattattaaaaagttcgagtgcaacctcctcgttgtatgcgccaaccacattatcctgtgtcaggagaagagactgcaatgtttgtccttttctggagtaaaagaacgtgaatggcagatggagagcctgatcagatatatcaaagtgattggaggacctccgggccgggaaggcctcttggtcgggctgaaaaacggacagatcctgaagatatttgtagacaacttgtttgctattgtcctcctgaagcaggcaacagccgtgcgttgtcttgatatgagtgcctcccgcaaaaagttggcagtcgtcgacgaaaatgacacttgtcttgtgtacgatattgacactaaggagttattatttcaggagcccaatgccaactctgtcgcatggaacacacagtgcgaagatatgctgtgcttttctgggggcggttatctgaacattaaggcaagcacatttcccgttcacagacagaagctacagggctttgtggtgggctataacggaagcaaaatcttctgcctgcacgtgttcagcatcagcgccgtggaagtgccccagtcagctccgatgtatcagtacctagaccggaaactgtttaaggaggcataccagattgcctgcctgggcgtgacggacaccgattggagggaactcgccatggaggctctggagggacttgacttcgaaacggctaagaaggcttttattcgcgtgcaggacctgcgttacctcgagcttatctccagcatcgaggagaggaaaaaacgcggcgaaaccaacaatgatctgttcctcgctgacgtgttcagctaccagggcaagttccacgaagcggcaaagctctataagagatctggccatgagaaccttgctttggaaatgtacaccgatctctgtatgttcgaatatgcgaaagacttcctggggtccggtgaccccaaggagaccaaaatgttaatcacaaaacaagcagattgggctcgcaacataaaagagcccaaagctgcagtcgagatgtacatctccgccggcgaacacgttaaagctatcgagatctgtggtgaccatggctgggtagatatgttgatcgacattgccagaaaactggataaagcggagcgggagccactcttgctgtgtgccacctacctgaagaaattggattcccccggatacgcggccgaaacatacttaaaaatgggcgatctgaaatctctagtacaactgcatgtcgagactcaacgctgggacgaggctttcgcgctgggggagaagcatcctgagtttaaagacgacatttatatgccctatgctcagtggctggcggagaatgatcggtttgaggaagctcaaaaggcattccataaggctggtaggcagagagaggccgtgcaggtgctggagcagctgaccaataacgccgtcgctgaatcgcgattcaatgacgccgcatactactattggatgctgtccatgcagtgtcttgatatagctcaggatcctgcacagaaggacaccatgctgggcaaattttatcactttcaacgcctggcggaactgtatcacggatatcatgctatccacagacacaccgaagaccccttttccgtgcatagacccgagacgttattcaatattagtaggttcttactgcattccctgccaaaggatacccctagcgggatttcaaaagtgaagatcctattcactctggccaagcaatctaaagctctgggggcttataggcttgcccggcatgcgtacgataagctgcgggggctgtatattccagccagattccaaaaatccattgagttgggcaccttgacaatcagggctaagccgtttcatgactccgaggaactggtgccactgtgttatagatgttctaccaacaaccccttattgaacaacctgggtaacgtgtgcataaattgtaggcagccatttattttctctgcaagttcgtacgacgtgctacacctggttgagttctatctcgaggaaggtatcaccgatgaggaagccatcagcctcatcgacttggaagtcctcagacctaagcgagacgacaggcagctcgaaatcgccaacaactccagtcagatcctgaggctggtggagacgaaagattctatcggtgacgaagatccttttacagccaaacttagcttcgaacaaggtggctccgagtttgtgcccgtcgtggtcagccggctcgtgctaagatctatgtcccgcagggatgtgttaatcaaacgctggcctcctccacttagatggcagtactttcggtccttacttcccgatgcctccattaccatgtgcccgtcatgctttcagatgtttcattctgaagactacgagctccttgtactgcagcatgggtgctgtccgtactgtagacgttgtaaagacgaccctggaccgtag

SEQ ID NO: 121127 - DNA, 3396 bp, synthetic construct
  misc_feature 1..3396: note = Description of Artificial Sequence: Synthetic coding sequence
  source 1..3396: mol_type = other DNA
atgcgagctgtattgacctggcgagataaggccgagcactgcatcaacgacatcgcatttaaacccgacgggacccaactgattctggccgctggatccagactgctcgtctatgatacatctgacgggaccctcttgcagccactgaaaggccacaaggacacggtgtattgcgtggcctatgctaaagacggactgtggtctcccgagcagaaatctgtttctaaacataagagcagctccaagatcatttgttgctcatggacgaacgatggacagtacttagccctcgggatgttcaacggaattatttccataagaaacaagaacggtgaagagaaggtcaagatcgaaaggccaggggggagcctgtccccgatatggtccatctgctggaacccctccagagaggagcggaatgatattcttgccgtggccgactggggccagaaggtgagcttttatcagcttagcgggaaacagatcggtaaggatcgcgccctgaacttcgatccctgttgtatcagctactttacaaaaggcgagtatatacttcttgggggctctgacaaacaggtatccctcttcacaaaagacggtgttcggctcggaaccgtcggagaacagaacagctgggtttggacctgccaggctaaaccagacagcaattacgttgttgtcggatgtcaggatggaaccatcagcttttaccagttgattttctctactgttcacggactttataaagaccgctacgcctacagggattctatgacggacgtcattgtgcagcacctgatcacagagcaaaaggtgcggattaagtgtaaggagctggttaagaagatcgcaatctacagaaacagattggctattcagctccccgagaagattctaatttatgagctatactctgaagatctgagtgatatgcactatcgcgttaaggagaaaatcataaaaaagtttgagtgcaatctgctcgtggtgtgtgccaatcacatcatcctgtgccaggagaagagactgcagtgcctgtctttctccggtgtcaaggaaagggagtggcaaatggagagcctcatccgctacatcaaggtcatcggcggtccaccagggagagagggtctgctcgtaggactcaagaatgggcagatactaaagattttcgtagacaacctttttgcaattgttctcctgaaacaggcaaccgcggtccgctgcctcgacatgagcgccagtaggaagaaactggctgtcgttgatgagaacgacacatgtttggtgtatgatatcgacacaaaggaactcttgtttcaggagcctaacgcgaattctgtggcgtggaatactcagtgtgaggatatgctgtgcttctctggtgggggctacctgaacattaaggcgagcacctttccggttcatagacagaaactgcaggggtttgtggttgggtacaatggatcaaaaatcttctgtctgcatgtcttttcgattagcgccgtggaggtgccccagtccgcccccatgtaccagtatctcgatagaaaactgtttaaggaagcctaccagattgcctgcctgggtgtgacagacacagactggagagaactggcaatggaagctctggagggcctggatttcgaaaccgcaaaaaaggcctttattcgcgtgcaggacctgagatatttagagcttatcagcagcattgaggagcgcaaaaaaaggggggagactaataacgacctgtttcttgccgatgtgttctcatatcagggaaaattccatgaggccgcaaagttgtacaagcggagtgggcacgagaacctggcccttgagatgtataccgatctgtgcatgttcgaatatgctaaggattttttagggtcgggcgatccaaaggagaccaagatgctcatcaccaagcaggcagactgggctcggaatatcaaggagccaaaagccgctgtagagatgtacatcagtgccggagaacatgtgaaggcaatcgagatttgtggagaccacgggtgggtcgacatgctaattgacatcgcacgcaagttggataaggcggaacgagaaccgctgctcctctgtgctacatatctcaagaagttggactccccaggctacgcagctgaaacgtatctgaagatgggcgatctgaaaagtctggtccagctccatgttgaaactcagcgttgggacgaagctttcgccttgggggagaagcacccagagtttaaggatgacatctacatgccatatgcccaatggctggccgagaacgatcgcttcgaagaagctcagaaagcttttcacaaggctggcagacagagggaagccgtgcaggtcttggaacagttgacaaataatgcagtggctgagagccgattcaatgatgcggcgtattactattggatgttgtccatgcagtgcctggacattgcgcaagccgatccagctcaaaaggacaccatgctcgggaagttttatcatttccagagactcgccgagttataccacgggtaccacgccattcaccggcacaccgaagacccattttcagtgcatcggcccgagaccctctttaatatctctaggttcctgcttcattctctgccaaaagacacacctagtgggatttccaaggtgaaaattctatttaccctggctaagcagtccaaagctcttggcgcctataggctcgcaagacacgcctacgataaactgcggggcctctatatcccagcccgcttccagaagtcaattgaactcggcacattaacaatccgcgccaagcccttccacgattcggaggaactcgtgccactgtgctatcgctgttcgactaataacccattgcttaataacctcggcaatgtgtgtataaactgccggcaacctttcatcttttctgcgagttcatatgatgtgttacacctggtggagttctacctggaggagggcattaccgacgaggaggcgatcagcctcatcgatctggaagtgctccgccccaaaagagacgataggcagctggaaattgcaaacaattcttctcaaatccttagactggtggagaccaaagatagcatcggtgacgaagaccctttcaccgctaaactaagtttcgaacagggtggctcagagttcgtccctgtcgtggtgagcaggctcgttctgcggtccatgtcacgtcgggatgtcctgatcaagaggtggcctccccctctgaggtggcagtatttccgttcacttctgccagacgcttctatcactatgtgcccatcctgttttcagatgtttcactccgaggactatgaactcctggtgctgcagcacggatgctgcccatactgtcgcagatgcaaggacgacccaggtccatag

SEQ ID NO: 121128 - DNA, 3276 bp, synthetic construct
  misc_feature 1..3276: note = Description of Artificial Sequence: Synthetic coding sequence
  source 1..3276: mol_type = other DNA
atgttcaacgggataatatccatacgaaacaaaaatggagaagagaaggtcaaaattgaacgccctgggggcagcctgagccccatctggagtatctgttggaacccgtcttcccggtgggaatccttctggatgaatcgcgagaacgaggacgcagaggacgtgatcgtgaaccgatacattcaagaaattcccagcacgctgaaatctgccgtgtatagctctcagggctcagaagccgaggaagaggaacctgaagaggaagatgacagtcccagggacgataacctcgaagagcgcaacgatatcttggctgttgcagactggggacagaaggtgtctttctaccaactaagcgggaagcagatcggcaaggatcgggctctgaactttgatccctgttgcattagctattttaccaaaggagaatatattctgcttggaggcagtgataagcaggttagtctgttcaccaaggacggcgtgaggctcgggacagtgggcgagcaaaatagctgggtgtggacgtgtcaagcgaagcctgatagtaactacgtcgttgtgggctgccaggacggcaccatctccttctaccagctgatattcagcaccgtacacggcctctacaaagacagatacgcatatcgcgacagcatgaccgacgttattgtgcagcatctaattacggagcagaaggttagaattaagtgcaaggagctggttaaaaaaatcgcaatataccggaacagactagcaattcagcttccagagaaaatccttatctatgagctgtactcggaggacctatctgacatgcactatcgcgtgaaggaaaaaattatcaaaaaatttgaatgtaatctgttggtagtgtgcgcaaaccacatcattctttgtcaggagaagcgcttacagtgcctgtccttctccggcgtcaaggagcgcgaatggcagatggaatccctcatccggtatataaaggtcattgggggacctccaggacgggaagggctgctcgtaggccttaagaatggacagattcttaaaattttcgtagataacctttttgctatcgtcctgctcaaacaggctacagccgtgcgctgcctggacatgtctgctagccgaaaaaagctggccgttgtggacgaaaatgacacatgtctggtgtatgatatcgacaccaaagaactgctgttccaagaacccaacgcaaactctgtggcttggaatactcagtgtgaagatatgctgtgtttcagcggaggcggttacctgaacatcaaagcttccaccttcccagtgcatcgacagaaattgcagggcttcgtcgtgggatataatggctcaaagatcttctgtctgcacgtgttcagcatttccgcggtcgaagttcctcaatcggcccctatgtaccaatacctggatcgcaagctcttcaaagaggcgtaccagatagcttgtcttggggtgaccgacactgactggagggagctggcgatggaggccctcgagggcctggattttgagacggctaaaaaagcgtttattagggtccaggatctgcgctacctcgaattgattagctctatcgaggaaagaaaaaagagaggggagaccaataacgatctttttctggctgatgttttcagttatcaaggaaaatttcatgaggctgccaaactgtataaacgctccggccacgagaacctggccctggaaatgtacaccgatttgtgtatgttcgaatacgccaaggacttcctggggtcgggggatccgaaggagaccaaaatgctgatcacaaagcaggccgactgggccaggaacatcaaagaacctaaggcagccgtcgaaatgtatattagcgcaggggagcacgtcaaggcaatcgaaatttgcggggaccatggctgggtggacatgctgattgatattgctcgtaagctggacaaagctgagcgtgagccgctcctcctttgtgctacttacttaaagaaactggattccccaggctacgcagccgagacttatctcaagatgggagatttaaaaagtctggttcaactgcacgttgagacacagcgttgggatgaggctttcgctctgggcgaaaaacacccagagtttaaggatgacatttacatgccatatgcacagtggcttgctgagaacgaccgctttgaggaggcccagaaggctttccacaaggctggaaggcagagggaggctgtgcaagtgctggagcagctgactaataacgccgtcgctgagtcaagattcaacgacgccgcttactactattggatgctctccatgcagtgtcttgatatcgcgcaggatccggctcaaaaggacacaatgctgggtaagttctaccactttcagagactggccgaactataccatggctaccacgcgattcaccgacatacggaggatccattctcagtgcaccggccggaaactttgttcaacatcagcagatttttgcttcacagcttgccgaaggatacacctagcgggatctccaaagtcaagatcctctttactctggccaaacaatcaaaggctcttggggcatacagactggcccggcatgcatacgataagttaaggggactttatattccggccaggttccagaagtcaatcgagctcggcaccctgaccattcgggctaaaccttttcatgattctgaggagctcgtgcctctatgttaccgctgttctaccaacaatccgcttcttaataatctcggcaatgtgtgcattaactgtcgtcagccgttcatcttctctgcatcttcttacgatgtgctacacttggtggaattctatctagaggaaggtatcaccgacgaagaagcgatttctctcattgacttagaggtgctgaggccgaagcgtgacgaccgtcagctggaaatcgcgaataactcttcacagatcttgcggctggtggaaaccaaagatagtataggggacgaggatccttttactgcaaaattaagctttgagcaaggcgggagcgagttcgtcccggtggtcgtatctaggttggttctccgcagtatgagtagacgagatgttctgataaagcgctggccgccccctttaaggtggcagtactttcgtagtttgctgcccgacgcgagcataacaatgtgtccctcttgtttccagatgtttcattctgaagactatgagctgttggtgctccagcacggctgctgcccttactgccgccggtgcaaagacgacccaggaccttag

SEQ ID NO: 121129 - DNA, 3099 bp, synthetic construct
  misc_feature 1..3099: note = Description of Artificial Sequence: Synthetic coding sequence
  source 1..3099: mol_type = other DNA
atgttcaatggcattattagcattcgaaataaaaatggggaggaaaaagttaaaatcgagaggcctggaggctcactgtcacctatttggagcatctgttggaaccctagtcgcgaggagcgcaacgatattctcgccgtggctgattggggccagaaagtttcattctatcagctctctggaaagcaaattggcaaggacagggctctcaattttgatccgtgctgcatcagttacttcactaaaggggagtatattttgctgggggggtccgacaaacaggtttcactcttcactaaggacggtgtgaggctggggacagtaggggagcaaaactcctgggtgtggacctgccaggccaagcctgattcaaactatgtcgtcgtcggctgccaggacggaaccatcagtttctatcagctcatcttctccacagtacatggtctctataaagaccgctacgcctaccgcgacagcatgactgatgtgatagtccagcatctcatcactgaacagaaggtgcgtataaagtgtaaagaactggttaaaaagatcgcgatctaccggaaccgattggctattcagttgcctgagaaaattctgatctacgagctttactcagaagacctttctgacatgcattatagggtaaaagaaaagatcatcaaaaagtttgaatgcaacctgctcgtggtgtgcgcgaaccacatcatcctatgtcaagaaaagcgactgcaatgtctgtcattctcaggtgttaaggaaagggaatggcagatggagagtcttatccgatacattaaggttattggcgggccccctggtagagagggactcctagttggcctcaagaacggccaaatattgaagatatttgtcgacaacttgttcgctatcgtactgctgaagcaggccaccgccgtacggtgcctggacatgagcgctagcagaaagaagctggccgtggtcgacgagaacgacacatgccttgtgtatgacatagacaccaaagaactcctgttccaggagcctaatgccaactctgtcgcttggaacacccagtgcgaggacatgctgtgcttctctggaggcggctacctgaacatcaaagcttctactttccccgtgcaccgccagaagctgcaaggctttgtcgtaggctataatggttccaagatcttttgcctgcacgtgttctctatttctgctgtggaggttccgcaatctgcccctatgtaccaatatcttgatcgcaagctcttcaaggaggcctatcaaatcgcttgcctcggggttacagatactgattggagagagctggccatggaagccctggaggggctcgactttgagacggccaagaaagcgttcataagggtgcaggacctccgctaccttgagctgatatcatcgatcgaagagaggaagaaacgcggagagaccaacaacgacctctttctagcagacgtgttctcataccagggaaagttccatgaagctgctaagctgtataaaaggtccggccatgagaacctggccctcgagatgtacacagatctgtgtatgtttgaatatgccaaagacttccttggatcaggtgacccaaaagagacaaagatgctaattactaagcaggccgattgggccaggaatatcaaagagcccaaggctgccgtggaaatgtacataagcgccggagaacatgttaaggctatagagatctgcggtgatcacggttgggtggacatgctgattgacatcgcacgtaagttagataaggcagaacgggagcctttgcttctttgtgctacctatttgaaaaagttggatagtccagggtatgcggccgagacatatctcaaaatgggcgaccttaagagcttggtgcagctgcatgttgaaacccaacggtgggacgaagccttcgccctgggggagaagcacccggaatttaaggacgacatttacatgccctacgcccaatggctggctgagaatgacaggttcgaggaagctcagaaagctttccataaggcagggaggcagagagaggccgtccaagtgctcgaacagttaaccaataatgctgtggcagagtctagatttaacgacgccgcttactactactggatgctttctatgcagtgcttggacatcgctcaagaccctgcccagaaggatactatgctaggtaagttctatcatttccagcgccttgcggaattatatcatggataccacgcaatccaccggcacactgaggatccattctcagttcatcgtccagagaccctgttcaatatttcgaggtttctactgcattctctcccaaaggatacacctagcggtatatcaaaggttaaaatcctgttcacgcttgcaaaacaatcgaaagccctcggtgcttaccggttggcccggcatgcctacgataagctgcggggcctttatatccctgcccgatttcaaaaatctatcgaactgggaaccctgaccattcgcgctaaaccattccacgattctgaggagctcgtgcccctctgctaccggtgctccaccaacaaccccctcctcaataacctggggaatgtgtgtataaattgcagacagccattcattttctccgcaagctcttatgacgtattacatcttgtggaattttacctcgaggaagggatcaccgacgaagaggctatcagtctgattgatcttgaggtcctgcgacccaagagagatgaccgccaattagagattgctaataacagttcccagattttgcgtctggtcgaaaccaaagacagcattggtgacgaggatcccttcaccgccaaattaagctttgaacagggcggatccgaatttgtacctgtggtcgtatcccgacttgttctgaggtctatgagtaggcgggatgtcctgataaaaagatggcctcctccccttcggtggcaatactttcgcagccttctgcctgatgccagtatcacaatgtgcccatcatgtttccagatgtttcactccgaagattatgagctgttggtgttgcaacacgggtgctgtccctattgccgtcgatgtaaggatgatccgggcccgtag

SEQ ID NO: 121130 - DNA, 3252 bp, synthetic construct
  misc_feature 1..3252: note = Description of Artificial Sequence: Synthetic coding sequence
  source 1..3252: mol_type = other DNA
atgcgagctgtcttaacatggcgcgacaaagcagagcactgtatcaacgacatcgcttttaaaccagatggcacacagctgattttagccgccggatcccgtctgctggtctatgacacgagcgatgggacacttctgcagccattgaaaggacataaggacaccgtgtactgtgtcgcatacgcaaaggacggactctggagccccgagcagaagtcggtgagcaaacacaagtcttcatccaaaatcatctgctgccgggaggaacgaaacgatattctggctgtcgccgactgggggcagaaagtcagcttttaccagctgtcaggaaaacagattggcaaagatcgcgccttgaatttcgatccatgctgtattagttactttaccaagggcgagtatatcttgttgggaggatcagacaagcaggtgtctttattcaccaaggatggcgtcaggctgggcaccgttggcgaacagaatagctgggtctggacttgtcaggccaagcccgatagcaattatgtcgtcgtgggatgtcaggacggtactatctccttctatcaactgatcttttcaacagtgcacggactgtacaaagatagatatgcatacagagacagtatgacggatgtgatcgtacagcatctgatcactgaacagaaagtccgcattaagtgcaaagagcttgttaagaagattgcaatatataggaaccgcttagcaatccagctgcccgagaaaatcctcatatacgagctctacagcgaggacctgagtgacatgcactacagagtgaaggaaaaaattattaagaagttcgagtgtaatctcctggttgtttgcgctaaccacatcatcctgtgtcaagaaaagaggctgcagtgcctgtctttttctggcgttaaggagagggaatggcaaatggagtccctgattcggtatatcaaggttatcggaggaccgcccggcagagagggacttttggtgggtctgaagaacggccaaattctgaagatctttgtggacaaccttttcgcaattgtgctactgaagcaggcgaccgccgtgcggtgtctggatatgagtgcatctagaaagaaactggctgtggttgatgagaatgatacctgtctggtgtatgacattgataccaaggagttgttgttccaggaaccaaatgcaaactcagtggcttggaatacacagtgtgaggatatgctctgcttctcaggagggggatatctgaatattaaggcctctacttttcctgtccatcgtcaaaaactacagggctttgtggtcgggtacaatggctcgaagatattctgtctgcacgtgttcagtatttccgccgtcgaggtgccgcagagcgcccctatgtaccaatacctggacaggaaactgttcaaggaggcctaccaaatcgcctgtcttggagtcacggatactgattggcgggagttggcaatggaggcattggagggcttagactttgagaccgcgaaaaaggcattcatccgcgtgcaggacctgagatacctggagctgatttcctcaatcgaagagcgaaagaaaagaggggagactaacaacgacctgttcttggccgacgtcttttcttaccaaggcaaatttcatgaggctgccaagctctataagcggagtggtcacgaaaatttggcattggaaatgtataccgacctctgtatgttcgagtacgccaaggatttccttgggtcaggcgacccgaaagagaccaagatgttgatcaccaaacaggcggactgggccaggaatatcaaagaacctaaggccgccgtcgaaatgtatatctccgctggggagcacgtgaaggcaattgaaatctgcggcgatcacggctgggttgatatgctgatcgatatagccagaaaactcgacaaggcagaaagagagcccctcctcctgtgcgctacctatctgaagaagcttgatagcccaggatatgccgccgaaacctacttgaaaatgggtgacctcaaatcactggtccagctacacgttgagacacagaggtgggatgaggcttttgcactgggcgagaagcatccagagtttaaagacgatatttacatgccgtacgctcaatggcttgccgagaacgatagattcgaggaggcacaaaaagccttccacaaggccggccgacagcgcgaggcagtgcaagtcctagaacaactgactaacaatgcagtggccgaatctcggttcaatgacgccgcgtactactactggatgttgtccatgcagtgcctagatatcgctcaggctgatcctgcccagaaagacaccatgctcgggaaattttaccacttccagcggctcgccgaactgtatcacggttatcacgctatccataggcacacggaagatccattcagcgtgcacaggccagaaaccctgttcaatatttcccgtttcttgctgcactcgctcccaaaggatacgccctctggaatctctaaagtgaggaagattctgtttaccctagctaagcaatcgaaagctctcggagcataccggctggcgagacacgcctacgacaaactgaggggtctctatataccggcgagatttcagaagtccattgagttgggtacactgaccatacgcgcaaagcctttccatgactctgaagagttggtgcctctatgttaccgttgctcgacgaataacccgctgctcaataatctgggtaatgtgtgcattaattgccggcagccctttattttttccgcctccagttatgatgtgcttcatctcgtggagttctacctggaggaaggcatcacagatgaagaagcaattagtctcatcgacctggaggttctgcgacccaaaagggatgacagacaattggaaatcgccaacaattcctctcaaatactgaggctggtggaaaccaaggactcaatcggggatgaggacccctttactgccaagttgagctttgagcagggggggtccgaatttgtccctgttgtggtgagcaggctggtgctgaggtccatgtcacggcgcgatgtcctgatcaaaagatggcctcccccactccgatggcagtactttaggagtttgctccctgacgcttccattactatgtgccccagctgtttccagatgtttcacagcgaagattatgagttgcttgtcttgcagcacggctgttgcccctattgcaggaggtgcaaggacgaccccggaccctag

SEQ ID NO: 121131 - DNA, 2886 bp, synthetic construct
  misc_feature 1..2886: note = Description of Artificial Sequence: Synthetic coding sequence
  source 1..2886: mol_type = other DNA
atgagggcagttctaacctggcgggataaagctgagcactgcatcaacgatatcgcatttaaacccgacggcacccaattgatactggccgctggctcacggctcctagtgtacgacacctctgacggtactctactgcagccactaaagggacacaaagatactgtctattgtgtcgcatatgcaaaggatggcaagaggttcgcgtctgggagcgcagataaatctgtgattatctggactagcaagctggaaggcatcctgaagtacacccacaatgatgcaattcagtgcgtctcttacaaccctatcactcatcagttggcttcatgtagttctagtgacttcgggctttggtctccagagcagaaatcagtctctaagcataagtctagctctaaaatcatttgctgcagttggaccaacgatggccagtacctggccctggggatgtttaatggaatcatctctataagaaacaaaaacggagaggaaaaggtcaaaatcgagagaccaggtggtagcctgtctccaatttggagcatttgctggaatccatcccgagaagagcgcaacgacatattggcggttgcggactggggtcagaaggtgtccttctatcagctgtctgggaagcagattggaaaggatagggcgcttaattttgatccctgctgcatctcctactttactaagggggagtacattctcctcggcgggtccgacaagcaggtgtctctcttcacgaaagacggggtgaggctcgggaccgtcggtgagcagaatagctgggtctggacttgccaagccaaacccgattccaattacgtcgtggttggatgccaggacggcaccatttcattttaccaactgatcttctccacggtgcatgggctttataaggatcggtatgcatatcgcgattctatgaccgatgtcattgtccagcacctgatcacagagcaaaaggtccggattaaatgcaaggaactggtaaagaaaatcgctatatatcgtaatcggctcgcaatccagttgcctgagaagattctgatctacgagttatattctgaagacctcagtgacatgcactaccgtgtgaaggagaaaatcataaagaagttcgaatgtaatttgcttgttgtgtgtgcaaatcacattattctttgtcaggagaagaggctgcagtgtctgtcattcagcggcgtcaaagaacgcgagtggcagatggaatccctgatccgctacattaaagtgatcggtgggcctccagggagagagggcctactggttggactcaaaaatggccagattctcaaaattttcgtagataatcttttcgctatcgtgttgctgaaacaagcaaccgctgtcaggtgcctggatatgtcagcatctcgtaagaaactggcagtcgtcgatgagaatgacacatgtctcgtttatgacatcgacactaaggaactcttgttccaggagcccaacgctaattccgtggcatggaatacacagtgtgaggatatgctgtgcttctccggcggcggatatctgaacattaaggcgtcaacattccccgtccacaggcagaaactccagggatttgtggtaggatataacggcagtaagattttttgtctgcacgtcttcagcataagcgccgtggaagtacctcagagtgcaccaatgtatcagtacctggaccgcaaactgttcaaagaagcctatcaaatcgcatgcctcggagtgacagacaccgactggcgcgagctcgcaatggaagcccttgagggcctcgactttgagactgccaaaaaggccttcattcgggtgcaagacctgcggtacttagagctcatctctagcatcgaggagcgcaaaaagaggggcgaaacaaataacgatctgttcctggccgatgtcttctcatatcagggtaaattccatgaggcggctaagctctacaaacgatcaggccatgaaaatttagccttagaaatgtataccgacctgtgcatgtttgaatatgccaaagactttttgggcagtggggaccccaaggaaacaaagatgctcattaccaaacaggctgattgggcacggaacatcaaggagcctaaagccgcagttgaaatgtacatctccgccggggaacacgtgaaagccattgaaatctgcggcgaccacggttgggtggatatgctgatagatatagcaaggaagctcgataaagccgagagggagccactgctgctctgcgccacctatctgaaaaagctggattctcccggatatgctgctgagacctatcttaaaatgggggacctgaaatctctggttcagctccacgtggaaacccagcggtgggacgaagcattcgctctgggggagaagcatccagagttcaaagatgatatatatatgccctacgcgcagtggctggccgagaatgataggtttgaagaagcccagaaggcattccacaaagccggaaggcagcgagaagcagtgcaggtgctagaacagctgacgaacaacgccgtagcagagagccgtttcaacgatgctgcttactactattggatgctgagtatgcaatgcctggacattgcccaggaccccgcccaaaaagatactatgctgggcaaattttaccacttccaacggctggcagagctctaccatggctaccacgctatacaccgccacaccgaagatccattttctgtacacagaccagagaccctgttcaatatttcccgatttctgcttcattcgctacctaaggacactccctcaggtatcagcaaggtttgcgaaaatacactgcacttaggtcaggccgaacagggcccaagatgcctgcaggctggaccagcccgactctag

SEQ ID NO: 121132 - DNA, 3357 bp, synthetic construct
  misc_feature 1..3357: note = Description of Artificial Sequence: Synthetic coding sequence
  source 1..3357: mol_type = other DNA
atgcgcgctgtgctgacttggcgtgataaagctgaacactgcatcaacgatatcgccttcaagcccgatggaacccaactgattctggccgctggctctagactgctggtttatgacacctcggacggaacactcctgcagcctctgaagggacacaaagacactgtttactgtgttgcctatgcaaaggacgtgctttgcattgagggcctgtggtccccagagcaaaagtctgttagtaagcataaatcgtcatctaaaatcatatgctgcagctggactaatgatgggcaatacctggccctgggtatgttcaatggcatcatttctatccggaacaaaaacggagaagagaaggtcaagattgagcggcctggcgggtccctctcacccatttggtcgatatgttggaatccttcccgagaagagcgcaatgatatattagccgttgcagattggggccagaaggttagcttctaccagctgtcaggaaaacagataggtaaggacagggccctgaatttcgatccttgctgcataagttactttaccaaaggagagtacatcttgctgggcgggtcagataagcaggtcagcctgttcacaaaggatggagtgcgtctggggacagtgggggagcagaattcatgggtgtggacctgccaggccaaacccgactcaaattatgtggtagtgggttgtcaggatggcaccatatccttctaccaactcatctttagtaccgttcacggtctgtacaaagatagatacgcctacagggattccatgactgatgtgattgttcaacacttgatcacagagcaaaaggtccggattaaatgcaaagaactagtgaagaagattgccatttatcggaacagactagcgatccaattgcctgagaagatactcatatacgaactgtattccgaagatctgtccgacatgcactatcgagtgaaggaaaagattatcaagaagtttgagtgcaaccttctggttgtctgtgccaaccacattatcctttgtcaggaaaagcgactccagtgtctgtctttctcgggagtcaaagagagggaatggcagatggagtctctgattcgatacattaaggtcattggggggcccccggggcgggaagggctcctggtgggattaaaaaacgggcagatactaaagatattcgtggacaatctttttgcaatcgtgttactgaaacaggcaaccgcagtgcggtgtctggatatgtccgcctctagaaagaaacttgcggtggtggatgagaatgacacatgcttggtgtacgacattgataccaaagagctgctgtttcaggaaccaaacgctaatagtgtagcatggaatactcaatgtgaagacatgctctgctttagcggagggggatatctcaatatcaaggcttctaccttccctgtccaccgtcagaagctgcagggatttgttgtcgggtacaacgggtccaaaatcttttgtttacacgttttctctatatctgctgttgaggtgccacaaagtgctcccatgtatcagtatctggatcggaaactgtttaaagaggcctatcaaattgcttgtctcggtgtgacagacaccgactggcgggagttggcaatggaagcgctggagggcctcgatttcgagactgccaagaaggaacgaaagaaaaggggcgagactaataatgacctgtttcttgccgacgtgttttcctaccaaggcaagttccatgaagccgccaagctgtataagaggagcggacatgagaatcttgcgctggagatgtacaccgacctctgtatgtttgaatacgcaaaggattttttgggatcaggagatcctaaggaaactaaaatgctcataaccaagcaggccgattgggcacggaatattaaagaacccaaagccgctgttgagatgtacatttcggccggagagcacgtgaaagctattgaaatttgtggcgatcatggctgggtagatatgttaatcgatatcgccaggaaacttgacaaggcagagcgggagcctttgttgttatgtgccacatatttgaagaaactggatagtccgggctatgctgcggaaacatacctgaagatgggcgatctcaaatcgctcgtgcagttgcacgtggaaacccagagatgggacgaggcgtttgccctgggcgaaaagcaccccgaattcaaggacgacatctatatgccttacgctcagtggctggccgagaatgataggtttgaggaggcgcaaaaggcatttcacaaagccggcaggcagcgcgaggcagtgcaggtgctagagcagctgacaaacaatgccgtggctgagagccgttttaacgatgcggcctactactactggatgctctccatgcagtgcctggacatcgcccaggcggatcccgcccaaaaagatactatgctcggaaaattctaccatttccagcgactggccgagctgtaccatggataccacgcaattcatcgccacactgaggacccgttttccgttcacagaccagaaaccctcttcaatatctctagattcctgctgcactcactcccgaaagatacacctagcggcatatcaaaggttaaaatcctgtttacgctcgcgaagcagtctaaagctcttggcgcatatcggcttgcccgtcatgcttacgataaactgagagggctctatatccccgctagatttcaaaagagcatcgaactcggtacactgactatcagagccaaaccttttcacgactcggaagagctagtgccactctgttataggtgcagcaccaataaccccctgcttaacaacctaggtaacgtgtgtataaattgtcgtcagccttttatcttttctgcaagcagctacgatgtccttcacctggtggaattctacctagaggagggaataacggatgaggaggccatttcactaattgatcttgaggttctgcgccccaaacgggacgaccgtcagctggagattgcaaataactcgtcacagatactgcgtctagtggagactaaagactcgatcggggacgaagatccatttacagctaagctctctttcgaacaagggggttcggagtttgtccccgtggtggtgtctcgcctagtactgaggtcgatgtcacgacgagatgtacttattaagcgctggccacccccactgcgttggcagtacttccggagtctccttccagatgcttccattactatgtgtccgtcgtgcttccaaatgttccactctgaagattatgaactcctcgtcctccagcacggttgttgtccttactgccgccgttgtaaggacgatcccggtccttag

SEQ ID NO: 121133 - DNA, 5250 bp, synthetic construct
  misc_feature 1..5250: note = Description of Artificial Sequence: Synthetic coding sequence
  source 1..5250: mol_type = other DNA
atgcatctgaaacacctgagaactttgctgagcccccaagatggcgctgccaaagtgacctgtatggcctggagccaaaacaacgctaagtttgctgtttgtactgtggatagggtggtgctgctgtacgatgaacacggtgaaagacgcgacaagttcagcacaaaacccgcggacatgaagtacggaagaaaatcatatatggtcaaaggcatggctttttcacctgacagcactaagattgctataggacaaactgataatataatctacgtttacaaaataggcgaagattggggcgataagaaggtcatatgtaacaagtttatacagacatccgcagtgacatgtctgcagtggcctgccgaatacatcatagtgtttgggttggctgaggggaaagttcgcctcgccaacaccaaaacaaacaagtcctcaacgatatacggcacagagtcatatgtcgtctccctgacaaccaattgcagtggtaaaggtattcttagtgggcacgcggacggtacaatcgtgcggtacttttttgacgatgagggatctggggaatcacagggaaagttggtgaaccacccctgccccccctacgccctggcttgggcaactaactctatcgtagcagccggttgtgatcggaaaatcgtggcctatggcaaggagggacacatgctacagacctttgactattccagggaccctcaggagagagagttcactaccgccgtgagcagccccggcggacagtccgtagtgctgggtagttacgacaggttgcgtgtgttcaactggattccccgcagatcaatctgggaggaggccaagcccaaagagatcacgaacctttacacgatcacagccttggcttggaagcgcgacggatccaggttatgcgttgggacgctgtgcggtggggtggagcagtttgattgttgcctccggaggtctatttataaaaacaaatttgaactaacatacgtgggaccctcccaggtgatcgtgaaaaacttgagctctgggacgagggtggtcctcaagagtcattacggatatgaagtggaagaggtgaagatcctcggaaaagagagatacctcgtcgcacatacttctgaaacactgttgctgggcgatctcaatacaaatcgcctcagtgagattgcatggcagggcagtggtggcaacgaaaaatattttttcgaaaacgaaaatgtgtgtatgatatttaacgctggcgaattgacactggtggagtatggtaataatgacacactgggatcagtgcggactgaatttatgaacccccaccttatctccgtcaggattaatgaacggtgccagcggggcacagaagataacaagaagctggcctaccttatcgatatcaaaactatcgctatcgtagatctgattgggggctacaatatcggaaccgtgtcacacgaatccagagtagattggctggagctcaacgagaccgggcataaactactattcagagataggaagttacgactgcatctctacgacatagaatcttgttccaaaacgatgattttgaacttttgctcttatatgcagtgggtgcccggcagtgatgtgctggtcgcccagaaccgcaatagtctctgcgtgtggtacaatattgaggcccctgagcgtgtgaccatgtttactattaggggggacgtcatcgggctcgagcgtggaggaggcaaaaccgaggtgatggtcatggagggtgtcacaactgtggcttacacattggatgaggggctcatcgaattcgggactgctatcgatgatggaaactatattagggctaccgcttttcttgagacactcgagatgacccccgagaccgaggccatgtggaaaaccttgagcaagctggctctggaggctaggcagctccatatcgctgagaggtgtttcagtgcccttggccaggtggccaaagctagatttctgcacgagaccaacgagatagccgaccaggtgtcacgagagtatggtggggaagggaccgatttttaccaggttcgtgcccggctagccatgctggagaagaactacaagcttgccgagatgatttttttagagcagaatgcggtcgaagaggctatgggcatgtatcaagaactgcacaggtgggacgagtgcattgctgtggccgaggctaaaggtcatcctgccctggaaaaactccggcggtcttattatcagtggttaatggacacgcaacaggaggaaagagcgggcgaactccaggagagccaaggcgatggactggccgcaatcagcttatacctgaaggccggattgcctgctaaggctgcaagactggtcctaactagggaagaattgctcgccaataccgaactcgtagagcacataaccgcggccctgatcaagggcgagctgtatgaacgggcaggggacttgtttgaaaagatacataacccccaaaaggccctggaatgctacaggaaggggaacgccttcatgaaggccgtagaactggccagactggcatttcctgtcgaggtggttaagctcgaagaagcctggggggaccatctggttcagcagaaacaattagacgccgcaatcaatcattacatcgaagcacgctgttcaattaaagctattgaggcggcccttggggctagacagtggaagaaagctatctatattctggacttgcaggaccgcaacaccgccagtaaatattaccccctcgtggcacagcactacgcctccctccaggagtacgagattgccgaagaactgtatacaaagggagatcgtacgaaggacgcaatcgatatgtacacgcaagcgggcagatgggagcaggcgcacaaactcgcaatgaagtgtatgcggccggaagatgtatcagtattgtatatcacccaggcgcaggagatggagaaacaggggaagtaccgagaggcggagaggctttacgtgacagtccaggagcccgatctagccattaccatgtacaaaaaacacaaattgtatgacgatatgataaggctcgtgggcaagcatcacccagacttgttgagtgatactcatctgcatctcggcaaagaactcgaagcagaggggaggttacaggaggccgaatatcattaccttgaagcccaggagtggaaagctaccgttaacatgtatagagcatctggattgtgggaggaagcatacagggtggcaagaacccagggcggagctaacgcacacaaacacgtcgcatacctctgggcaaaaagcctgggcggcgaagcagcagtgcggctgctgaataaattgggcctcttggaggctgctgtggatcacgccgctgataattgcagtttcgagtttgcgttcgagctgtccaggctggcactgaagcataagacgcctgaggtacatttgaaatatgccatgtttctcgaggacgaaggaaagttcgaggaggctgaggctgaattcatcagagctggaaagcccaaagaagccgttttgatgtttgtacacaatcaggattgggaggctgctcaaagggtggcagaggcgcatgatccagattccgttgctgaggtccttgttggtcaggctcggggcgccctggaggaaaaagactttcagaaagccgagggtctgcttctgagggcgcagcgcccaggcttagcactcaattattacaaagaggccggtctgtggagcgacgcactcaggatctgtaaggattacgtcccctcacagctggaggctctacaggaggagtacgaacgtgaggcgacaaagaaaggggcccgcggagtggaaggctttgtggagcaagcgcggcattgggagcaagccggcgaatattcacgggccgtggattgctacttgaaggtgagagattccggaaattcagggctggccgagaagtgctggatgaaggccgcagagctctctatcaagttcctgccaccccagaggaacatggaagtcgttttggccgtcggaccccagctgataggtatcggtaagcattctgccgccgctgagctgtacctgaatctcgacctcgtgaaggaggccatagacgcctttatcgaaggcgaggagtggaataaggcaaagcgtgtagcaaaagaactggatcccagatatgaggactacgtcgaccagcactacaaggaattcctgaagaaccaaggcaaagtagatagtcttgtgggagttgatgtcattgccgcgcttgatctctacgtcgaacagggccaatgggataagtgtatcgaaacagctaccaagcaaaattataaaatcctgcataagtatgtggccctgtatgcaacacatctgattagggagggaagttcagcacaggcacttgctttgtacgtgcagcatggagctcccgctaacccacagaactttaatatctataagcgcattttcacagatatggtatcttctcccggtacaaactgcgcagaagcatatcacagctgggccgacttgcgggacgtgctgttcaacctgtgtgagaatttggttaaatcatctgaagccaatagccccgcccacgaggaattcaaaaccatgctgctgattgcacattattatgctacacgctctgctgcgcagtccgtgaagcagttagagacggtggcagccaggttaagcgtgtcactgctccggcatacacaactgttacctgtagataaggcattttatgaggccggtatcgccgccaaggccgtgggatgggacaatatggcattcatctttctgaataggttcctggacctgaccgacgcgatcgaagaaggaacactggacggccttgaccacagcgacttccaggacaccgacattcctttcgaggtccctctcccagctaagcagcacgtgccggaggcagaaagggaagaggtcagagattgggtgctgaccgtgagtatggatcaacggctggaacaagttctgcccagggacgagcgtggcgcctacgaggcttccctcgtggcagcaagcacaggagtgcgtgccctgccttgcttgattaccgggtaccctatcctccggaataagatagaatttaaacgacccgggaaggccgctaataaagacaactggaataagtttctgatggctataaagacgtctcattctcccgtatgccaggacgtcctgaagtttatctcacaatggtgcggcggattgccaagcacctcgttctctttccagtag

SEQ ID NO: 121134 - DNA, 1536 bp, synthetic construct
  misc_feature 1..1536: note = Description of Artificial Sequence: Synthetic coding sequence
  source 1..1536: mol_type = other DNA
atggcctggagtcagaataacgctaagttcgcagtttgtacagtggatagggtagtgctcctctatgatgagcatggcgagcgaagagataagttttctaccaagcccgcagacatgaaatacggcaggaagagttacatggtgaagggcatggccttttcccccgactctaccaagattgcaataggccaaactgacaatattatttacgtgtataagattggagaagactggggagataaaaaagtgatttgcaataagttcattcagacttcggccgtaacatgcctgcagtggccggctgagtatatcatcgtctttggattggcagagggcaaagtaaggttagcaaacacaaagacaaacaagagtagcaccatctacgggacagaaagctacgtggtttccttaacaaccaactgtagtggcaaaggaattctctccggccacgccgacgggacaattgtccgatacttcttcgatgacgaggggtccggtgaaagccagggaaaactggtgaatcacccatgtccaccatacgcgctggcctgggccacaaattctattgtcgccgccggatgtgacaggaagatcgtcgcatacggaaaagagggccatatgctgcaaacattcgattatagcagggatccacaggaacgtgagttcaccacggccgtgtcttccccgggcggccagtccgtggtcctgggctcctatgaccgtctcagagtctttaactggattccccgcaggtccatctgggaggaggccaagcccaaagagattaccaacctctacaccatcactgctttggcgtggaagagggatggatccaggctctgcgttggcaccctgtgcgggggggtggagcagttcgactgctgtcttcggagaagcatatacaagaataagtttgaactgacctacgttggaccttctcaggttattgtcaagaacctgtcttccggcactcgcgtggtgctgaaatcacactacggttacgaggttgaggaggtgaaaatcctcggcaaggaaagatacctagtcgcacacacatctgaaacccttttactgggcgatttgaacacgaatcggcttagcgaaatcgcatggcagggtagcggcggtaatgaaaagtattttttcgaaaacgaaaatgtatgtatgattttcaacgccggcgaactgactctggttgagtacgggaacaacgatactttgggatcagtcaggacagaatttatgaacccccacctcatttccgtgcgcattaacgagaggtgccagcgtggtacagaagataataaaaaattggcctatctgattgatatcaaaaccattgcaatcgtggacctgatcggggggtacaacattggcacagtcagccatgagagtagggtcgactggctggagctgaatgaaacggggcataaactcctgttccgagatagaaaactgagggtgcggcgggctacaaaggcccttggtattgggtggcccaccgagggggtacgccaagctgcaaccagagactag

SEQ ID NO: 121135 - DNA, 369 bp, synthetic construct
  misc_feature 1..369: note = Description of Artificial Sequence: Synthetic coding sequence
  source 1..369: mol_type = other DNA
atgacccatctactattaacagctaccgtcacacccagcgagcagaatagctcacgtgagcctggttgggaaacggctatggcaaaggacatactgggagaggccggtctgcactttgatgagctcaataaattgagagtgctggaccctgaggtaacccagcagaccatcgaattgaaagaagagtgcaaggacttcgtagacaagattggccagttccagaaaatcgtgggcggcctcattgaattggtggaccagctagcaaaagaggccgagaatgagaagatgaaagtccgaagcgcctgtttaccaccaacaagttggccaggaacactggtgcattacccgctcattcccctaccttcgtag

SEQ ID NO: 121136 - DNA, 447 bp, synthetic construct
  misc_feature 1..447: note = Description of Artificial Sequence: Synthetic coding sequence
  source 1..447: mol_type = other DNA
atggctaaggatatattaggagaggctgggctgcacttcgatgagctcaacaagctgcgggtcttggaccccgaagtgactcagcagacaatcgaattgaaggaagaatgtaaggattttgtcgataagattggtcagttccagaaaattgttggcggcctgattgagctcgtggaccaactggctaaggaagccgagaatgaaaagatgaaatccttggccgtgagtcctcggctggaatgtactggcgcgattagtgcccactgcaagttatgcctgagcgatagcagtgactcgcctacatcccccagtcgagtcgggggcacgacaggccacaggtgttccgaactggctcagatctatagtaaggcagaacgctctagtactgccgccactagttcgcctaactcacgcaaagaaaatgctgcccgcaaggtttccgggtag

SEQ ID NO: 121137 - DNA, 399 bp, synthetic construct
  misc_feature 1..399: note = Description of Artificial Sequence: Synthetic coding sequence
  source 1..399: mol_type = other DNA
atggcgaaggacattttgggggaggccgggttacattttgatgagctcaataagctcagggtgcttgacccggaggtaacccagcagacaattgagctaaaagaagaatgtaaagactttgtcgataagatcggccagttccagaaaatcgttggaggccttattgagctggtggaccagctcgccaaggaggctgagaatgaaaaaatgaaagcaattggtgcgcgcaatctgttaaaaagtatcgctaagcagcgtgaggctcaacagcagcagctgcaggccctcatcgctgaaaaaaaaatgcaactggagcgatatagggttgagtacgaggcattatgtaaagtggaagcagagcagaacgagttcattgaccagttcatttttcagaaatag

SEQ ID NO: 121138 - DNA, 216 bp, synthetic construct
  misc_feature 1..216: note = Description of Artificial Sequence: Synthetic coding sequence
  source 1..216: mol_type = other DNA
gatattcttggagaggcgggcctgcacttcgacgagttgaacaagctccgtgtgctggatcctgaagtgacccagcagaccatcgagctcaaggaggaatgtaaggatttcgtggataaaatcggtcagttccagaaaatcgtcggcggacttatcgaacttgtggaccagctagctaaagaagcagaaaacgagaagatgaaggtgagtggctag

SEQ ID NO: 121139 - DNA, 345 bp, synthetic construct
  misc_feature 1..345: note = Description of Artificial Sequence: Synthetic coding sequence
  source 1..345: mol_type = other DNA
atggccaaggacatactcggcgaagcgggtttacactttgatgaactgaataaactgagggtactggatcccgaagtgactcagcaaactattgagctcaaagaagaatgtaaggattttgttgacaaaattggtcagtttcagaaaatagtaggcgggctgatcgagctagtggatcagctggccaaagaagctgaaaatgagaagatgaaagccataggtgcgagaaatttattgaaatcaatcgccaagcagcgggaagcccaacagcagcaactgcaggcgttgatcgcagagaaaaagatgcaactcgaaagaaatgagctgaagatttctctgctgtag

SEQ ID NO: 121140 - DNA, 477 bp, synthetic construct
  misc_feature 1..477: note = Description of Artificial Sequence: Synthetic coding sequence
  source 1..477: mol_type = other DNA
atgacccatctcttactgacagctacagttacaccatccgaacagaatagctcccgggagccaggttgggagaccgctatggccaaagacattctaggagaggcaggcctgcactttgatgaactgaataaactgagagtgctagatcctgaggtcactcagcagacaatcgaactgaaggaggaatgcaaggacttcgtggacaagattggccagtttcagaagatcgtcggaggtttgatcgaacttgtggaccagctagctaaggaggcggaaaatgagaaaatgaaggctattggagcccgcaatcttctgaagagtatcgccaagcaacgcgaagcccagcagcaacagctacaggccctcatcgccgaaaagaaaatgcagcttgaacggtacagggtcgagtacgaggccctctgcaaggtcgaagccgaacaaaacgagttcatcgaccaatttatttttcagaaatag

SEQ ID NO: 121141 - DNA, 399 bp, synthetic construct
  misc_feature 1..399: note = Description of Artificial Sequence: Synthetic coding sequence
  source 1..399: mol_type = other DNA
atggccaaggacatacttggtgaggccggattgcactttgatgagttgaacaagcttcgggtgcttgaccctgaggtcacacagcagaccattgaacttaaggaggaatgtaaggactttgtcgataaaataggtcaatttcagaagatcgtaggaggactgatcgagctggttgaccaactcgccaaggaagctgaaaatgagaaaatgaaagccatcggggcgcggaatttgcttaaaagcatcgccaaacaaagagaggctcagcagcaacagctgcaggcacttattgccgagaagaagatgcagctagaacgctatcgagttgaatacgaggcgctctgtaaggttgaggcagaacaaaatgaattcatcgatcagtttattttccaaaagtag

SEQ ID NO: 121142 - DNA, 642 bp, synthetic construct
  misc_feature 1..642: note = Description of Artificial Sequence: Synthetic coding sequence
  source 1..642: mol_type = other DNA
atggaagacctcttagaccttgatgaagagctgaggtatagcctcgccacaagcagggcaaagatgggcagacgtgcccaacaggaatctgcgcaggccgaaaatcaccttaacggaaagaattcctccctgaccctgactggtgaaacgtcttctgccaaactgccccgttgcagacagggagggtgggccggggattcggtaaaggcctccaatggaactcagacaggcaagcagcaactcgacctgaatgcatgctaccacaagacacatcacagggatttggggctcgcgagcctggaggaggctgacattccaataattcccgatctagaggaagtgcaggaagaggactttgtgttgcaggtcgcggcccctccttcgatccagatcaaacgcgttatgacatatcgcgatctggacaatgatcttatgaagtactctgccattcagacgctcgacggtgagattgacttaaaattgcttaccaaagtgctggctcctgaacacgaagtaagagaggacgacgtaggttgggactgggaccatctgttcacagaggtgtcgagtgaagttttgacagaatgggacccgctccagactgagaaggaagatccagcgggacaggcaagacacacttag

SEQ ID NO: 121143 - DNA, 627 bp, synthetic construct
  misc_feature 1..627: note = Description of Artificial Sequence: Synthetic coding sequence
  source 1..627: mol_type = other DNA
atggaagacttactcgacttagatgaggaactccgctattcgctggctacatcacgagcaaaaatggggcgccgagcacaacaggagtccgcccaagccgagaaccacttaaacggcaagaatagctcccttacattaacaggagagactagcagtgcaaagctgccgcgatgtcgccagggcggttgggccggcgattctgtaaaagcctcaaagttcagaagaaaggcatcggaagagatcgaggactttcgcttgaggccccagagcctgaacggcagtgactacgggggcgatattccaattatccctgatctggaagaagtgcaggaagaggacttcgtgctacaggtggccgcaccaccttctattcagatcaaacgagtgatgacctaccgtgatttggacaatgacctcatgaagtactcagctatccagactctcgatggggaaatcgacttaaagctccttaccaaagtactggcccctgaacatgaggtgagggaggacgatgtaggatgggactgggaccacctgtttactgaggtatcctccgaggtattgaccgagtgggaccctctgcagaccgaaaaagaggatcccgctggccaggcccggcacacatag

SEQ ID NO: 121144 - DNA, 342 bp, synthetic construct
  misc_feature 1..342: note = Description of Artificial Sequence: Synthetic coding sequence
  source 1..342: mol_type = other DNA
atggaggatctgctggacctggatgaggagctgcgctactcattggcaacttcacgggcaaaaatggggcgccgagcccagcaggaatctgctcaggcagaaaaccatctcaatggaaaaaactcatcactgacattgacaggagaaactagctctgctaagctgccacgctgccgtcaggggggctgggccggcgattccgtgaaagcttctaagtttcggagaaaggcgtctgaggagatagaagaatacgtgagttcaatcctgatcttaatggtgtcctatgtcgatctcggccagcagtgtagcctgggcggtcatgacctcttccacctgtgctag

SEQ ID NO: 121145 - DNA, 1290 bp, synthetic construct
  misc_feature 1..1290: note = Description of Artificial Sequence: Synthetic coding sequence
  source 1..1290: mol_type = other DNA
atgacagccgcccttgctgtcgtcactaccagtggactggaggatggtgtgccgcgttctcgcggggagggcactggggaggtcgttctagaacgaggccctggtgcggcatatcacatgttcgtggtgatggaggacttagtcgagaagctgaagcttttgcggtatgaggaagaattcctaagaaagtcgaaccttaaggcaccttctcgccactacttcgccttgccgaccaaccccggagagcagttctacatgttttgtacacttgcagcgtggctgattaataaagctgggcgtccctttgaacagcctcaggaatatgacgatcctaatgccaccatttcgaacatcctatccgaactccgaagttttgggcgcacagccgatttcccaccaagcaagctgaagagtggttacggggagcacgtgtgctatgttctcgactgtttcgcagaagaggctctcaagtacattggtttcacctggaagaggcctatttatccagttgaggagctggaagaagaaagtgtcgctgaggacgatgccgaactgactctcaataaggtggatgaggaatttgtcgaggaagagacagataatgaagaaaatttcattgacttaaatgtcctgaaagctcaaacttatcacctggatatgaatgagactgcaaagcaagaggatatactggagtccactacggatgcagctgagtggagtctcgaggtggagcgtgtgctgccgcagcttaaggtgaccatccgcacagacaataaggactggcggatccatgtcgatcaaatgcatcagcatcggtctggcattgaaagtgcactcaaagaaaccaaggggttcttagataaattgcataatgagattacgaggaccctagagaaaatatcatctagggagaaatacataaataatcaactggagaacctggtccaggagtatagagcagcacaagcccagcttagcgaggctaaggagcgctatcagcagggcaacgggggtgtgaccgagcgtaccagactcctttctgaagtgatggaagaactcgaaaaagtcaagcaagagatggaggagaagggctcatcaatgactgacggggcccccctggtgaagataaaacagagcctcacaaaactgaaacaggagaccgtggagatggacatacggattgggatagtggaacataccctcctgcagtctaaactgaaggaaaagtccaatatgacacggaatatgcatgctacggtgattcctgagcctgccacgggcttttattag

SEQ ID NO: 121146 - DNA, 2334 bp, synthetic construct
  misc_feature 1..2334: note = Description of Artificial Sequence: Synthetic coding sequence
  source 1..2334: mol_type = other DNA
atgcgtctgaagatctcactgttaaaggaaccgaagcaccaggagctggttagttgtgtcgggtggacaaccgccgaagagctgtactcttgcagtgacgatcatcagatagtgaagtggaatttgcttacttctgagaccacacagatcgtcaaactgcctgatgatatttaccccatcgacttccactggttcccaaagagtctgggcgtcaagaaacagactcaagccgaatccttcgtgctgaccagttcagacggcaaatttcacttgatcagcaaactgggtagagtcgagaagagtgttgaagcccattgcggagccgtgctagctggaaggtggaactacgaaggaactgcccttgtgactgtgggcgaagacgggcaaatcaagatatggtccaagaccggcatgctgaggtctacattagcgcaacaggggaccccagtgtatagcgtggcttggggccctgactcagagaaagttctgtataccgctggtaagcagctgatcatcaaaccactccagcccaatgccaaagtgctgcagtggaaagcgcatgacgggattatactgaaggttgactggaactccgtgaacgatctgatcctgtccgccggcgaggactgtaagtacaaggtgtgggactcttatggccggcctctgtacaactcccagcctcatgagcacccgataactagcgtggcctgggcccccgacggggagcttttcgcagtgggctccttccacacactgagattgtgcgataagaccggctggtcctacgcactggagaagccaaatactggctcgatctttaatatcgcctggagtatcgacggaacccaaatagctggagcttgcgggaatggacatgtggtgttcgctcacgtcgtagaacaacattgggaatggaagaactttcaggtgacgctgacaaagcggagggccatgcaggttcgcaacgtgctgaatgacgccgtggacctgctggagttccgcgacagggtcatcaaggccagtctgaattatgcacatttagttgtgtcaacctcactgcagtgttatgtcttctctaccaagaactggaacactccaatcatcttcgacctgaaagaagggactgtctccctgatcctgcaggccgagagacattttctgcttgttgacggcagttctatttacctatatagttatgaaggcagatttatcagctcccccaaattcccgggaatgagaacggacattctgaacgcccagactgtgtcattgtctaacgacaccatcgcaattcgggataaggctgatgagaaaattattttcctgtttgaggcttccacaggcaaaccactgggcgacggcaagtttctgtcacacaagaatgaaatcctggagatcgctttagatcagaaaggtctcacaaacgatcgaaagattgcgtttatcgacaaaaatagagacctttgcatcactagcgtgaagaggtttggaaaagaagaacaaatcattaagctcggaacaatggtgcacactctggcgtggaatgacacttgtaatatcctttgtgggctgcaggataccaggttcatcgtctggtattaccctaacactgtctacgtggaccgggatattctccccaaaaccctctatgaaagagacgcttctgaattttcaaagaacccccacatcgtgtcgttcgtgggcaatcaggttactatccgtagggctgacggtagccttgtccatatatccattacaccgtatcctgccattctccacgaatatgtctcctcatctaagtgggaagatgctgtgagattatgcagattcgtcaaagagcaaactatgtgggcatgccttgctgccatggccgtcgcaaacagggatatgacaactgctgaaatcgcttacgcggccattggtgagatagacaaagttcaatacattaactctattaaaaacctgcccagtaaagagtccaaaatggctcacatcctactctttagtggcaacatccaggaagccgagatcgttttgctccaggccggactcgtctaccaggccattcagattaacattaacctctataactgggaaagggcgttagaacttgctgtcaaatataaaacccatgtggacacagtgctggcctatcggcaaaagttcctcgaaactttcggaaagcaggagacgaataagagatatctccactacgcagaagggctgcaaattgattgggaaaaaatcaaggctaaaatcgagatggaaatcactaaggaacgtgaacagagttctagttcacagtccagcaagtcaatcggtttaaaaccatag

SEQ ID NO: 121147 - DNA, 195 bp, synthetic construct
  misc_feature 1..195: note = Description of Artificial Sequence: Synthetic coding sequence
  source 1..195: mol_type = other DNA
atgcgcctcaaaatctcacttctgaaagagcctaaacaccaggagctggtgtcatgtgtcggatggaccactgccgaggagctgtatagctgtagtgacgatcaccagattgtgaagtggaatctcctgacctcagaaacgacccaaattgtgaagcttccagatgatatttatcccatagactttcattggtag

SEQ ID NO: 121148 - DNA, 1923 bp, synthetic construct
  misc_feature 1..1923: note = Description of Artificial Sequence: Synthetic coding sequence
  source 1..1923: mol_type = other DNA
atgctgcgttccacgctcgcacagcaaggtacacccgtgtatagtgtggcctggggccccgattcagaaaaggtgttatacaccgcggggaagcagctcatcattaaaccattgcagcctaatgctaaggtcctgcaatggaaagcacatgacgggatcatcctaaaggttgactggaacagtgtcaatgacctgattctgagtgccggtgaggactgtaagtacaaggtgtgggatagttatggtaggccattatataacagccaaccgcatgagcacccaattacctctgtggcttgggctccagacggagaattattcgccgtgggcagcttccacaccctaagactgtgtgataagacgggctggtcttacgcgctcgagaagcctaacaccggttccatttttaacatcgcatggtctatagacggtacacagatcgcaggtgcctgtggaaatggtcacgtcgtttttgcccatgtggtggagcaacattgggagtggaagaatttccaggtcacccttacaaagagaagggccatgcaggtgaggaacgtgctgaatgatgcggtagatctgctcgagtttcgagatcgagtgattaaagcctccctgaattatgctcatcttgtcgtgtccacttcactccaatgctacgtgttcagtactaaaaattggaacacccccataattttcgatctgaaagaaggtacagtgtccctgatactccaggccgagaggcacttcctcctcgttgacggcagctctatctacttatactcttatgaggggcgcttcatttcctctcctaagttccctggtatgagaacagatatcctgaatgcgcaaaccgtctcacttagcaatgatactattgccatccgcgataaagctgatgaaaagatcattttcctgtttgaggcgagcacaggaaagccgttaggcgatgggaagtttcttagccacaagaacgagatcctggagattgcgctggatcagaagggcttgacgaacgaccgcaaaattgcgttcatcgacaagaacagagacctgtgtatcacgagcgtgaagaggttcggaaaggaagagcagattatcaaactaggaacaatggttcatacactcgcctggaatgacacatgcaacatcttatgtggactccaggacacaaggttcatagtttggtattacccaaacacagtttacgtggacagggacatacttcccaaaaccctgtatgaaagagacgcatctgagttttccaaaaaccctcatattgtgagttttgtcggtaaccaagtgactatcaggagggcagatggatcattagtacatatcagtattacaccttatcccgccatactccacgaatacgtctctagctccaagtgggaagatgctgtgcggctgtgcaggttcgtgaaggagcagactatgtgggcgtgtttagctgctatggctgtggccaaccgcgacatgacaacggcagagatcgcctatgcagctattggggagattgataaagtgcagtatataaattctataaagaacttgccttcaaaagagagtaagatggcccacatcctgctgttctccggaaacattcaggaagcggagatagtcttactacaagccggcctagtatatcaggctatccagatcaacattaatctatataattgggagcgagccctggaactggcggtgaagtataaaacacatgtggacacggtgctggcttaccggcagaaattccttgagacgttcgggaaacaggagacaaataaacggtatctgcattatgccgaaggccttcagatcgactgggagaagattaaagctaaaatcgaaatggagattactaaggaaagagaacagagttcatcttcgcaatcatccaagtccatcggcctgaagccctag

SEQ ID NO: 121149 - DNA, 366 bp, synthetic construct
  misc_feature 1..366: note = Description of Artificial Sequence: Synthetic coding sequence
  source 1..366: mol_type = other DNA
atgcggttgaaaatctctctgctgaaggagcccaagcaccaggagctggtgtcatgtgtcggctggactaccgccgaagaactatattcatgctcagatgaccaccaaatcgtcaagtggaacttgcttacttccgaaaccacacagatcgtcaagcttcctgatgatatttacccaatcgatttccattggttcccaaagagcctgggagtcaaaaaacaaacgcaggccgagtcgttcgtgctgacgtcgtcagacggcaagttccatctgatatcaaaactcggtagggtggagaagtccgtagaggcacactgcggggcagtactggctgggaggtggaactacgagggtacagccctgtag

SEQ ID NO: 121150 - DNA, 1923 bp, synthetic construct
  misc_feature 1..1923: note = Description of Artificial Sequence: Synthetic coding sequence
  source 1..1923: mol_type = other DNA
atgctgagatccaccctagcacagcagggaactccggtctacagcgtggcttggggcccagattccgaaaaggtactatacacggctggaaagcagctgattattaagccgctgcaacccaacgccaaagttctacaatggaaagcgcacgacggaattatcctgaaggtggattggaatagcgtaaacgatctgatcctttcagctggggaggactgcaagtataaagtgtgggactcttacggccgcccactgtataattctcaaccacacgaacacccaattacttctgtggcgtgggctcccgatggagaattattcgccgtcggcagcttccacacgctgcgactctgcgataaaaccggatggtcctacgccttggaaaaacctaacaccggtagcatctttaacattgcatggagtatcgatggaacccagattgctggggcatgcggaaacggccatgtggtctttgcccacgtggtcgaacaacactgggaatggaagaatttccaggtcaccttgaccaagaggcgggcaatgcaggtccgtaatgtgctcaacgacgcagtcgatctgctggaattccgggatcgagtgattaaggcgagcctgaactatgctcaccttgtggtatcaacttcccttcagtgctatgtcttcagcacaaaaaactggaataccccgatcatcttcgatttgaaggagggaactgtttcccttatactgcaagctgaacgccatttcctgctagtggatgggtcatctatttacttatactcatacgagggcaggttcatctccagtcccaagtttccgggaatgcgcacagacatattaaatgcacagacagtatccctgtctaacgatactatcgcaattcgcgataaggctgatgagaaaatcatattcctgtttgaagcgtcaaccggaaagcccctcggtgatggtaagttcctgagccacaagaatgagatcctggagatcgcgctggaccagaaaggcctgaccaatgaccgcaagatcgcttttattgacaagaaccgggacctgtgcatcaccagcgtgaaacgattcggcaaagaagagcagatcattaaattaggcaccatggttcatactctggcatggaatgacacctgtaacatcctgtgcggactacaggatacgcggtttatcgtatggtactacccgaacactgtgtatgtagaccgagatatcctgcccaaaactctgtacgaacgggatgcctctgaattttcgaagaatcctcacatcgtgtcttttgtcggtaatcaggtgactatccggcgcgctgatggcagtcttgtccacataagcataaccccgtaccccgccattctgcacgagtacgtgtctagttcaaagtgggaggacgcggtccggctctgtaggtttgttaaagagcagacaatgtgggcttgccttgccgcgatggcagtcgccaaccgtgacatgacgacagccgagatcgcctacgctgctattggcgaaatcgacaaagtccaatacatcaactcgatcaaaaatcttccatcaaaagagtccaagatggcgcacattcttttgttctctggcaacatccaagaggcagaaattgtactcttgcaggctggactcgtgtatcaagccatccagataaacatcaatctgtataattgggaaagagctttggagctagccgttaagtataagacacatgtggacacagttttagcctatcggcaaaaattcctcgagacttttggaaagcaggaaactaacaaaaggtatcttcactacgctgagggactgcagattgactgggagaagataaaggctaaaatcgagatggaaataacaaaagagcgagaacagtctagctcgagccagtcctccaagagcattggactgaaaccgtag

SEQ ID NO: 121151 - DNA, 540 bp, synthetic construct
  misc_feature 1..540: note = Description of Artificial Sequence: Synthetic coding sequence
  source 1..540: mol_type = other DNA
atgcgcctcaagatcagcctgctgaaggagccaaagcatcaggagcttgtctcatgtgttggctggacaactgctgaagagctgtattcttgcagcgacgatcaccagatagtgaaatggaatctgctcaccagtgaaactacacagattgtgaagctgcccgatgacatatatcctatagatttccactggtttcccaagtcactcggcgtcaagaagcagacacaggccgagtctttcgtgctaacgagttcagatggcaaattccacctgatatccaaactaggtcgggtcgagaagtcggttgaagcccattgcggagctgtgctcgcaggccggtggaattatgagggaacagctctggtgacagtcggtgaagacggtcagattaagatctggtctaagaccggtatgctccggtctacattggctcaacaagggaccccggtttatagtgtcgcctgggggccggattccgaaaaggttctgtatacagccggtaaacagttgattattaagcctctacagcccaacgcttag

SEQ ID NO: 121152 - DNA, 1227 bp, synthetic construct
  misc_feature 1..1227: note = Description of Artificial Sequence: Synthetic coding sequence
  source 1..1227: mol_type = other DNA
atggcctccgtggctagttgcgactcccggccttcaagcgacgagctccccggggacccctcatcccaggaggaggatgaagattacgacttcgaagatcgtgtttcagactccggatcttactcctccgctagctccgattacgacgatttagaaccggaatggctggacagcgtccaaaaaaacggtgaactgttttacctcgaactgtctgaggatgaggaggagagtctactgcctgagactccgaccgtgaatcacgtccgctttagcgagaacgaaatcatcatagaagacgactacaaagaacgaaagaagtacgaacctaaactaaaacagttcacaaagatactacggagaaaaaggttattaccgaaacgctgcaataaaaagaatagtaacgataatggccccgtgtcgatcctgaagcatcagtcgaaccaaaaaacaggcgtgatagtgcagcagcgctataaggacgtaaacgtgtatgtgaaccccaagaagctgacagtcattaaggctaaggagcagttgaaactgctggaggtgttggtaggcattatccaccagaccaagtggtcctggagacgaaccgggaagcagggggacggagagcggctcgtggttcacggtctgctcccaggtgggagcgcgatgaaatcaggtcaggtgctcatcggagatgtgctggtcgcagttaacgatgtggatgtgactaccgaaaatattgaaagagttttgagttgtattcccggcccaatgcaagtgaaactcacttttgaaaacgcctacgatgtaaagcgggagacaagtcatccacgccaaaagaagacgcaatccaatacatccgacctagtcaaactgttatggggcgaggaagtggagggcatacagcaatctggcctgaacaccccacacattattatgtacctgactctccagttggactctgagacttctaaggaggaacaggagattctgtatcactaccccatgtccgaggcttcccagaagttaaagagcgttcgggggattttccttacactctgcgacatgttggaaaacgttactggcacacaggtaacttctagttcattgctccttaatggcaaacagattcatgttgcatattggaaggaatctgataagcttctgttgattgggttacccgccgaggagatagagctgccatcaagcgcccacacgcatggcgaaagaaactag

SEQ ID NO: 121153 - DNA, 2829 bp, synthetic construct
  misc_feature 1..2829: note = Description of Artificial Sequence: Synthetic coding sequence
  source 1..2829: mol_type = other DNA
atggcaagtgtagcttcttgcgactcccgcccctccagcgacgagttgcccggcgatccaagcagtcaagaggaggacgaagactacgactttgaggacagggtgtctgacagcggcagctattcatccgcctcctctgactacgacgatctcgagccagagtggctcgattctgttcagaaaaatggcgaactgttctatctcgaactgtctgaggatgaggaagaatccttgcttcccgagacacctaccgtgaaccatgtgaggttctccgagaatgagataattatcgaggatgactacaaggaacggaagaagtacgagccaaagttgaagcagttcaccaaaatcctgagaaggaagcggttgctgcctaaaagatgcaataagaagaactccaatgacaacgggcccgttagcatcctcaaacatcaatccaaccagaagacaggagtgatagtgcagcagcggtataaggatgtaaacgtgtatgtcaatcctaagaagctgacagttattaaagccaaggagcagcttaaacttttagaggtcctagtgggcatcatccaccagacgaaatggagttggagaagaacgggtaagcaaggcgatggagagcgtttagtcgtacatggcttgctaccaggaggaagcgccatgaagagcggccaggttctgatcggcgatgtgctggttgccgtgaatgacgtcgatgtgaccacagagaatattgagcgggtcctgtcttgcatcccagggcccatgcaggtgaagctcacctttgaaaacgcctatgacgtgaagcgggagacatcccatccaaggcagaagaaaacacagagtaatacttccgatctggtcaaattactttggggtgaagaggtggaagggattcaacagagcgggttgaataccccgcacattatcatgtatctcacgctccagctggactcggagacttcgaaagaggagcaagagatactctaccactatcccatgtccgaggcatcacagaaactaaaatcagtgcgcgggatcttcctgaccctgtgcgacatgctcgagaacgtcaccggcacccaagttacttctagcagtctcctcttaaatgggaagcagattcacgtcgcatattggaaagaaagtgataagctattgcttattgggcttcctgctgaggaagttccgctgccgaggctacgaaacatgatagagaacgtaatccagactctgaaattcatgtatggaagtctcgactctgccttctgtcaaatcgaaaatgttccaagacttgaccatttctttaacctcttttttcaaagagctctccagcctgcaaaactgcactccagcgcttcacccagcgcccaacagtacgacgcttcttctgctgtactgctggataaccttcctggcgtccgatggctgactcttcccctcgagatcaaaatggagctagatatggcactgtccgaccttgaagccgctgatttcgcagagctgtcagaagactactacgacatgcgcagattgtatacaatcctcggatctagtctcttttataagggatatctcatttgtagccatctccctaaagatgatctcatagacatcgctgtgtattgtaggcattactgtcttctgccactggctgccaagcagcgcatcggccagttgataatctggcgcgaggtgtttccacaacatcatttgcgccccctagctgactcatcgacagaagtttttcccgagccggaaggcaggtattttctgctggtcgtgggactgaagcactacatgctgtgtgtactcttagaggccggaggatgtgcgtctaaggccattggctcccccggccccgactgcgtctacgtagatcaggtgaaaactacgcttcaccaactggacggggtggatagcagaattgatgagcgcctagccagctcacccgtaccatgcctctcgtgcgccgactggtttctgactggatctagagagaaaacagatagcctaactaccagcccaatcctctcccggctccagggcacctcaaaggtcgcaacatcccccacgtgcagacgcacactcttcggcgactacagtctgaaaacacgtaaaccctctccctcctgttcttcaggtgggtccgataatggatgcgaaggcggtgaggacgacgggttctccccacatactactcccgatgcggttaggaaacagcgcgagagtcagggcagtgacggcctggaggaatcaggcactctgctcaaggtcacaaagaaaaagagcactctgcctaatcctttccacctgggcaatctaaagaaggatctgcccgagaaagaactagagatctacaatacagttaagttaactagcggacccgagaacacgctgtttcattatgtcgcactggaaacggtacaggggatcttcatcacccccactctcgaggaagtcgcccagctgtccggctcaattcacccgcaactcataaaaaactttcatcagtgttgtctgagcattcgggccgttttccagcagaccctggtcgaggagaaaaagaaaggcctgaacagcggggatcactcagattccgccaaaagcgtgagctccctgaatcccgtgaaagagcacggcgtgttgttcgaatgtagtccgggcaactggactgaccagaagaaagcacctcccgtgatggcctactgggtggttggcaggctgttcctgcacccaaagcctcaggaactatacgtctgcttccacgacagcgtgaccgagatcgctattgagattgcgtttaaacttttttttggactcactctgtag

SEQ ID NO: 121154 - DNA, 2688 bp, synthetic construct
  misc_feature 1..2688: note = Description of Artificial Sequence: Synthetic coding sequence
  source 1..2688: mol_type = other DNA
atgaacaagtccgaaaaccttttgttcgccggctcttctctagcaagccaagtgcatgccgccgctgttaacggcgacaaaggggcacttcaaagactgatcgtgggaaatagcgcgctgaaggacaaagaggatcaattcgggagaacacctctgatgtactgtgtcctcgctgaccgacttgactgcgccgacgccctgctcaaggccggagccgacgtcaataagaccgatcatagccagcggaccgcactgcacttggccgcccagaagggaaactaccgtttcatgaaattgctgttgactcggcgcgcaaactggatgcagaaggacctcgaggaaatgaccccacttcatctgacaaccagacaccgttcacccaagtgtctggcgctgctgttgaagtttatggcccctggcgaggtcgatacgcaggacaaaaacaagcagactgccttgcactggtcagcatactacaataatccagaacacgttaagctccttatcaaacatgacagtaatattggaatccccgatgtagagggaaagattccattgcactgggccgcaaatcacaaggaccctagcgccgtgcatacggtgcgttgtattcttgatgctgcacccacagaatcactcctgaactggcaagattatgaaggccgaacgccactccactttgccgtggcggacggaaatgtgaccgtagtcgatgttctgaccagctacgaatcctgcaacatcacatcctacgataatctcttccgcacgcctctgcactgggctgctctcttgggacacgctcaaattgttcatctgcttctcgaacgaaacaagagcgggacgattccctcggattcccagggtgcgactcccttacactacgcagctcaaagtaactttgcagagactgtcaaagtcttccttaagcaccctagcgttaaggatgattccgaccttgagggccgcaccagtttcatgtgggccgctggcaagggttccgacgatgtcctcaggaccatgcttagcctgaagagcgacatcgatatcaatatggctgataaatatggagggaccgccctgcacgcggcagctctttccggccatgttagcaccgtaaaacttctactggagaacaatgctcaggtggatgccacagacgtgatgaagcacacacctctgttccgcgcatgcgaaatgggccacaaggatgtaatccagaccttgattaagggcggcgcaagagtcgacctggtggaccaggatggacactccctactccattgggctgcactggggggcaacgctgatgtatgccagattctcatcgagaataagattaatcccaacgtccaggattatgccggacggactcctctgcagtgcgcggcttacgggggctatattaactgtatggccgttctgatggagaataatgccgatcccaatatccaggataaggaaggccgaaccgccctgcactggagttgcaacaatggctatctggatgccattaaactgctgctggatttcgcggctttcccaaatcaaatggaaaataacgaagagagatatactcctctggattacgcccttttgggagaacgccatgaggtcatccagtttatgcttgaacacggcgcattgtccatcgccgccattcaggatattgcggcttttaagatacaggcggtctataaaggatataaggtgcgcaaggccttcagggaccgcaagaacttgctgatgaaacatgagcagctgaggaaggatgcagctgccaaaaagagggaggaggagaacaaacggaaagaagccgaacagcaaaagggccgccgtagcccagatagctgccgaccccaggccctgccatgtctaccatctacacaagatgttccatcacgacagtcccgggccccatcgaagcaacccccggcaggaaacgttgctcagggaccagagcctagagattcacgcggaagtcctgggggcagtctggggggggctctccaaaaggagcagcacgtatctagtgatttgcagggcaccaatagccgacggccgaatgaaaccgctcgcgagcacagcaaaggacagtcggcgtgtgtgcacttccgtcccaatgagggctcagatggaagccggcacccaggtgtgcccagcgtcgaaaaatctcgggagctgcgtctccagattatccagcgggagagacgtaggaaggagctattccggaagaagaataaagccgccgccgtcattcagcgggcctggcggtcatatcagctccggaagcatctgtcccatttgcggcacatgaagcagcttggggcaggagacgtagacaggtggaggcaagaatcaacagccttgctcctgcaggtctggcgtaaggagctggaactcaagtttcctcagaccaccgctgtttcgaaggctccaaagtctccttcgaagggaacgtctggcactaagtcaacaaagcacagtgtcctgaagcagatttacgggtgctcacatgagggaaagatccaccaccctacccggagtgtcaaggcaagctccgtgctgaggctgaatagcgtcagcaatctgcagtgtatacacctgctggagaacagcggaaggtccaagaatttctcttataatctccagagtgccacacagcccaaaaataaaaccaaaccctag

SEQ ID NO: 121155 - DNA, 3198 bp, synthetic construct
  misc_feature 1..3198: note = Description of Artificial Sequence: Synthetic coding sequence
  source 1..3198: mol_type = other DNA
atgaataaatctgaaaatctcctgttcgccggatcctccctcgcttcacaggtgcacgccgctgctgttaacggggataagggtgcactccaaaggctcatcgttggtaattctgctctgaaggataaggaggaccagtttggtagaacccccctgatgtattgtgtgttagctgatagactggattgtgccgatgcactgctgaaagccggagcagatgtcaacaagacagaccactcacaaagaaccgctctacacctggccgctcagaaaggaaactatagattcatgaagcttctattgacgaggcgtgctaattggatgcagaaggatctagaggagatgaccccacttcacctcactacgagacacaggtctcctaaatgtcttgcactcctgctgaagtttatggccccaggggaggtcgacactcaggacaagaataaacagacagctctgcattggtctgcttactataacaacccagagcacgtgaagttactgattaaacacgactctaacattggcattcctgacgtggaggggaagatccccctgcattgggccgctaaccacaaggatccatcagccgtccacactgtacggtgtattctcgacgcggccccgacagagagtctgctgaattggcaggattatgaggggcgcacccctctgcacttcgccgttgctgacggtaacgttacagtcgtggacgttctgaccagctatgaatcctgtaacatcacgtcatacgataatttattcagaactcccctgcattgggccgcacttctggggcacgcacagatcgtacacttgctgctggaaaggaataagtctggaacaattccgagcgatagccagggagccacacccctgcattacgctgcccagtcaaatttcgccgaaactgttaaagtgttcctcaagcacccctccgttaaggacgattctgatttggagggtaggacctcctttatgtgggccgcaggaaagggtagtgacgacgtgctgcggacaatgttatctctgaaaagcgacatcgatatcaatatggctgataaatacggaggcaccgcactgcacgctgccgccctgagcggccatgtgtctaccgtgaagctgctgttggaaaataacgcacaggtcgatgccactgatgtgatgaaacacacgccactcttccgcgcctgcgagatgggtcataaggatgtgatccaaacccttattaaaggcggggccagggtcgatttggtcgaccaggatgggcactccctcctgcattgggcagctctcggcgggaatgcagatgtttgccaaattctaatcgagaataagataaaccccaatgttcaggactatgcaggaaggacccctttacaatgcgcggcctacggcggatatatcaactgtatggccgttcttatggaaaataacgctgaccctaatatccaggacaaggaagggcgaactgcgctgcattggagctgtaataacggctatttggatgctattaaactcttactggacttcgccgctttccctaaccagatggaaaataatgaggaaagatacacgccgcttgattacgccttactgggcgaaagacacgaggtgatccagttcatgctggaacacggtgccctgagcatcgccgctatacaggatatcgccgcctttaaaatccaggcagtgtacaaaggatataaggtgcggaaggcatttcgggaccgcaaaaatttactgatgaagcacgagcagctgcggaaggacgcggccgcgaaaaagagggaagaggagaataaacggaaagaggcggaacagcaaaaggggcggcgaagccctgattcttgtagaccccaagcactcccctgtctgccctcaacacaggatgtcccctctcgccaaagcagggctccatccaagcagccccccgccggaaatgttgcccagggacccgaaccacgggattcgcggggcagcccgggtggctcattggggggtgctcttcagaaagagcaacacgtgagttcggatctgcagggaacaaattcgaggcgtcctaacgagactgcccgagagcatagcaagggccagtctgcctgcgtacactttaggcctaacgaaggtagtgatggctcccggcaccccggagtgcccagcgtcgaaaaaagccgcggggagacagctggcgatgaaagatgcgccaaaggaaaaggattcgttaaacagcctagttgtatccgggtcgcaggccccgacgagaagggcgaggatagtcgtcgagctgccgctagcctgcccccgcacgattcgcactggaaaccgagccgcaggcacgataccgagccaaaggcgaaatgcgccccccaaaagagacgtacccaggagctgagagggggacgctgcagccctgcaggaagctccagacctggctccgcccgcggcgaagccgtacacgctggtcagaaccccccgcaccataggacaccccggaataaagtcacccaggccaaactcactggtggcctgtatagccacctgccgcaatctacagaggagctgagatctggtgctcggagactggagacctccaccttgtccgaagattttcaggtgtcgaaagagacagacccagctcctggtcccctgtccgggcaatcagtgaacattgatctgctacccgtggaacttagactccaaattatccagcgagaaagaagacggaaggaactctttcgcaaaaaaaataaagctgctgccgtgatccagagggcctggcgctcctatcaactgcgaaagcacctttcacacctccggcacatgaagcagttgggtgcaggagacgttgatcgttggagacaggaatccaccgctttgttacttcaggtgtggcggaaagagttggaacttaagtttcctcagactacagcagtctctaaggctccaaagtccccttctaaggggacctccgggaccaaatccaccaagcattcggtgctgaaacagatatacggatgttcgcatgaaggcaagatccatcatccaactagatcagtgaaggcaagcagcgtgctacgtctgaattccgtgtccaatctccaatgtattcacctgctcgagaacagcggcagatcgaaaaacttctcttacaaccttcaatccgccacccaacctaagaacaaaacgaagccatag

SEQ ID NO: 121156 - DNA, 306 bp, synthetic construct
  misc_feature 1..306: note = Description of Artificial Sequence: Synthetic coding sequence
  source 1..306: mol_type = other DNA
atgaacaaatccgagaatttgctttttgccggctcctccttggcttcccaagtgcatgccgcagccgttaatggagacaagggggccctgcaaaggctgattgttggtaattctgcactgaaagataaagaagatcagttcggaaggaccccattgatgtactgcgtgcttgccgatcgcctcgactgtgccgatgcattactaaaagctggagctgacgtgaacaaaaccgatcactctcaacggacagccctgcatctcgccgcccagaaggcacttaggacgatctccactggccgtatttag

SEQ ID NO: 121157 - DNA, 2967 bp, synthetic construct
  misc_feature 1..2967: note = Description of Artificial Sequence: Synthetic coding sequence
  source 1..2967: mol_type = other DNA
atgaagctgctattaacgcgccgcgcgaactggatgcaaaaggatctggaggagatgaccccccttcacttgactacccggcacagaagtcccaaatgccttgccctcctgctaaaatttatggcgcccggagaggtcgacactcaggacaagaataagcagactgccctgcactggagcgcatactacaacaatcccgagcatgtcaaactcctaataaagcatgacagcaatatcgggatccccgatgtggaaggaaagatcccattgcattgggccgcaaatcacaaggatccgtccgcagtgcacacagtgcgttgcatactggacgcagcccctaccgaaagtttgctcaactggcaggactacgagggcagaacaccgcttcacttcgccgtggctgatggcaacgtgacagtggtcgatgttcttacatcatatgagtcctgtaacattacgagttacgacaacctcttcagaacaccattgcactgggccgctcttctaggccacgcacagatcgtgcatcttctcctcgaacggaataagtcggggaccattccatcagacagccagggggccacacctttgcattacgctgcccagtcgaatttcgcagagaccgtgaaggtgttcctgaagcacccttccgtgaaagacgactctgacttggaggggcgaacctcttttatgtgggccgccggcaagggttcagacgatgtcctcaggactatgctgagcctgaagagcgatattgacattaacatggcggacaaatacgggggcaccgctcttcatgctgcagccttgtccggacacgtaagcactgtgaaattactcctggaaaataacgcacaagtggatgctactgatgtgatgaagcacactccactgttccgggcatgcgaaatgggacacaaggacgtgattcagaccctgatcaagggaggggcccgcgtggacctcgtggatcaggatggacattctctcctccattgggctgctctgggaggtaatgccgacgtgtgtcagatcttgatcgagaataagataaacccaaacgtgcaggactatgccggtcgtacacctctacagtgtgctgcctatggcggatatatcaactgcatggcagttctcatggagaacaacgctgatccgaacatccaggataaggaaggacgcaccgcactgcattggagctgtaacaacggatatcttgatgctattaaactcttgctcgacttcgccgccttcccaaaccaaatggagaacaacgaggaaaggtacacacctctagactatgcgctcttaggtgaaagacacgaggtcatacagtttatgctggagcatggcgccttgagtatagcagcgatccaagacattgcagcctttaagattcaggctgtgtacaagggttacaaggtgcggaaagcctttcgtgataggaaaaacctcctgatgaaacacgagcagctccgtaaagatgccgcagccaaaaaacgggaagaagagaacaaacgtaaagaggctgaacagcagaaaggcaggcgaagtcctgacagctgtcgcccgcaggctctcccttgtctcccgagcacacaagatgtaccatctcgtcagagtagagcccccagtaaacagccccccgcaggcaacgttgctcaaggcccagaaccgagggatagcagaggatcgcccggtgggtctttaggcggagccctacagaaggagcagcatgtgtcctcagatctgcaaggaacgaactctcgacggcccaatgagacagccagagagcactcaaaggggcagtcagcctgtgtgcacttcagacccaacgaagggtccgacggcagtcggcaccccggggtgccttcagtagaaaaatccagaggcgagacagctggggacgagcggtgtgctaagggaaaaggctttgtgaagcagcccagttgtattcgggtcgccggaccagacgagaaaggtgaagattcaaggcgcgcggccgcttctctcccacctcatgatagtcactggaaacccagcaggaggcatgatacagagcccaaggccaagtgcgctccccagaaacgccgaactcaggagctacgggggggaagatgttcacccgcaggctcatcccgtccagggagtgcccgcggagaagcagttcatgctgggcaaaatccgcctcatcatcgcacaccacggaataaagtgacccaggcaaagttaacgggggggctgtactcacatctgccccagtctaccgaagaacttcggagtggggccaggcgcctggagacaagcacccttagcgaagactttcaggtttcaaaggagacagacccggctccggggcctcttagtggacagtctgtgaacatcgacctgctgcctgtcgaattgcgacttcagatcatacagagggaaaggcggcggaaggagctgtttcgcaaaaagaataaggccgcggctgtcattcaacgggcctggagaagttatcagttacgtaaacaccttagccatctgaggcacatgaagcagctgggagcgggtgacgtcgatagatggaggcaggagtcaaccgccttgctcctgcaggtctggcgcaaagaactagagctaaagttcccacaaacaacagcagtgagtaaagctcccaaatctccaagcaagggcacaagcgggactaaatccacaaaacacagcgtgttgaagcagatttacgggtgttctcacgaaggaaaaatccaccacccgacaaggagtgtaaaggcctcatctgtcctcagactcaatagcgggaaagctgccactgctaaacagatggtgggtaaaaatatgggtaaacacttccccctcttccatcctcaaagacagaagaccttggaacagatttggcccggtttctcgaacggccaccttattagctgggattattattgttcccaacacttgagcccgtag

SEQ ID NO: 121158 - DNA, 3723 bp, synthetic construct
  misc_feature 1..3723: note = Description of Artificial Sequence: Synthetic coding sequence
  source 1..3723: mol_type = other DNA
atgtccgtgaaagaaggggctcagaggaaatgggctgccttaaaagagaaactgggtccccaagattccgatccaaccgaagccaacctcgaatcagctgatcccgaactctgcatacgactgctgcagatgccctctgtagtcaactactctggcctgcgaaagcgcttagaaggatccgacgggggatggatggtgcaattcctcgaacagagcggcctcgatcttctgttagaggctcttgcgaggctgtctggcagaggcgtggccagaatcagcgacgcactcctccagctcacctgcgtctcgtgtgttagagctgtgatgaactcaagacagggcatcgaatacatactgtctaaccagggctatgtgagacaacttagtcaggcactggacacctctaatgtgatggtaaagaagcaagtgttcgaactccttgcagcactgtgtatctattcccccgagggccatgtcctgacacttgacgctctggaccattacaaaacggtgtgttcccagcagtatcggttctctatagtgatgaacgagctgagcggctcagacaatgtcccctacgtggttacactactatccgtgataaacgccgtgatcctaggcccggaagacctgcgagctcgaacgcagctcaggaacgagtttatcgggttgcagctgttagatgtcttggcacgcctgcgggacctggaagacgcagacctgctcatacagttggaggcatttgaggaagccaaggctgaggatgaagaggagctccttcgcgtaagcgggggcgttgatatgagttcccaccaggaggtgttcgccagcttgtttcataaagtatcctgcagccccgtgtctgctcaactgctctctgtgttgcaaggattgctccacctagagccaacattacgcagttcccaattgctctgggaagccctggaatccttagtaaatcgggcagtactactggccagcgatgcacaggagtgtactctagaggaagtggttgagcgattgttgagtgtgaaaggtcggccacggccctcacccctagtaaaggcgcacaagtccgtgcaagcgaatctggaccagtctcagcggggttcttcccctcagaacactaccacccccaaacctagtgttgagggccagcagcctgccgctgccgccgcatgtgagcccgtggaccatgcacaatctgaatcgatccttaaggtaagtcaaccccgcgcactcgaacagcaggcaagtacacctccaccaccccccccacctcctctgctccccggtagctctgccgaacccccccccccccccccccctcctcctctgcccagcgtgggagcaaaggcacttcctaccgcgccacccccgccacccctgccaggcctaggtgctatggcacccccggctcctcctctgcctccacctcttcccggcagttgcgagtttctgccaccgccccctccccccctccccggcctgggctgtccccccccccctcccccgcttctccccggaatgggctggggccctccacccccccctccccctctgctgccctgcacttgctcaccacctgtggcaggcggaatggaagaagtgattgtggcccaagtagatcacgggcttggttccgcctgggtgcctagccatagaagggtgaatcctcccaccctccggatgaaaaagctgaattggcagaaactgccgtcgaacgtcgcacgtgagcataattctatgtgggcatccctgtcttctccagacgctgaagcagtggagccagacttctcctctatcgagcggctttttagcttccctgctgccaaacctaaggagccaaccatggtagccccccgagctcgaaaggagcctaaagaaatcacctttcttgacgctaaaaagtcgctgaacctcaacatttttctaaagcagttcaaatgctctaatgaagaggtcgcagccatgattagagccggcgacacgactaagttcgacgtcgaagtcctgaagcagttgcttaagctgctccctgaaaaacatgagatagaaaaccttcgcgcatttaccgaagagcgcgccaaacttgcctcagctgatcatttctacctgcttcttctcgcaatcccctgctaccagttgagaatcgagtgtatgctgctatgcgagggcgctgctgccgtactggatatggtgcgacctaaggcacaactggtgttggccgcttgcgagagtttactcacttcgcggcagctgcccattttctgccagctcatcctgcggatcggcaattttttaaactacggatcccataccggggacgcagacggcttcaaaatcagcaccctcttaaagttgacagagactaagtctcaacagaaccgcgtgaccctactacatcacgtgttagaggaggctgagaagagccaccctgacctccttcaacttccccgcgacctcgaacagcccagtcaggctgccggcatcaacttagagattatccgctccgaggcctcatctaatttaaagaaactgttagagaccgagcgcaaggtgtctgcttccgtggcagaagtgcaagaacaatacacagaacggctgcaggcctctatttctgccttccgcgccctggatgagctgttcgaagcaatagagcagaaacagcgtgaattagcggactacttatgcgaggatgcacagcagttgagcttggaagacactttctcaacaatgaaggccttcagagatctctttctgcgggcactgaaggagaacaaggaccgcaaagaacaggccgcgaaggccgagcgcaggaagcagcaactcgctgaggaagaggccaggagaccacgcggtgaagacggaaagcccgttcgtaaggggccaggaaagcaagaggaagtctgcgttattgacgccttgctggctgacatacggaaaggatttcagttgaggaaaaccgctagaggccgtggggatactgatgggggatccaaagcggcatctatggatccacccagagccactgagcctgtggccactagcaatccagcaggtgaccccgtcggcagcacacgctgtcctgcatctgaacccggcttggacgcaacaacagccagcgaatcaagaggctgggacctcgtggacgccgtgacaccggggccacagccaaccctggagcagctggaagagggaggtccccgaccgctcgaacggcgctctagttggtatgttgacgcctctgacgtgctaacgaccgaggatccgcagtgcccccagcctctagagggggcatggcccgtcacgctgggcgacgcgcaggcgctcaagccacttaagttttcaagcaaccagccaccagcagcaggatcaagccgtcaggacgctaaagacccaacctctttgctgggtgttcttcaggcagaggccgatagcacaagcgaaggccttgaggatgcagtccactccagaggggcccgcccaccagccgctggcccgggcggcgatgaggatgaggacgaagaagacaccgctcctgagtctgctcttgataccagtctcgacaaaagcttctctgaagacgctgtgactgacagttcaggttctggaaccctgccaagagccaggggtcgggccagcaaaggaactgggaaaaggaggaaaaaacgaccttcaagatctcaggagggcctcaggccccgcccgaaggcgaaatag

SEQ ID NO: 121159 - DNA, 3750 bp, synthetic construct
  misc_feature 1..3750: note = Description of Artificial Sequence: Synthetic coding sequence
  source 1..3750: mol_type = other DNA
atgtctgtgaaggagggcgcccaaaggaagtgggctgcgctgaaagaaaagcttggccctcaggactcggaccccaccgaggcgaatctcgaaagcgctgatccggaactttgcattcgtttactgcagatgccatccgttgtcaactattctgggctaaggaagcgccttgaggggtctgacgggggctggatggtgcaatttcttgaacagtctggcttagaccttctgctcgaggcactggcccgtctctccgggcggggtgtggccaggatcagtgatgccttattacagctcacttgtgtgtcttgtgttagagcagtgatgaactctaggcagggaatcgagtatatactgagcaaccagggctatgttagacagctgagtcaagcgctcgataccagcaacgtgatggttaaaaaacaggttttcgagctactggctgcgctctgtatctattctcctgagggacacgtgctgactctggacgctttggatcattacaagaccgtgtgcagccagcagtatcgtttctccattgtaatgaacgagctaagcggttctgacaacgtgccatatgtggtgactctactgagtgttatcaatgcagtaattcttggtcctgaggatctccgggcacggacccagctacgcaacgagtttatcggacttcagctccttgacgttttggcaaggttgcgtgatcttgaagatgcagatctgcttatacagctggaagccttcgaggaggcaaaggccgaggacgaggaggagctgctgagggtgtccgggggagttgatatgtctagtcatcaggaggtattcgcatcgttgtttcacaaagtaagctgctcccctgtttcggcccaacttctgtccgtgctgcagggcctgctgcacctggagcctacgcttagaagtagtcaacttttgtgggaggcactcgagagcctcgttaatagggcggtgcttctggcctccgacgctcaggaatgtaccctcgaggaggttgtggagaggctcctgtccgtcaaggggaggccacgtccctcgcctttagtcaaggcccacaagtctgtgcaagccaatttggatcagtcacaacgaggcagctctcctcagaataccactaccccgaaaccctctgtagagggccaacagcccgccgccgctgcagcctgcgagcctgtcgaccacgctcagagcgaaagcatccttaaggtttctcagccaagagctctcgaacagcaggcctctaccccaccaccaccccctccgcccccactgctccccggaagtagcgcagaaccgccgcctccaccccctccaccgccactgcccagtgtgggtgccaaggcacttccgactgctccgccccccccacctctccccggtctcggcgccatggcacccccagccccccctctcccccctccacttccagggtcctgtgaattcctcccacccccccctcccccactaccagggctgggatgtccaccacctcccccccctctgctgcccggtatgggctgggggcctccaccacctccaccaccattactgccctgtacctgttctcccccagttgccggtggcatggaagaggtaatagttgcccaagtggatcatggtctgggctctgcttgggtgccctctcaccgcagggtgaatcctccaacactgcgcatgaagaaacttaattggcagaaactgccatccaacgtcgcgagagaacacaatagcatgtgggcttctttgtcgtcccccgacgcggaagctgtggaaccggattttagtagtatcgagagactgttttcctttcctgcggctaagcctaaagagcccaccatggtggcaccccgagcacggaaggaaccgaaggaaatcacattcctggatgcgaaaaagagccttaatttgaacatttttctaaaacagttcaagtgctccaatgaagaagttgcagccatgatcagggctggtgatacgaccaagtttgatgttgaggtgctgaaacagctgctgaagctccttcccgaaaagcatgaaatcgagaacctgcgtgcttttacagaagagagagcgaagctagccagcgccgaccacttctacctgctgcttttagctattccatgttaccagctacgaattgagtgcatgctcctttgcgagggggcggctgccgtgcttgatatggtgcgacccaaagcccagttggtgctggctgcttgtgaatcactgttgactagcaggcaactgcctatattttgccagttaattctccggattggtaacttcttaaactacgggtcccacacaggggacgcagatgggtttaaaatcagcaccctgttgaagctgacagaaaccaaatcccagcaaaaccgagtcaccctgctccaccatgtactagaggaggccgagaagagccatccagaccttttacagttacccagagatctggaacagccttcacaagctgccggaataaatctggaaattattaggtcagaggcctccagcaatttaaaaaagctcctggagacagagagaaaagttagtgctagcgtcgccgaagtgcaagagcagtatacagaacgccttcaagcgtccatcagcgcattccgcgccttggacgaactgtttgaggcgatcgaacaaaagcagcgggaactggcagactacctgtgcgaggacgcgcagcagctgagcctggaggataccttctccactatgaaagcgtttcgggatctgtttcttcgagccctgaaggagaataaggaccgtaaagagcaagctgccaaagcagaacggagaaaacagcagctggccgaggaggaggcaagaaggcctcgcggcgaagatggaaaaccagtgcgaaaggggccaggcaagcaggaggaagtgtgtgtgattgatgctctcctggccgacatacggaaaggtttccaattgaggaagacagctagaggccggggggatactgacggcggaagtaaggctgcgtcaatggacccaccgcgtgccaccgagccagtcgctacatccaatcccgcaggtgaccccgtcggctctacacgctgtccagccagcgagcccggcctcgacgctacaaccgcctctgagtctaggggttgggatctcgttgacgcagtaacaccgggtcctcagccaaccttagagcaattggaggaaggcggaccaagacccttggaacgcagaagcagctggtatgtggatgcatccgacgttcttactacagaggaccctcagtgtcctcaacctctggagggtgcgtggccagtcacactgggggacgcccaagctttgaaaccactcaagttctcttcaaaccagccccccgcagctgggtcctctcgccaggatgccaaggaccccacttcgctgcttggggtccttcaggcggaagctgattcgacttctgagggtttagaggacgctgtccacagtagaggagcacgaccaccagcagccggtcccgggggggacgaggacgaagatgaagaggacaccgctccagagagcgccctggacaccagtctagataagtcattctctgaagatgccgtgaccgactcatcagggtctggaaccttgccaagagctagggggcgcgctagtaaagggaccggcaaacggcgaaaaaagcgcccttcacgctctcaggaggaagtgccccccgacagcgacgacaataaaacgaaaaagctttgcgtgatccagtag

SEQ ID NO: 121160 - DNA, 705 bp, synthetic construct
  misc_feature 1..705: note = Description of Artificial Sequence: Synthetic coding sequence
  source 1..705: mol_type = other DNA
atgtcagtgaaagagggtgcccagagaaagtgggctgctctgaaagagaaactcggcccacaggattccgacccaacagaggccaatctggaaagcgccgatccagaactttgcattagactgctccagatgcccagtgtagttaactattctggattgcgcaagagacttgaaggttcagatggcgggtggatggtacagttcctggaacagagcggtctggatctgctgttggaggccctggcacgactgtctggccgaggggttgctcgcatttctgacgcactcctccagctgacttgcgtgagttgtgttcgcgcagtaatgaatagccgacaaggtatagagtatatccttagtaaccaaggatacgtgcgccagttgtcccaagctcttgatacatccaatgtgatggtcaaaaagcaagtattcgagctgctggccgcactctgcatctatagtccagaggggcatgtcctcacccttgacgccctggatcactacaagaccgtctgctctcagcagtacagattcagcattgtgatgaatgaactctctggatccgacaacgttccatacgtggtaactttgctgagtgttataaatgccgttatcttgggccccgaggatctccgggccaggacacagctgcggaacgagttcatcggtctgcaacttctcgatgtgctcgcgaggctgaggtag

SEQ ID NO: 121161 - DNA, 1758 bp, synthetic construct
  misc_feature 1..1758: note = Description of Artificial Sequence: Synthetic coding sequence
  source 1..1758: mol_type = other DNA
atgtctcagcagcacaccctacctgtaaccttgagtcctgctctctcgcaggaactgttaaagaccgtaccgccacccgtgaacactcatcaggagcagatgaagcagccaactccacttccaccaccctgccagaaagttcccgtggagctgcccgtcgaggtcccttcaaagcaagaagaaaaacacatgacagcggttaaggggctaccggaacaagagtgcgaacagcaacagaaggagccccaggaacaggagttacaacagcagcactgggagcagcacgaggagtaccagaaggccgagaaccctgagcagcaactgaaacaggaaaagacgcaacgagaccagcagctgaacaagcaactcgaagaggaaaaaaaactgctagatcagcagcttgaccaggagttggtgaaacgcgacgagcagttgggtatgaaaaaggagcaactactcgagcttccagagcagcaggagggtcatttgaaacatttggaacagcaggaaggacaactgaaacatcccgaacaacaggaaggtcagctggagctcccagagcagcaagaggggcagctcgagctcccagaacagcaggaagggcagctcgaacttcctgagcagcaggagggccagctcgagctgcccgaacaacaggaagggcaactggagctgcctgaacaacaggagggccagcttgagctgccccaacagcaggaaggccagctcgagctctccgagcagcaggaagggcaactcgaactgagtgaacaacaggagggtcaactgaagcacctggagcaccaggaggggcagcttgaggtcccggaggagcaaatggggcagctgaaatatcttgaacagcaggaaggacagctcaaacatctggaccaacaggaaaaacagccggagctcccggaacaacagatggggcagctcaaacacctggagcagcaggaaggacagccgaagcatctggagcaacaagagggtcaactggaacaactcgaggagcaggaggggcagctgaaacacctcgaacagcaggaaggacagttggaacacctggaacatcaggaggggcagctggggcttccggagcagcaggtcctccagcttaagcagttggagaagcagcagggacagccaaaacacctggaagaagaggagggtcagttgaaacacctggttcagcaggaagggcaacttaagcacctggtgcaacaggaagggcagttggagcaacaggaacgccaggtggagcatctggagcagcaggtgggtcagttaaaacacttagaggagcaggaagggcagctaaagcacctcgagcaacagcagggccagttggaggtgcctgaacagcaggtcgggcagcctaaaaatctcgaacaggaggaaaaacagctggaactaccggaacagcaagaaggccaagtcaagcacctggagaagcaagaggcacagctggagctgccggagcagcaagttggtcagcctaaacacctcgagcagcaggagaaacatctggagcatcccgaacagcaagacggacagttgaagcatctagaacagcaggagggccagctgaaggacttggagcaacagaaaggacagctagagcaacccgttttcgcaccagctccaggccaggttcaggatattcaaccggccctccccaccaagggggaagtcctcctgcccgtggaacatcagcaacaaaaacaggaggtgcagtggccacccaagcacaagtag

SEQ ID NO: 121162 - DNA, 1320 bp, synthetic construct
  misc_feature 1..1320: note = Description of Artificial Sequence: Synthetic coding sequence
  source 1..1320: mol_type = other DNA
atgaaaaaagaacagcttctggagctgcctgaacagcaggagggccacctgaaacacctggaacaacaggaaggacagctgaaacaccccgaacagcaagaaggacaactcgagctgcctgaacagcaggaggggcaactcgaattgcctgaacagcaggaaggacaactcgagcttcccgaacagcaggaggggcagctggaactgcctgaacagcaagaaggccagctggaactacccgaacagcaggagggacagttggagctgccccagcaacaggaggggcagctggagctctccgagcagcaggagggtcagctcgagctttcagagcagcaagagggacagctgaagcatctggaacaccaggagggtcagctagaagttccggaggaacaaatgggtcagctcaagtacttggagcagcaggaaggacagctcaaacacctcgaccagcaagagaaacaaccagaattaccagagcagcaaatgggtcagctcaaacatctggaacagcaagagggacagccaaaacacctcgagcaacaggagggccagctggaacagctggaggagcaagagggccagctgaagcatttggagcagcaggagggccagctcgaacaccttgagcaccaagagggccagctggggttgcctgaacagcaggtcctgcagctgaagcaactggagaagcagcaaggacagccaaagcatctggaggaggaggagggtcagctcaagcatctcgtgcagcaagaaggtcagctgaaacacctggttcagcaggaaggccagttggagcagcaggaacggcaagtggagcacctcgaacagcaggtgggccagctcaaacatcttgaggaacaggaaggacagctgaaacatttagagcagcagcaggggcagctggaggtgcctgaacagcaggtcggccagcctaagaatctggagcaggaggagaagcagctggagttgcctgaacagcaggaagggcaggtcaagcacctcgagaagcaggaggctcaactggaattgcctgagcagcaggtcgggcagcctaaacacctagagcagcaagaaaaacacttagaacacccggaacagcaggacgggcagctgaaacacctggaacaacaggagggacagcttaaagacctcgagcagcaaaaggggcaactcgaacagcctgttttcgccccagcccccggacaggtacaggacatccagcccgcactccctacgaagggcgaggtcctgctccccgtggagcatcagcaacagaagcaggaagtccagtggccgccgaaacacaaatag

SEQ ID NO: 121163 - DNA, 1914 bp, synthetic construct
  misc_feature 1..1914: note = Description of Artificial Sequence: Synthetic coding sequence
  source 1..1914: mol_type = other DNA
atgggcttactctcccaggggagccccctctcatgggaagaaaccaaaaggcatgcggaccatgtgcggagacatgggatcctacaatttcttcacatttaccacgccgtgaaggaccggcacaaagacgtcctcaaatggggtgacgaggtggagtatatgttagtgtcctttgaccatgagaataagaaggtacgactcgtgctgtctggcgaaaaggttttagagaccctgcaagagaaaggagaaaggaccaatcctaatcatcccactttgtggaggccagaatatggcagctacatgatcgagggcactcctgggcaaccgtatggaggaactatgagtgaattcaatacagtggaggccaacatgcgaaaacgaaggaaggaagccacttcgatcctcgaagagaaccaggccctctgcaccattacttcctttccaagactaggatgcccaggtttcaccctgccggaggtgaagccaaatccagtggaagggggcgcaagcaagtccctgttctttccggacgaggccattaacaaacatccgcggttctctaccctgaccaggaacattcggcatagacgcggagagaaggtcgtcatcaacgtccctatttttaaggacaagaacactccttcccctttcattgaaactttcaccgaggacgacgaagcctcccgggccagcaagcctgatcacatttacatggatgcaatgggcttcggaatggggaattgttgtctacaggttacatttcaggcctgctctatttccgaagccagatacctatatgatcagctggccactatttgtcctattgtcatggcgctttctgcggcttctcctttttatcgaggatacgtgtccgatatcgattgcaggtggggggtgatttcagcatcagttgacgaccgaacaagagaggagagaggtttggagccgctgaagaacaacaattaccgcattagcaaaagtcgatacgactccattgattcttatctgtccaaatgcggagagaagtacaacgatattgaccttacgatagataaggagatctacgaacagttacttcaagaggggattgaccatctgctcgcccaacatgtagcccatctgtttattagagaccccctaacattgtttgaagagaagatccatctcgacgacgccaacgagtccgatcatttcgaaaacatccaaagcaccaattggcagacaatgagatttaagccccccccacccaacagcgatattggttggcgtgtggaatttcgcccaatggaggtgcaacttacagattttgaaaacagcgcatacgtcgtctttgtggtgttgctcacccgcgtgatcctgtcctataaacttgactttttaatcccattatcgaaggtggatgagaatatgaaggtggcccagaagcgggacgccgttctacagggtatgttttatttcaggaaagatatctgtaagggcggtaacgccgttgtcgacgggtgcggtaaggctcagaacagtacagaactggccgccgaggagtacactctaatgagcatcgataccatcatcaacggaaaggaaggggtgttcccaggcctgattccaatactcaactcctatctcgagaatatggaagtggatgtggacactagatgttcaatcctgaactatctgaagctaatcaaaaagcgcgcttcaggagaactgatgacagttgcccggtggatgagggagtttattgccaatcacccagactacaaacaagactccgtcattactgacgagatgaactatagcttgatcctgaaatgcaaccagatcgcaaacgaactttgtgagtgcccagaactacttggttccgcttttcgaaaagtgaagtactcgggttctaaaactgatagtagcaactag

SEQ ID NO: 121164 - DNA, 870 bp, synthetic construct
  misc_feature 1..870: note = Description of Artificial Sequence: Synthetic coding sequence
  source 1..870: mol_type = other DNA
atgtattttctgacaccgatcctggtggctatcctctgtattctcgtggtctggatctttaaaaacgccgatagatccatggagaagaagaaaggagaacctaggaccagggccgaagcccggccatgggtggacgaagatctgaaagatagctccgatctgcaccaggccgaggaggatgcggacgaatggcaggagtctgaggagaacgtggaacacatcccgttttcgcacaatcattaccctgagaaagagatggtaaagcgctcccaagagttttacgaattgctcaacaagagacgatccgtccgattcatttcaaacgagcaggtcccaatggaagttatcgacaacgttatccgtacagctggaacagcccccagcggcgcgcataccgagccatggaccttcgtcgtagtcaaagaccctgacgtgaaacataagattaggaaaattattgaggaggaagaggagatcaattacatgaagcgcatgggccatagatgggtaaccgatttgaaaaaattgcgtaccaattggattaaggagtatttagataccgcgccaattctgatactcatcttcaagcaagtgcacggcttcgctgcgaatgggaagaagaaggttcattattataatgagatctcagtgtctatcgcctgtggtattctgttggccgcactgcagaatgccgggttagtcactgttaccacaactccacttaactgtgggccccggctgagggtgctgttggggagaccagcacacgaaaaattgctcatgctcctccccgtgggttatccgtccaaggaggccacggtgccagatcttaaaagaaagcccttggaccagatcatggtgactgtgtag

SEQ ID NO: 121165 - DNA, 813 bp, synthetic construct
  misc_feature 1..813: note = Description of Artificial Sequence: Synthetic coding sequence
  source 1..813: mol_type = other DNA
atgtactttctgacacctattctcgtggccatcttgtgcattcttgtcgtttggatcttcaagaatgcagaccgaagtatggagaagaaaaaaggagagccaagaactagggcggaggcccgcccttgggtggacgaagacttgaaggactcctctgacctccatcaggccgaggaggatgcagacgagtggcaggagtcagaagagaacgtcgaacatattcccttcagccataaccactacccagagaaggagatggtgaaacgatctcaggaattttatgaactgctgaacaaaaggaggtccgtgcgatttatttctaacgagcaggtccctatggaagtaatcgataatgtgattaggactgccgggaccgccccctctggcgcgcacactgagccctggacgtttgtcgtggtgaaggatcctgacgtgaagcacaagatccgcaagatcattgaggaggaggaggagatcaactacatgaagcggatgggccaccggtgggtgaccgatctgaaaaagctgcgtaccaactggattaaagagtatctggacaccgcacctatactgatcttgatcttcaaacaggtccacggcttcgcggcaaacggaaagaaaaaagtccactattataacgagatcagcgtgtccatcgcttgtgggatcttactggcagccctacaagttaacaatgggatcactatgagacaccagactgcccgacataggcaccttatagaagggcccggcagatcatctgaagcctgttcaaagctgagctcgcagggttgccccgggttttattgttag

SEQ ID NO: 121166 - DNA, 744 bp, synthetic construct
  misc_feature 1..744: note = Description of Artificial Sequence: Synthetic coding sequence
  source 1..744: mol_type = other DNA
atgtattttcttactcctatcctggtggctatcttatgcatattagtggtgtggatctttaagaatgcagaccggtctatggaaaaaaagaagggggaaccacgtaccagggcggaggcccgcccttgggtagacgaagatcttaaggatagctctgacctgcaccaagcggaagaggatgctgatgagtggcaggagagcgaagaaaatgtggagcacattcctttcagtcataatcactaccccgagaaggaaatggtgaagcggtcacaggaattctatgaactcctgaacaaacgccggagcgttcgtttcattagtaacgagcaggttcctatggaagtcatcgacaatgtgataagaacagccgggaccgccccctccggcgctcacaccgagccatggacattcgtggtcgttaaggaccctgatgtgaaacacaaaattcgtaaaatcatagaggaagaggaggagatcaattatatgaagaggatgggtcacagatgggtgacagacttaaagaagcttcgaacgaattggatcaaagaatacctcgacaccgcccccattctaatcctaatcttcaagcaggtgcacggcttcgcagccaatggcaagaagaaggtccactactataacgagataagcgtgagcattgcttgtgggattctgctggctgccttgcaggtgtttgggaaaatcatcctcaaggagctggcactgattagctttctgaacctgtag

SEQ ID NO: 121167 - DNA, 855 bp, synthetic construct
  misc_feature 1..855: note = Description of Artificial Sequence: Synthetic coding sequence
  source 1..855: mol_type = other DNA
atgtactttctaactcctatccttgtggcgatactgtgcatactcgttgtgtggatatttaagaacgcggatagaagtatggagaaaaaaaaaggagagccccgtacccgtgccgaggcccggccatgggttgacgaagatttgaaagacagtagcgacctgcaccaagctgaggaggacgccgatgaatggcaggaatctgaggaaaacgttgagcatatccccttttcacacaatcactacccagaaaaggagatggtgaaaaggagccaagaattctatgagctgctaaacaagcggcgctcggtcagatttataagtaacgagcaggtgccaatggaggtgattgacaacgttatcaggacagctgggaccgctccatcaggggcccatacggaaccttggacattcgtggtcgtcaaggatcccgatgtgaagcataagattcggaagattatagaggaggaagaggagatcaactacatgaaacgcatgggccaccgctgggtgacagacctgaagaaactccggaccaactggatcaaagaatacctcgacacagcccccatccttatcctgatctttaagcaggtgcacgggttcgcagctaacggaaaaaaaaaagttcattactacaacgaaatcagcgtctctatcgcttgcggcatcctgctggccgccttgcaagtgaacaacgggatcacgatgcgccatcagaccgccaggcaccgacatctcattgagggcccgggacggagctccgaggcttgctccaagctgtcatcacagggatgtcctggggcaagcgctgctgggagtctgttccattttgcaatcgaatttgctgccccttag

SEQ ID NO: 121168 - DNA, 2850 bp, synthetic construct
  misc_feature 1..2850: note = Description of Artificial Sequence: Synthetic coding sequence
  source 1..2850: mol_type = other DNA
atggaacccccgggccgcagctcaaggtcaaccgcaagccacacgctgcaccaatattgttgtccaacccaggtgctcgactctatgaaattaaccccttcagggcgactcgctgagtcttctgtggagggcgatgcgcccggttccgacttaagcaccgcggtcgactcaccaggtagccaaccaccgtaccggctgtctcaactcccgccaagcagctctcacatgggagggcctcctgccggagtcggactgccttgggctcagagagcccgcctccagccggcatcagtggcattaagaaagcaggaggaagaggagattaagagatcaaaggcactgtcagactcttatgagctttcaaccgacctgcaggataaaaaggttgaaatgctggagcggaaatacggtggaagcttcttaagcaggcgagcagcacgaacaatccagacagcatttcggcagtataggatgaataaaaactttgagagattacgatcctctgctagtgagtccagaatgtctcgccgcattattctgtcaaacatgagaatgcaattttcgttcgaagagtacgaaaaagcacagaatccggcttattttgagggaaaaccagctagcctggacgagggcgccatggccggggcacgctctcaccggctagagcgcgggctcccatatggtgggtcttgtggcgggggaattgacggtggtggttcttctgtgactaccagcggagagttttctaatgatattaccgagctggaagacagtttctctaagcaagttaagtcactcgctgaatcaatcgatgaagccctcaactgtcacccttcaggtccaatgtccgaggagccagggagcgctcagctggaaaagagggagtcaaaggaacagcaggaggactcgtcagctacttcattttccgatctgcccctgtatctcgacgatacggtgcctcaacagagccccgaacgcctgccgagcacggagcctcctccacaggggaggcccgagttttgggccccggccccattgcctcccgtgccaccacctgtaccatccggcacacgagaggatgggagccgcgaagaaggcaccagacgaggacccggttgtctggagtgtcgtgatttcagactccgcgcagcacacctaccattgttaaccatagagcccccatcagacagttctgtagatctgagcgaccgatctgatcgcggtagcgtgcatcgccagctggtgtatgaagccgacggttgctcaccacatggcaccctgaaacacaaagggccccctgggagggcgccaatcccacatcgtcattatcccgcgccagagggtcctgcaccagcccccccaggtcccctaccaccagcccctaacagcggaaccggcccgagcggggttgccggtggtagacgccttggaaaatgtgaagccgcaggagagaacagcgatgggggagacaacgaatctctggagtcgtcctccaactctaacgagactatcaattgtagttctggcagtagtagtagagactctctacgagagcctcccgccactggcctgtgcaagcaaacttaccagagggagactcgacactcctgggacagccctgctttcaacaatgatgtggtccaaaggagacattaccggattgggttaaacctgttcaataagaaacccgagaagggcattcagtacctgattgaacgcggctttttaagcgacacgcccgtgggggtggcacactttatcctcgagaggaagggactttccaggcagatgattggcgagtttctggggaataggcagaagcagttcaatcgcgatgtattggattgtgtcgtcgacgagatggatttctcctctatggatttggacgatgctctcagaaaatttcagtcacatatacgagtgcagggggaggcacaaaaggtggagcgcttaatcgaggcctttagccaaaggtattgcgtctgtaatcccgcacttgtaaggcagtttcgcaatccagatacaatttttattttggccttcgctatcatcctactgaacacagacatgtactcgccgagtgtaaaagctgaaaggaagatgaagcttgatgattttattaagaacttgcggggtgtggacaatggggaggatatacctcgggacctgctcgtgggaatttatcaaagaattcaaggacgagagctgagaacgaacgacgaccacgtctctcaggtccaggctgtggaaagaatgatcgtcggtaaaaaacccgttctgtccctgcctcatcgacgtctggtatgttgctgtcagctgtacgaggtgcctgacccgaaccgaccacaacggctggggctccaccaaagggaggtttttctgtttaacgacttactggttgtcactaaaatcttccaaaaaaaaaaaatccttgttacatactcgtttaggcaaagttttcctctggttgaaatgcacatgcagctgtttcagaactcctattaccagttcgggatcaaactgctgtcggccgttccagggggagagcggaaagtcctcattatctttaatgcgccttcactccaggataggctgaggttcacttccgacctgcgcgagtcaatcgcagaggtacaagagatggagaagtaccgagtcgaatctgaactagagaagcagaaggggatgatgaggcctaacgcgtcccagccaggtggggccaaggactctgtgaacgggaccatggccagatcatccctagaagatacctatggagccggtgacggccttaaacggggggcactgtcttctagcctgcgggacttatcggatgcaggcgtatgctactag

SEQ ID NO: 121169 - DNA, 4437 bp, synthetic construct
  misc_feature 1..4437: note = Description of Artificial Sequence: Synthetic coding sequence
  source 1..4437: mol_type = other DNA
atggaagcggggtcagggccaccaggcggtcccggctccgaatcccccaatcgggcagttgagtacttactggagctgaacaacattattgagtctcagcagcagctcctagaaacccaaaggcggcgcattgaagagctggaaggccagctggaccagttgacacaggagaatagggacctgcgcgaagagtctcaactccatcggggggaacttcaccgtgatccccacggagcccgagactcccctggaagagaatctcaataccaaaacctgcgcgagacacaattccatcatcgcgagttgcgggaatcccagttccaccaggccgcccgagacgttggttaccctaatagggagggagcctatcaaaatcgtgaagcagtgtatcgcgataaggaacgggacgcatcctacccgcttcaggacacaacaggttacacagctagggagagggacgtcgcccagtgccacctgcaccacgagaatcctgctctagggcgggaacgcggcgggagagaagccggcccagcccacccagggcgggaaaaggaagctggatattcggcggcagtaggtgtaggacctcgccctccgcgagaaaggggacagttgagccgcggagcttcccgtagttcttctccgggagcaggtggcggccattcaacctccacctccacatccccagctactactctgcagcgtaacgtagagggtgacgcacccggctcagacttatctaccgcagtggactcccctggctctcagccaccgtaccgactttcgcagctgcccccgtcttcttcacatatgggcggcccgcccgctggggtgggactcccttgggcccagagagccagactgcagccggcatccgtcgcactgcgaaagcaggaggaggaagaaataaagcgcagtaaggcattgtccgacagttacgagttatccacggaccttcaggacaaaaaagtcgaaatgttggagaggaagtacggaggaagctttctgagtaggcgggctgctaggacaattcagaccgcttttcggcaatatagaatgaataagaacttcgaacgtctcaggagcagtgcgtccgaaagtaggatgtcgcgcagaatcatattgagcaacatgagaatgcaattttcctttgaggaatacgagaaagcccagaaccctgcatattttgaaggcaagccagcctccctggacgaaggggcaatggctggggcacgcagccaccgactcgagcgtggactcccttatggcggctcttgtggcggcgggattgatggcggcggtagctctgttactacttccggagaattcagtaacgacataaccgagctggaagactcctttagtaagcaggtgaagtcactggctgaaagcatagatgaggcactgaattgccacccgagcggaccgatgtctgaggagcctggctccgctcagcttgaaaaaagagagtcaaaagagcaacaagaggatagttccgccacaagcttttccgatctgccgttgtacctcgatgatacagtgccgcagcagagcccggagagacttccctctactgaaccgccgccccagggacgcccagaattctgggcccctgcccctctcccacctgttcctccacctgtgccttctggcactagggaggatgggtctcgggaggagggaacccgccgcggacccggctgtctagagtgccgggactttaggttgcgagccgcccacttgcccctattgacaatcgagcctccaagtgattcatccgtggatttgtccgatcgtagtgatagaggcagcgtacatcgacagcttgtctatgaggccgatggttgtagtcctcacggcactcttaagcacaaagggccacctgggcgggccccgatacctcaccgtcactaccctgcccctgaaggccccgctcccgctccaccgggaccactgccaccagcaccaaatagcgggactggcccctcgggggttgcgggaggaaggcggctgggaaagtgcgaggcagccggtgaaaatagtgatggcggggataatgagtcactggagtcctcttctaacagcaatgaaaccattaattgtagcagtggctcctcctccagagattctctgcgggagcctcccgcaacaggcctctgcaagcagacataccagagagagacgcgacactcctgggattctccggcctttaacaacgacgtcgtacagagaaggcactatcgcattggccttaacctgttcaataagaaacctgagaaaggtatacaatatctgattgagcggggcttcctgagtgatacaccggtgggtgtggcacacttcatcctagaaagaaagggcctatctcgacagatgatcggagaatttcttggcaaccggcagaagcagttcaaccgggacgtgctagattgcgtggtggatgagatggacttcagtagcatggacttggacgatgctctgaggaaattccagagccatattagggttcagggcgaggcccagaaggttgaacgactcatagaggcctttagtcagcgatactgcgtttgcaacccagctctagtgagacagtttagaaaccccgatacaatctttatccttgcttttgccattatcctccttaacacggatatgtattcacccagcgtaaaggcagagagaaaaatgaagctggacgattttatcaagaatctgcgcggagtggacaacggggaggatataccgagggaccttctcgtggggatttaccagcgaatccaagggagagagttgaggaccaatgacgatcacgtaagccaggtgcaagctgtagagagaatgattgtgggcaagaagccagtcctgagcctgccacatcgaaggctggtatgctgctgccagctgtatgaggtcccagatccaaatcggccacaaaggcttgggcttcaccagcgtgaggtttttctgtttaatgatttgctggtggtcaccaagatctttcaaaaaaagaaaattcttgttacttactccttccggcagagttttcccctggtggaaatgcacatgcaactctttcagaattcctattaccaattcggaattaaactgttatctgccgtgcccggcggagagcgaaaggtattgattatttttaacgctccttccctccaggacaggttacggtttactagcgatttgcgagagtcaatcgcagaggtacaggaaatggagaaatatagggtcgaaagtgagctggaaaagcagaaggggatgatgcgcccaaacgcatcccagccagggggcgctaaggactctgtgaatggaactatggcgaggtcttctttagaagacacgtatggagcgggggacggactcaaacggggagctcttagttctagtctcagggatctctcagatgcagggaagaggggtcgccgtaactccgtggggtctttggattccactatagagggcagcgtaatcagcagcccacgaccacaccaaagaatgccaccccctcctccaccaccccctccggaagaatataagagtcaacgccctgtaagcaatagctcttcattccttggttccctgttcggatcaaaacgagggaagggccccttccaaatgccccctcccccgacaggtcaggccagtgcaagctcgtcttccgcgtcctcaacccaccaccaccaccatcatcaccatcatggacattctcacggcggactgggggtgctgcccgacggacagagcaaactgcaagcactacacgcccaatactgtcagggccccggtcctgccccgcccccttacttgcctccacaacagcctagcctgcctcctccaccacagcaaccaccgcccttgccgcaacttggaagtatccccccaccacctgcctcagcacctcccgtcgggccacatcgacactttcacgcccatgggcccgttcctgggccacaacactacacccttggaaggccaggccgagctcctcggaggggggctggaggccacccccagttcgcaccccatggtcgccaccccctccaccagccaacgtccccacttcctctctacagtcctgctccacaacatcccccggcccacaagcagggacctaagcactttattttttcgcatcacccccagatgatgcccgccgccggggcggcgggaggcccgggatctcgacccccaggagggagctattcccaccctcaccacccccagagcccgctcagtccacattctccaatcccgccccatccctcctaccccccgctgcctcctcctagccctcatacgccccactcgcctctgcctcctacaagtcctcacgggccattgcacgcttcaggtcctccaggcaccgcgaatcccccgtctgccaaccccaaggcaaagccatcaaggatctccaccgttgtgtag

SEQ ID NO: 121170 - DNA, 4467 bp, synthetic construct
  misc_feature 1..4467: note = Description of Artificial Sequence: Synthetic coding sequence
  source 1..4467: mol_type = other DNA
atggaggctggcagcgggcctcccggcggccccggtagcgagtctcctaatcgcgccgttgagtacttgctcgagcttaataacattatagagtcccaacagcagctgttagaaacgcagcggcgaagaatcgaagagttggaaggacagcttgatcagctaactcaggagaaccgggacctgcgcgaagagtcacaacttcaccgcggcgagctgcatagggaccctcacggagcccgagacagtcctggaagagaaagtcagtaccagaatttgagagagacgcagtttcaccaccgggaacttcgggaaagtcagttccaccaggcagccagggacgtgggttacccaaatagggaaggcgcatatcaaaaccgggaggcagtctacagggacaaagagagagatgcaagttaccctctgcaggacactacaggctacacagcccgggaacgggacgtggcccagtgtcatctgcatcacgagaatccagctctggggcgcgagagaggcgggcgtgaagctggaccagcacaccctggccgggagaaggaggcagggtacagcgcggccgtgggagtgggcccgagaccgccccgagagcgcggtcagttgtcaaggggggcatcgcgcagctctagcccaggggctgggggtggtcactctacctcgacctccactagcccagctacaactctacagcggaaaagcgatggcgagaattcaaggaccgtcagcgtcgagggtgatgcgcctgggtcagatttgagtacagctgtcgactcgccggggtcccaacctccctatcgtctgtcccaactcccaccatcttccagtcacatgggcggacctccagccggtgtaggcctcccctgggctcagagagcccggctgcagccggctagcgtagctctgaggaagcaagaggaagaggaaattaaaagatccaaggctctcagcgatagctatgaactgagtaccgatctccaggacaaaaaagttgaaatgctggaaagaaagtatggagggagttttctgagcaggagagccgcaagaactatccaaacggcattccggcagtatcggatgaataagaattttgagagattgagaagtagcgcatctgaaagtaggatgtcaaggagaattatcctctctaacatgcgtatgcagttctcttttgaggagtacgagaaagcgcaaaatccggcatacttcgaaggaaagcctgccagcctagacgagggtgccatggcaggggcacgttcccacaggttggaacggggactcccgtatggcggcagctgtggaggcgggatcgatggtggcggctctagcgtcaccaccagtggagaatttagtaacgatattaccgaattggaagatagcttctctaagcaggtcaagtccctggccgagtcaattgacgaggctcttaactgtcaccccagcggacctatgagcgaagagcccggttcagcgcaactagaaaagagagaatccaaagagcagcaagaagactcttctgctacctctttctcagatttacccctatatcttgatgataccgtccctcaacagagcccagagcgcttgccttctaccgagcctccacctcagggaagaccagagttttgggcccccgcaccattaccacctgtgcctccacccgtgccgtctggcacccgagaagacggcagccgggaggagggcacccgcaggggacccgggtgcttagagtgcagagacttcagactgcgagctgctcacctgcctcttctgactattgagcctccaagcgacagttccgtcgacctgtccgatcgatccgatagaggcagtgtgcacaggcagctagtttacgaggcagacgggtgcagccctcacggcaccttaaaacacaaggggcccccggggagagctcctatcccacacagacactaccccgccccagaaggacctgctcccgctcctcctggcccactcccacccgccccaaactcaggcaccggcccatccggagtcgccgggggcaggcggttagggaagtgcgaggcagccggcgagaacagcgacggtggggataacgaatccctggagagctcctcaaattctaacgaaaccattaattgttccagtggctctagctcccgtgattccttgagggagccacctgcaaccgggctatgtaaacagacttatcagagagagacgcgtcacagctgggattcccccgcattcaataatgacgtggtgcaaagaagacactatcgtatcgggctgaacctgttcaacaaaaagccagagaagggaatccaatacctgatagagaggggctttttatcggatacccctgtcggtgtggcacatttcatccttgagagaaaaggcctgtcacggcaaatgattggcgaattcctcggtaacagacagaagcagttcaacagagacgtgctggattgcgtcgtggatgagatggacttttcaagcatggacttagacgacgctcttagaaaattccagtcccacatccgcgttcagggggaagctcagaaagtggagagactgatcgaggctttttcccaacgatattgcgtttgcaaccccgctctggtgaggcagttccggaatcccgataccatttttatccttgcatttgccattattttactgaacactgatatgtatagcccctcagttaaggcagagcggaagatgaagctggacgactttatcaagaacctgaggggtgtcgataacggcgaggatatcccacgggatctactcgtgggcatctatcaacggatacagggccgggagctgagaactaatgacgaccatgtgagccaagtgcaggccgtagagcgaatgatcgtcggaaagaagcctgtcctgagcttgccgcatcggcggctggtttgctgctgtcagctctacgaagtgccagatcccaataggccacagaggctgggactgcaccagcgtgaggtcttcttgttcaacgaccttctggtggtcacgaagattttccagaagaagaagatcctggtaacctattctttcaggcagtcattccccctggttgagatgcacatgcagctctttcaaaactcctactaccagtttggaatcaagctcctgagtgccgtgcctggaggtgagcggaaggttttgataatcttcaatgctcctagcctccaggaccggctgcgattcacaagtgatctccgggagagtatcgccgaagtccaggagatggaaaagtacagggtcgaatcagaactagaaaaacagaaagggatgatgcggccaaatgctagtcaaccgggaggcgctaaggatagtgtgaatggaactatggccagatcgtctctggaggatacctatggtgcaggtgatggtctgaagcggggcgctctcagctcttcactcagggatttgagcgacgccggtaaacgaggcagacggaactctgtggggtctctagatagcactatcgaaggctctgtcatcagctcgccccggcctcaccaaagaatgccgcctcccccacctcctccacctccagaagagtacaagagtcagagacctgtgtccaactccagctcttttctgggcagcctctttggctctaagaggggtaagggacccttccagatgccacctccacccaccggtcaggcatcagcatcttcaagtagcgccagttccactcaccatcatcatcaccatcatcatcacgggcattctcatggcggcctaggcgtgctgccggatgggcagagcaagctccaagcattgcatgcccagtactgtcagggacctggacccgccccacccccgtacctgcccccacaacaacccagtctgccccctccccctcaacagccacccccgctgccacagctgggctcaatccctccaccacccgccagtgctcctccggtcggtccccaccggcattttcatgcacacggtccagtgccggggccacagcactacaccctcgggaggccagggagggcacctcgccggggggcaggcgggcacccccagtttgctccccatggccgacatccactgcaccagccaactagtccactgcccctatactctcctgcgccacaacaccccccggctcacaagcagggacctaagcactttatctttagtcatcaccctcagatgatgccagccgcaggtgcagctggggggcccggtagcagaccacccggaggcagctattcccaccctcaccaccctcagtccccactaagtccccattcgcctatccctccacatcccagctatcctcccttgccccccccttccccccacacgccccactcccctctgcctcctacatcaccacacggacctctccatgcctccggaccgccggggacagcaaatcctccaagtgccaatcccaaagcaaagccttctcgaatttcaactgtcgtttag

SEQ ID NO: 121171 - DNA, 3549 bp, synthetic construct
  misc_feature 1..3549: note = Description of Artificial Sequence: Synthetic coding sequence
  source 1..3549: mol_type = other DNA
atggaaagtctgcttgaaaatccagttagggctgtgctgtacttgaaggaactgaccgcaattgtccagaatcaacagtccctcatccacacacagcgggagcgcatagacgaactagaacggagactggacgagttgagcgcagaaaacagatctctctgggagcaccaacaactgctgcaagcgcagccaccgcccggacttgtcccgccttcttcggccccactgcccgcggctccggccacagcccccgctgcagcggcacgcgcccaggaaccgctgcaggatcaagggcagagatccgcagccgccccccaccccgctcccgatcgaccacccaggcagcatcacggacagctgcttgagcagccacagagaggcccagggagccgggcccatactccacaatcccctcacaaacatttgggcacacagggggccgtgaccgataaggagaaggagagaccccccagctgctgtgctgcagcgggagcacttctccaacataaaagcccatccgccttgggaaagggagtgttgtctagaagaccagagaacgagacagtgttacatcagttctgttgtccagccgccgatgcttgcagcgacctggcatcacagtcggacgggtcgtgtacccaagcgggggggggtatggaggattcggtggttgctgcagctgcggtggccgccggaagaccttccgctcacgctcctaaagcccaggcccaagaactgcaagaagaagaagaaaggcctggcgccggggctgccagtccacgggccggcccacagcataaggccagccctggacgccagcaacctgccttggctaccgcgctgtgcccacacgccccagccgcttctgactacgaattgtcactggatcttaaaaataagcaaatagagatgctggaacataagtatggagggcacctggtcagccgcagagctgcgtgcactatccaaacagcattccgccaatatcagctgagcaagaacttcgagaagatccgcaacagcttattggagagtcggttacccagacgcatctctctgagaaaggtgaggagccccaccgctgaatctctggcagccgagaaagcattaatggagggctatggactcgtgggacttccccttgtgcggtccccatccctcccaccaaccttcgccgggaccctcacagagttggaggattctttcacggaacaggtccaatcactggccaagtcaattgacgacgccctctctacttggtctctcaagacaatgtgctccctccgtgaatctggggcctaccagctccatcaggctctgcaggcagcagcaggacctcctggactggaagccgagggacgcgcgcccgagtccgcgggtcccggccctggcgacgatgccgccgagactcccggtttgccgccagctcactccggcacgcttatgatggcatttcgggacgtgacagtccagattgccaatcaaaacatttctgtgtccagctccactgcccttagtgtggctaactgcctaggagctcagactgtgcaggcccctgctgaaccggctgcagggaaagcagaacagggagagacttccggccgtgaggccccggaggcccccgccgtgggcagggaggatgcgagcgctgaggactcctgcgccgaggctgcagcctctggagcggccgacggtgcaacggcacccaaaaccgaggaggaagaggaagaggaagagaccgctgaggtcggccgtggggccgaggcggaggctggtgatttagagcagctgagttcctcgagtacttctaccaaatccgctaagtccgggtccgaagcttctgcctccgcatctaaggacgctctacaggcaatgattctgtcccttccaagatatcactgtgagaaccctgcatcatgtaagtctcctacactgagtacagacactctgcggaaacgcctctacagaataggcctaaatctcttcaacattaaccctgataaaggaattcagtttttgatttctcgcggcttcattccagatacgcccatcggagtagcacactttctgctgcagaggaagggcctgtcaaggcagatgataggcgaatttctgggcaactcaaagaaacagttcaaccgcgacgtcctagactgtgtggtggatgagatggacttttcctctatggaactggacgaggccctgagaaagtttcaagcgcacatccgcgtgcagggggaagcgcagaaggtggagcgactgattgaagccttttcccagcgttattgtatgtgtaatccggaggttgtccaacagtttcacaacccggacaccatatttatattggccttcgccatcattttgctgaacacagacatgtactctcctaatatcaagccggaccgcaagatgatgctcgaggactttattagaaatctcaggggcgtcgacgatggtgctgacatccccagggagttagtggtggggatatacgagagaatccaacagaaagagcttaagagtaatgaggaccatgtgacgtatgttacaaaggtagagaaaagcattgtcggaatgaagacggtgttatctgtgccacaccggagattggtgtgttgctcccgcctcttcgaggttacagatgtgaataagctgcaaaagcaggccgcccatcagagagaggtgtttttgtttaatgacttactggtgatccttaaactgtgtccaaagaaaaaatccagttcaacgtacaccttttgcaaaagtgtgggcctgctgggcatgcaatttcagcttttcgagaatgagtactattcccatggaatcaccctcgtcacacccctcagcggcagcgagaagaaacaggtcttgcatttttgcgccctcggctccgacgaaatgcagaagttcgtagaggacctgaaggagtccattgcggaagttactgaacttgaacagatcagaatagagtgggagttagaaaaacagcagggtactaaaactctgtcttttaagccttgtggagctcagggggatccacagtccaaacagggtagcccaacggccaagcgcgaggccgcactgcgggaacgcccagcagagagcactgtggaagttagcatccataatagactccagacttcccagcacaactcaggcctaggtgctgaacgcggcgcacctgtgccgccccctgacctacagcctagtccaccccgccagcagactcctcctttaccccctccgccgccaacgcctcccgggacactagtgcagtgccagcagatagtgaaagttatcgtccttgacaagccctgccttgcacgaatggaaccgctgttatctcaggccttgtcctgttacacttcatcatcttccgatagttgtgggagcacccctctcggcggacctggtagccccgtgaaggttacccaccagccccctctgcctccaccacccccaccatataatcacccgcaccaattttgtcctcctggaagtttgcttcacgggcaccggtatagtagcgggagcaggtccctcgtgtag

SEQ ID NO: 121172 - DNA, 2280 bp, synthetic construct
  misc_feature 1..2280: note = Description of Artificial Sequence: Synthetic coding sequence
  source 1..2280: mol_type = other DNA
atgcttgagcacaagtatggtggtcacctcgtctctaggagagccgcctgtacaattcaaactgctttccgacagtaccagttgtccaagaatttcgaaaagatcaggaacagcctgttagaaagccgcctccctagacggatctccctgcgcaaggtacggtcaccgaccgcggaatcccttgcggcagagaaagctctgatggaggggtacgggttggtcggcctgcctctggtccgaagcccgtcactgcccccgaccttcgctggcacactgacagaactcgaggattccttcacggaacaggttcagagcctggctaagtccatcgatgacgccctctcaacctggtcacttaaaactatgtgttcattgagagaaagtggggcttaccagttgcatcaagctctgcaggctgcagccggccccccaggactggaggctgaaggaagagcccccgaatctgccgggccgggtcccggtgatgacgcagcagaaacgcccgggctcccccccgcccattcaggaaccctaatgatggccttccgagatgtgactgtacaaatcgccaaccagaatatatctgttagtagtagcacagctctctcagtggctaattgtctcggagcacagaccgtgcaggctcccgcagagccggccgcggggaaggccgagcagggcgaaacaagcggccgggaggcccccgaggccccagccgtggggagagaagacgcatctgctgaggattcctgtgccgaggcggcagcctccggggccgccgatggtgcgactgcaccaaaaaccgaagaggaggaggaagaggaggaaacggccgaggtgggaagaggcgcagaggcggaggcaggggacttggagcagctgagttcttcgagcacgtccaccaagagcgctaagagtgggagcgaagcatccgcttccgcgagcaaggacgccttgcaggccatgattctatctctgccccgctaccattgcgagaacccggcttcgtgcaaatcacccacactgtcaaccgataccctgagaaagaggctgtatcgcatcgggctcaatctgttcaatattaatcccgataagggcatccaattcttaatatcccgtgggtttattcccgacacccctatcggagtggctcacttcctcctgcagcgtaaaggactctcaaggcagatgataggagagttccttggtaattctaaaaagcagtttaatcgagatgtcctggattgtgttgttgacgagatggatttttcatccatggagttggatgaagccttgcgtaagttccaggcacacattcgtgtccagggcgaagctcagaaagttgagcgcctgatagaggcatttagccagagatactgcatgtgtaaccccgaagtggtgcagcagttccacaaccccgacacaatcttcatacttgcatttgctataatattgctgaataccgatatgtactcaccaaacattaaaccggatcgaaagatgatgctcgaggactttatacggaacttacgtggagtagatgacggggcggacatcccaagggagctcgttgtggggatatatgagcggattcagcagaaggagcttaaatctaatgaggaccacgtaacctatgtcaccaaggtggagaagtctattgtcggtatgaagacggtattaagcgtaccccaccggcgcctggtgtgttgtagccggctgttcgaagttacggatgtcaataagttacaaaagcaggcagctcaccagcgggaggtcttcctcttcaatgatctcctggtgattctcaaattgtgccctaagaaaaagagttcttcgacctacacattctgtaagtcggtggggttactcggaatgcagttccagctgtttgagaatgagtattattcccacgggattacactagtgactccactctccgggagtgagaaaaaacaggtccttcacttttgtgctctggggagcgacgaaatgcagaagttcgtggaagatttgaaagagtctattgcagaggtgaccgaattggagcagattcggatcgagtgggagctggaaaagcaacaggggaccaaaaccctttcttttaaaccctgtggtgcccagggcgatccacagtccaagcaagggagcccaacggccaagcgagaggccgctctacgggaaagaccggcagaatctacagtcgaggttctcataaacgccagtccagccaggcttactattctccccattagcagagacacaattaaaagctactgctag

SEQ ID NO: 121173 - DNA, 3549 bp, synthetic construct
  misc_feature 1..3549: note = Description of Artificial Sequence: Synthetic coding sequence
  source 1..3549: mol_type = other DNA
atggagagcttgttggaaaatcctgttcgggctgtcttgtacctaaaggaactgacagctatagtgcagaatcaacagtcccttattcacacgcagcgcgagcgcatagacgaacttgaaaggcggctggacgaactgtcggcagagaacaggtcactctgggagcatcagcagctgctgcaggcccaacctcctcccggattggtcccgccatccagcgccccactgcccgccgctccggcaactgcccctgctgccgctgcccgggctcaggagccacttcaggaccaggggcagcgatcagcagctgccccgcaccccgctccggaccggccaccaaggcagcaccatggtcagctgctcgagcaaccccagcggggccccggctcgcgagcccataccccacagtctccccataagcacctgggcacgcaaggggctgtcacggataaagaaaaggagcgacccccttcttgctgtgccgctgccggagctctcttgcaacacaaaagtccttcagctctggggaaaggggtcctcagtaggcggcccgaaaatgagacggttctccatcaattttgttgtcccgctgctgacgcgtgttcagatcttgccagccaatctgacggaagctgtacccaggccggcgggggaatggaggattcagtggtagccgctgccgccgtggcagccggtagaccatccgcgcacgcacccaaagcccaagctcaagaactccaggaggaggaagagaggcctggcgctggcgccgctagccccagagctgggccgcagcacaaggcctcccctggtaggcaacagcccgctcttgcaaccgccctttgtccccacgcccccgccgcatcggactatgagctttcactcgacttgaagaacaaacagatcgagatgctggagcataagtacgggggccacctggtatcacggcgcgccgcatgtactattcagacagcctttagacagtatcagctgagcaagaatttcgaaaagatccgaaattcactgttggaatcccgactacctagacgcatttctctgcggaaggtcaggtccccaactgccgagtccctggcagccgagaaagctctcatggaggggtatggactggtgggcctcccccttgtgcggtctcccagcctgccccctacgtttgcagggacgctgaccgagctagaggattcttttaccgagcaggtgcagtcactggcaaaaagtatcgatgatgccttgtcaacttggagcctgaagacaatgtgttctttgagggagtcaggcgcatatcagctgcaccaggcactgcaagcagccgcagggccacccggtctggaggcagaaggccgagcaccagaatctgctgggccaggccctggagacgacgctgctgagacccccgggctaccccccgcacatagtggaactctgatgatggcatttcgagatgtgacggtgcagatagctaaccagaacatatccgtctcaagcagcactgccttatcggtggctaactgtttaggcgcgcagacggtgcaggctcccgcggaaccagctgcagggaaggccgagcaaggggagacctctgggcgagaagcccccgaggcgcctgcggtggggcgcgaggacgcctctgccgaggactcttgtgctgaagctgcagcttcgggggcagctgatggagctaccgccccaaagaccgaagaggaagaggaggaggaggaaactgccgaggtaggtcgaggagctgaagcagaggccggagatttggaacagctaagctcttcgtccacatccacgaaatctgctaaatccggcagcgaggcaagtgcctccgcctcgaaagacgcgctgcaggctatgatcctcagcctcccccggtatcattgcgagaatcccgcatcatgtaagagccctactttgagtaccgacactctgcgtaagcgtctgtaccgcatcggcctgaacctgttcaatataaaccctgataaagggattcagttcctcataagtaggggttttattcccgatacacccattggcgtggcacattttcttctgcagcgaaaagggctatcacgacagatgataggtgaattcctcgggaatagcaaaaagcagttcaacagggacgtcttagattgtgtcgtggatgagatggactttagtagtatggagctcgacgaggcactgcggaagtttcaagcccatatcagggtgcagggcgaggcacagaaagtggagcgactgattgaagcattcagccagaggtactgtatgtgcaatcccgaggtggttcaacagtttcataaccccgacacaattttcatccttgcctttgccattatactgctaaatacagacatgtacagcccgaacatcaaacctgataggaagatgatgctggaagattttattaggaacttgaggggagttgatgacggagctgatattcccagagagctggtggttggaatctatgagaggattcagcagaaagaactaaagagcaacgaggatcatgtcacttacgtgaccaaggtggaaaagtccatcgtcgggatgaaaacggtgctttctgtcccccaccgccgcctggtgtgctgtagtcggttgttcgaggttacagacgttaacaaactgcagaagcaagcagcccatcagagggaagtcttcctcttcaatgacttgttggtaatccttaaactgtgtcctaaaaagaaatcctcttccacttatacgttttgtaagtccgttggtctcctgggtatgcagtttcaattgtttgagaatgaatattacagccacggcatcactctggtgactcccttgagcggtagcgaaaagaaacaggtcctccacttctgcgcattgggaagcgacgagatgcagaagtttgtggaagatctcaaagagtctattgctgaggttaccgagctggagcagattcgcatcgagtgggagctggaaaagcaacaggggaccaagactctgtcctttaagccctgtggggcccagggagaccctcagtccaagcagggaagtcccactgccaagcgtgaggcagccctgcgagaaagacctgccgagtcgacagtcgaagtcagtatacacaatcgcctgcagactagccagcacaacagcggcctgggcgccgaacggggggcccccgtgcctccgccggatctgcagccttccccaccgagacagcagaccccgcctctgccccctccgccccctacaccgcctggaaccctcgtgcagtgccagcagatcgtgaaggtcattgtccttgataaaccctgcctggctcgcatggaaccattgctgagccaggccctgtcctgctacacatcttcaagttccgattcttgcggcagtacgccactggggggtccaggtagcccggtgaaagtcactcaccaacctccactcccgccaccacctcctccttacaaccaccctcaccagttctgcccacctgggagtcttctgcatggtcacagatactccagtggctctcgaagcctggtctag

SEQ ID NO: 121174 - DNA, 1797 bp, synthetic construct
  misc_feature 1..1797: note = Description of Artificial Sequence: Synthetic coding sequence
  source 1..1797: mol_type = other DNA
atgaagccgacaggcaccgatccaagaatcctcagcatcgccgccgaagtggcgaagtcacctgaacagaacgttcccgtcattctgctgaaactcaaagagattatcaacattacccccctcggatcctccgagttgaaaaagatcaagcaagatatctactgctacgaccttatccagtactgcttgctggtgctaagccaggactatagcagaattcagggaggctggactacaatctcccagttaacacagatcctcagtcactgctgtgtgggtctggagcctggcgaggacgcggaggaattttacaacgaattgctcccttcagccgctgagaattttctcgttctgggccgtcaactccagacatgctttattaatgccgcaaaagctgaagagaaagatgaactgttgcattttttccagatcgtgaccgatagtctgttctggctgttgggtgggcacgttgaattgatccagaacgtgctgcagagtgaccattttctgcatcttttacaggccgacaatgtacagattggttctgcggtcatgatgatgttacagaatatcctgcaaatcaattccggtgacttactgagaattggaaggaaggccctttactctatcctggatgaggtcatattcaagctcttctctacacctagcccggtaatcaggtcaacagctaccaaactgctgcttctgatggcggaatcacaccaggagattctcattttgctcagacagtcaacctgctacaaaggactgcgccgcctgctgtctaagcaggagactgggaccgaattctctcaagagttgaggcagcttgtcggcttgctcagccccatggtgtaccaggaggtggaagagcagaagctgcaccaggcggcttgcctcatccaagcatattggaagggattccagaccaggaagcggttaaaaaaactccccagcgcagtgatagctctgcaaaggtcgttcaggtctaagagatctaaaatgctgctggagataaacaggcaaaaggaggaagaggatttgaaactgcagcttcagctacaaaggcagagagccatgagattgagccgtgaacttcagctaagcatgctcgaaatcgtgcaccccggtcaggtggagaaacattaccgggagatggaggagaaatctgccctcatcattcaaaaacattggagaggctaccgggaacgcaagaactttcaccagcaacgccagtccctcattgagtacaaggcagccgtgactctccagcgagcagccctgaaatttctggccaaatgccggaaaaaaaagaagctcttcgccccttggagagggttgcaggaactgactgatgccaggagggtggagttgaagaaacgcgttgacgattatgtgcgacgtcacctgggttctccaatgtccgacgtggtgtctcgggagctgcatgcccaggcacaggaacgcctacaacattatttcatgggtcgcgccttagaggagcgagcgcaacagcatcgggaggcattgatcgctcagatatccaccaatgtcgagcagctgatgaaggctccctctcttaaggaagctgagggcaaggaacctgagttgtttttgtctagaagccggcccgtagcagcgaaagccaagcaagcccacctcaccactctaaaacacatacaggctccttggtggaagaaacttggggaagaaagtggagacgaaattgacgtccccaaggatgagctctccattgagcttgagaacctgttcatcggcggaacaaaacctccatag

SEQ ID NO: 121175 - DNA, 1398 bp, synthetic construct
  misc_feature 1..1398: note = Description of Artificial Sequence: Synthetic coding sequence
  source 1..1398: mol_type = other DNA
atgaaaccgacaggaacagacccgagaatactcagcattgccgctgaagtggccaaatcacccgagcagaacgtccctgttatcttgttgaaactgaaagaaattatcaacatcacccctctcggtagttctgaactcaaaaagatcaaacaggacatatattgctatgacctgatacagtactgtctcctggtgctaagccaggattactccaggatccagggagggtggacaactatctctcagctcacacagatactgagtcattgctgtgtcgggctggagcctggggaagacgctgaggagttttacaacgaactcctgccctccgcggctgagaacttcctggtgctgggtcgccaactgcagacttgttttattaatgccgccaaagcagaagaaaaggacgagctcttgcacttttttcagatcgttaccgattcccttttttggcttctgggcggccatgtagaacttatccagaacgtgttacagtctgaccacttcctgcaccttctccaagccgacaacgttcagatagggagtgctgtcatgatgatgttgcagaatatcctgcaaattaaccgaagcaagaggagcaaaatgcttctggagatcaataggcaaaaggaggaagaagatctgaaactgcagctgcagctgcagagacaaagggcgatgaggttgagtcgggagttgcagctgtcaatgctggaaatcgtgcaccctggccaggtggaaaagcattatcgcgaaatggaagagaagagcgccttgatcatccagaaacactggcgcggatatcgagaacgaaaaaactttcaccaacagcggcagtcactcatcgaatataaggcggcggtgaccctgcagagagccgccctgaaatttctcgccaagtgccggaagaaaaaaaagcttttcgccccctggaggggacttcaggagttgaccgacgctagaagggtggagttgaagaaaagggtcgacgattacgtgcgccgccatctcgggtcgcctatgtctgacgtcgtatcccgagagttacacgcccaggcccaagagcgtcttcagcactattttatgggccgggccctcgaagaacgcgctcaacaacacagggaggccctcattgcccagatcagcacaaacgtggaacagctaatgaaagctccaagtctgaaggaagctgaggggaaagaacctgagctgtttctgtctaggtcccgacctgttgctgccaaagccaagcaggcgcacttgaccacgcttaaacatatccaggcgccttggtggaagaagctgggggaggagagtggcgacgaaatcgatgtccctaaggatgagctgtctatcgaactggagaatttatttatcggaggcacgaagccaccttag

SEQ ID NO: 121176 - DNA, 264 bp, synthetic construct
  misc_feature 1..264: note = Description of Artificial Sequence: Synthetic coding sequence
  source 1..264: mol_type = other DNA
atgaaacccaccggaactgaccctaggattttgtcaatcgccgcagaagttgccaagtctcctgagcagaacgtgcctgtcatattattaaagctgaaggaaatcataaatatcactcctctgggaagcagcgagcttaaaaaaataaagcaagacatctattgctacgacttaatccagtattgcctgctcgtgttgtcccaggactactcgcgcattcagggagggtggacaacaatctcacagctgactcaaatcctgtag

SEQ ID NO: 121177 - DNA, 1332 bp, synthetic construct
  misc_feature 1..1332: note = Description of Artificial Sequence: Synthetic coding sequence
  source 1..1332: mol_type = other DNA
atggaggaagactcacttgaagatagcaacctgccaccgaaggtctggcattcagagatgaccgtgtcagttaccggcgagcccccaagcaccgtggaagaagaaggcatcccaaaagaaaccgacatcgaaattatcccggaaattccagaaaccctagaaccgctgtccttgccagacgtcctccgcatttccgctgttctggaggacaccactgatcagctgtcaatactgaattacatcatgccagtgcagtatgaggggagacaatccatctgtgtaaagtcgcgtgagatgaatctggaaggcaccaatctcgataaactgccaatggcttccaccatcactaagatacccagcccactcatcacagaggaagggcctaacttacccgagatcaggcacaggggcagattcgccgtcgaattcaataagatgcaggatctcgtcttcaagaagccaaccagacagaccattatgacaactgagacgcttaagaaaatccaaattgatcgccagttcttcagcgacgttatcgccgataccataaaggagctgcaggattcggcgacatacaattcactgctccaggcactgagtaaggaacgagaaaacaaaatgcacttctacgatattattgctagagaggagaagggacggaagcaaatcatcagcctccaaaaacaacttatcaacgtgaaaaaggagtggcaattcgaagtccagagccagaacgagtacattgcgaacctgaaggaccagttgcaggaaatgaaggcaaagtccaacctggaaaaccggtacatgaagactaataccgaactacagattgcccaaactcagaaaaagtgtaatcgcaccgaagagctcttggttgaagaaatcgagaagctgcgaatgaagaccgaagaagaggctaggacccataccgaaattgaaatgttcctgcgtaaggagcagcagaaactcgaagaaaggctggaattttggatggaaaagtatgataaagacactgagatgaaacaaaacgagctgaatgccttgaaggctaccaaggcaagcgatttggcccacctgcaggatctggccaaaatgattagggagtatgagcaggtcattatcgaggacaggatcgagaaggaacggagtaaaaagaaagtcaaacaggacctcctggagctgaaatccgtcataaaactccaggcctggtggaggggcacgatgatacgacgggaaatcggaggatttaaaatgcccaaagacaaagttgatagcaaagacagcaaaggcaagggcaaaggtaaggacaaaaggcgcgggaagaagaaatag

SEQ ID NO: 121178 - DNA, 165 bp, synthetic construct
  misc_feature 1..165: note = Description of Artificial Sequence: Synthetic coding sequence
  source 1..165: mol_type = other DNA
atggaagaggacagccttgaagatagcaatctccctcctaaggtgtggcattcagaaatgaccgtgtccgtaactggggagcctccctcaactgtagaggaagaaggcattccaaaagagaccgatatagaaattatccccgagatccctgagacacttgagtag

SEQ ID NO: 121179 - DNA, 1332 bp, synthetic construct
  misc_feature 1..1332: note = Description of Artificial Sequence: Synthetic coding sequence
  source 1..1332: mol_type = other DNA
atggaagaggattccctggaagactctaatctgccccctaaggtatggcactcggaaatgaccgtgtcagtcacaggcgagcctcccagcactgtggaagaggaaggcatccccaaagagaccgatatcgaaataatcccagagatacctgagactttggaaccactaagcttacctgacgtgctgagaatttccgctgtgcttgaggatacgacagatcagctcagtattctgaactacatcatgcccgtacaatacgaaggcaggcagtccatttgtgtgaagtcacgggagatgaatttggaaggaactaacttggacaaattgccaatggcaagcaccattactaaaattccttctccattgatcacagaggaaggacccaatctgccagagattcggcaccggggcagatttgccgtcgagttcaacaagatgcaggatctggtattcaagaaaccaacgcgacagacgatcatgactactgagaccctcaaaaagatccaaatcgatcgccagttttttagcgacgttatcgccgataccatcaaggagcttcaggactccgccacgtataatagtctgttgcaagcactgtctaaagaacgggagaataagatgcatttttacgatattatcgcccgtgaggaaaagggacggaagcagatcatctcactacaaaaacagcttatcaacgtcaagaaagaatggcagtttgaagtccaatcgcagaacgaatacatcgcaaatctaaaggaccagctgcaggagatgaaggccaagtctaacttggaaaaccggtatatgaagaccaacactgagttgcagatagctcagacgcagaagaaatgcaaccggacagaggaactccttgtggaggaaattgagaagctaagaatgaaaaccgaagaagaagcgcggacacacacagagatcgaaatgttcttaagaaaagaacagcagaaactggaagagaggttggagttttggatggagaaatacgataaggacacggagatgaagcagaatgagctaaacgctcttaaggcaacaaaggcttccgatctggctcatttacaggatcttgctaagatgataagggagtatgagcaggtgattatcgaagatcgtattgagaaagaacggtctaagaaaaaggtcaagcaggacctcctcgagctgaagagcgttatcaaactgcaggcctggtggcgcggaacgatgatcaggagggagatcggggggttcaagatgcccaaagataaagtcgacagcaaggacagtaagggaaaaggcaaaggcaaggacaaacgcaggggtaaaaaaaaatag

SEQ ID NO: 121180 - DNA, 4974 bp, synthetic construct
  misc_feature 1..4974: note = Description of Artificial Sequence: Synthetic coding sequence
  source 1..4974: mol_type = other DNA
atgtcggctgccgacgaggttgacgggctgggagtggcaaggccacactacgggtccgtactggataatgaaaggttaaccgccgaggagatggatgaaagacgccgtcagaacgttgcctatgaatacctgtgccatttagaggaggccaaacgctggatggaagcctgcctgggcgaagaccttcctccgaccactgagctggaagagggattgcggaacggggtctacctggccaaacttggaaacttcttttctccaaaagtcgtgtccctgaagaagatctacgaccgcgaacaaacccgatacaaagccaccgggctccatttccgacataccgacaatgtgatccaatggctgaacgcaatggatgagatagggctgcctaagatattttacccagagacaaccgatatctatgacagaaaaaatatgccgcggtgtatatactgtattcacgcgctttcgctttacctttttaagttaggtctcgctccccaaatccaggacttgtacgggaaggtggactttaccgaggaagaaatcaataatatgaagacagagcttgaaaaatacggaatccagatgccagcgttctctaaaataggcggaatcctggcaaacgaactctctgttgatgaggctgctctgcatgccgcagtgatagccattaatgaggccattgatcgcagaatccctgccgacacatttgccgccctcaagaatcctaacgccatgttggttaatctggaagaaccattggccagcacttaccaggatatcctctatcaggccaagcaggataagatgaccaatgccaagaaccgcaccgagaactccgagagagagcgagatgtatacgaggagctgctgacccaggccgagattcaggggaacatcaacaaagtgaacacgttcagtgcactggcgaatatcgatctcgccctggaacagggtgacgccttggccttattccgcgccttgcagtcccccgcgctaggacttcggggcttacagcagcaaaatagtgattggtacctcaaacagctgctgtcagacaagcagcagaaacgccaaagcggacagacagaccccctgcagaaagaagagctgcagtccggagttgatgctgccaatagtgcggctcagcaatatcagcggcgactcgcggctgtggccctgattaatgcagcaatacagaagggcgtggctgaaaagaccgtactggagttaatgaaccctgaagcccaattgccgcaggtatacccttttgcagcggatctgtaccagaaggagctggccacccttcagagacagagtcccgaacacaatcttacacatcccgagttaagcgttgccgtcgagatgcttagttctgtggccctaatcaaccgtgccctggaatccggagatgtgaatactgtgtggaagcagctaagttccagcgtgaccggactaacgaatatcgaggaagaaaactgtcagagatacttggacgagctcatgaaactcaaggctcaggcccacgccgaaaacaatgaattcattacatggaacgacattcaggcgtgtgtcgatcacgtcaatttggtcgtccaggaggagcacgaaaggatcctcgctataggcttaataaatgaagcactggatgagggggatgcgcaaaagacactccaggccctccaaatacccgcagccaagttggaaggcgtcctggctgaagtggcgcagcattaccaggacacactgatcagagcaaagcgggagaaagcccaggagatccaagacgaaagcgcagtattgtggctggatgaaatacagggcgggatttggcagagcaacaaggatactcaggaggcccagaagttcgccttggggattttcgccatcaacgaagctgttgagtctggcgatgtgggcaagactttaagcgctctgcgctcgccggatgtaggcctgtacggtgtgatccccgagtgtggggaaacatatcacagtgatctagccgaggctaagaaaaaaaaattagcagtgggcgataacaacagcaaatgggtgaaacattgggtcaaagggggctactactattaccacaatttggagacccaagaaggcgggtgggatgagccccctaacttcgtgcaaaatagtatgcaattgtctagggaagaaatccagagcagtatctcaggggtgactgccgcttacaatcgcgaacagttgtggcttgcaaacgagggcctgatcacccgactgcaggcccggtgccgcggctaccttgtgagacaggaattccgctcccggatgaacttcctcaagaaacaaatccctgcaatcacgtgcatacagagccaatggagagggtacaaacagaaaaaggcatatcaagaccggctggcctatctgcgctcccacaaagatgaagtagtcaaaattcaatccctagctagaatgcatcaggcaagaaaaagatatagagatcgcctgcagtacttcagggatcacattaacgacattataaagattcaggcgttcatccgggcaaacaaagctagggatgattacaaaaccctcattaatgctgaggatccgccgatggtggttgtccgaaagtttgttcacctgctggatcagtcagatcaggactttcaggaagagcttgatctgatgaagatgagagaggaagtcataaccctgatcaggagcaaccaacagttggaaaatgatctgaatctcatggacattaagatcggcctgctagtgaagaacaaaatcaccctgcaggacgtcgtgtcacactccaaaaagctgaccaagaagaataaagagcagctgtccgacatgatgatgatcaacaaacaaaaaggtggcctgaaggccctgtcgaaagagaagcgggagaaactagaggcttaccagcatctcttctatctcctgcaaacaaacccaacgtacctcgccaagctgattttccaaatgcctcaaaataagagcacgaagtttatggatagcgtgatttttactctttacaattacgcttcaaaccagagagaggaatatctgctcctccgcctgttcaaaacagcgcttcaggaagaaatcaaatcgaaagtggatcagatacaggaaattgtgacaggtaaccctactgtgattaagatggtcgtgagttttaacagaggcgcccgcgggcagaacgctttacgccagatcttggcccctgtggtgaaggaaatcatggatgacaaaagtcttaatataaagaccgatccggttgacatctataagtcttgggtgaaccaaatggaatcacagacaggagaagcttcgaagttgccctatgacgtgacacccgagcaagccctggcccatgaagaggtgaagaccaggttagattctagcattcgaaacatgagagctgtcactgataagttcctctctgccatcgtgtcctcagtcgacaagatcccatacggcatgagatttatagctaaagtgctcaaagattccctgcacgaaaaattcccggacgccggcgaagacgaacttttgaaaatcatcggaaacttgctttactatcgctacatgaaccctgccattgtagctccagacgccttcgacattattgacctatctgcaggcggccagttgactacggatcagcgtaggaacctgggttccatcgccaaaatgctccagcatgctgctagcaataagatgtttctgggcgataacgcccaccttagcattatcaacgaatacctctctcaatcttatcagaaattcaggcgattcttccagacagcctgcgatgtaccggagctccaggataagttcaatgttgacgaatactctgatttggtgacactgaccaagcccgtgatttatatttctataggggaaattattaacacccatactctcctgctggaccatcaagacgccatagctccggaacacaacgacccgatccacgagctcctcgacgatttaggggaggtccccaccattgagagtttaatcggcgagtcctcgggtaacttgaatgaccctaataaggaggccctggcaaaaaccgaagtgagcctcactcttacaaacaaatttgacgtccctggggacgagaatgcagagatggatgcacgaacaattctactcaacactaaacgactgatcgtagatgttatcagattccaacccggtgaaactttgaccgaaatcttggagacacccgctacgtccgagcaggaggctgaacatcagcgggccatgcagaggcgcgctatccgggatgccaagacgccagataagatgaaaaaatcaaagtcagtgaaagaagactctaatctcacactccaagagaagaaagagaagattcaaacgggtttaaagaagctgaccgaacttggcaccgtggatcctaaaaataaatatcaggagctcatcaacgacatcgctagagatattagaaatcagagaagataccgtcaacgccggaaagctgagctggtgaagctgcaacaaacttatgctgcgctcaacagcaaagccaccttctacggcgagcaggtagactactacaaatcttatatcaagacatgtcttgacaatctggcctctaaggggaaggtgagcaagaagcctcgggagatgaaaggcaaaaagtcgaaaaaaatatccctgaaatacaccgcagctagactccacgagaagggagtcctcctcgagatagaagatttgcaggtaaaccaatttaagaatgttatctttgaaataagccccaccgaggaggtgggcgactttgaggtcaaagcaaaattcatgggcgttcagatggagaccttcatgcttcattatcaggaccttcttcaactgcagtacgagggcgtagccgttatgaaacttttcgatcgcgctaaagtcaatgtgaatctcctgatttttcttcttaacaagaagttttacgggaaatag

SEQ ID NO: 121181 - DNA, 4728 bp, synthetic construct
  misc_feature 1..4728: note = Description of Artificial Sequence: Synthetic coding sequence
  source 1..4728: mol_type = other DNA
atgccccacgaggagctcccgagccttcagcgcccgcgctatggttccatcgtggacgacgagagattgagcgcagaagagatggacgagcgtcgtagacaaaatatcgcatacgagtacctctgtcacctggaggaggccaaacggtggatggaagtatgcttggtagaagaactgccccccacaacagaactggaggagggacttaggaacggcgtctatttagctaaactcgccaagtttttcgcaccaaaaatggtgtccgagaagaagatctatgacgtcgagcagacacgctacaagaagtcgggtctgcactttcggcatactgacaacaccgttcaatggctccgagccatggaaagcatcgggcttcccaagatattttatccagaaacgacagacgtctatgatagaaaaaatatccctcgtatgatatattgtatccacgccctgtcgctctatttatttaagctcggtatcgctccccaaatccaagatctgctcggcaaggtggattttaccgaagaggaaatcagcaatatgcgcaaggaattggaaaagtatggaattcagatgccctcattctccaaaatcggcggcattctcgccaacgaacttagcgtcgatgaagccgcacttcacgccgcagttattgctatcaacgaggccgtagagaaaggtattgccgagcagactgtggttactctcagaaacccaaatgccgtcttgaccctggtggatgataacctggcaccagagtatcagaaggaactatgggacgccaagaaaaagaaagaggaaaacgcacgacttaagaactcctgcatttccgaggaggaaagagatgcttacgaagaactgctgacccaggccgagatccagggaaatattaataaggtgaatagacaagccgccgttgatcatataaatgctgtgattcctgaaggcgaccccgaaaacaccctccttgcactgaagaagccggaggcccagttgcccgcagtctatcccttcgcggccgcaatgtaccagaacgaactgtttaatctccagaagcagaacaccatgaattacctcgcacacgaggaactgctcatcgcagtcgagatgctatctgcagtagcacttcttaaccaagcattagaatctaatgacttggtaagtgtgcagaaccaactgagatctcccgcaataggcctgaacaacctggataaagcgtacgtggaaagatatgccaatacgctgctttcagtgaagctcgaggtgctgagccagggacaggataacctgagttggaatgaaatacaaaattgtattgacatggtcaatgcgcagatacaagaagaaaatgatagggtggtggccgttgggtacatcaatgaggcaatcgatgaagggaaccccctgaggacactcgagacactgctgttgccgaccgccaacatcagcgatgtcgatcctgcccatgcacagcattaccaggacgtgctctatcatgccaagtctcagaaacttggcgattccgaatctgtgagcaaggttctgtggttggacgaaattcaacaagcagtagacgacgcgaacgtagacaaggaccgtgctaaacagtgggtcaccttagtggtcgacgtcaatcagtgtctggagggcaagaagtcatcggacattctgagtgtgctgaagtccagtaccagcaatgcaaatgacatcatccccgagtgcgcagacaaatactacgatgcccttgttaaggccaaggaattgaagtctgagagagtgtcctctgacgggtcctggctgaagcttaatctgcacaaaaaatacgattattactataatacagattctaaggagtcatcctgggtgacccctgagagctgcctttacaaagagagctggctgactgggaaagagatcgaggacatcatagaggaagttacagtcggctatattcgggagaacatctggtcagcttcagaggaacttttgctgcgttttcaggctacaagctccgggcccattctgcgggaggagtttgaagcaagaaaatccttcttgcatgaacaagaggaaaacgtggtcaaaatccaggccttttggaaaggatataagcagagaaaggagtatatgcacagaagacagaccttcatcgataacacggactcaatcgtgaaaattcagtcttggttccgaatggctaccgccaggaagtcctacctctccagacttcagtactttcgagatcacaataacgaaattgtgaagatccagtctcttctccgtgcgaacaaagccagagacgactataagaccttggtggggagtgagaaccccccacttaccgtgattcgcaagttcgtttacctgctggatcagagtgacctggactttcaggaagagctggaagtcgcccgcctgagggaggaagtggtgacaaagatccgcgccaatcagcagctggaaaaggacttgaacctgatggacataaagatagggctgctggtaaaaaacagaatcacactcgaagatgttatcagccacagtaaaaaactgaataagaaaaaaggaggcgaaatggagatccttaataacaccgacaaccaaggcatcaagtcgctgtctaaggagcgtcgcaagacgttggagacataccagcagctattttacttgttgcagaccaatcccttatatctcgctaaactcatcttccagatgcctcagaataagagcacgaagtttatggatactgtgatatttacactgtacaactatgcgtccaaccaaagagaggagtatctcttgctcaagctgttcaagacagctttggaagaggagatcaaatcaaaagtggatcaagttcaggacatcgttactgggaacccaacagtcatcaagatggtggtctcattcaatcgcggagctcggggacagaacactttaagacagcttcttgcccctgtagtgaaagagatcatcgatgataagtctctgattattaacaccaatcctgtggaggtgtacaaggcatgggtgaaccagctggaaacgcagaccggagaggcaagcaaattaccatatgacgttacaactgaacaggcactgacgtaccctgaggttaaaaacaaactcgaagccagtattgaaaaccttcgaagagtcactgacaaagtcctaaacagtatcatctcatctcttgatctgctcccttatggactgagatatatagctaaagttcttaagaatagtattcacgaaaagtttcccgatgcgaccgaagatgagctcctgaaaattgtggggaacctcctctattatcggtacatgaaccctgccatcgttgccccggatgggtttgacattatagacatgaccgctggcggtcaaatcaactccgaccagcggcgaaatctgggatccgtggctaaggttctacaacatgccgcctccaataagttgtttgagggcgaaaatgaacacctgtctagtatgaacaattatctaagcgagacttatcaagaatttcggaaatatttcaaagaagcctgtaatgtgcccgagcctgaggagaaatttaatatggataagtataccgatttggtaaccgttagtaaaccagtgatctatatctcaatagaggagatcatcagcacccacagcttgcttttggaacaccaggacgcaatagctcccgaaaagaatgacttgctgtctgagctactcgggtcacttggggaagtccccacagttgagagtttcctaggggagggtgccgtggacccgaatgatccaaataaggccaataccctgagccaactcagtaagaccgagatatctctcgttctaacctctaagtacgacatcgaggatggcgaagccatcgactcacgaagtctcatgataaagacaaaaaagctgatcatagacgtgatccgcaatcagccaggaaatacactcacagaaatcctggagactccggccaccgcgcaacaggaggtggatcatgccactgacatggtgtcccgcgcaatgatcgactcccgcacaccggaagaaatgaaacactcccagtcgatgatcgaggatgcacaacttcctctggagcagaagaaaagaaaaatacaaaggaacctgcggactttggaacagaccggccacgtttcttcagagaataaataccaggatattctgaacgagattgcgaaagacatccggaatcagcgcatttacagaaaactccgcaaggccgaactagcaaaattacagcagacgcttaacgcccttaataagaaagctgcattctatgaagaacagatcaattactatgacacctatataaaaacctgcttggacaatttgaaacgcaagaacacaagacggtcaattaaactggatggcaaaggcgagccaaagggagctaaacgggctaagcccgtgaagtatactgcggctaaattgcatgaaaagggggtcttgttggacatcgacgacctgcaaactaatcagttcaagaatgttacgtttgacattattgctaccgaggatgtaggaatcttcgatgtcagatctaaattcctaggcgtggaaatggaaaaagtgcagcttaatattcaggacctcctccagatgcaatacgaaggcgttgctgtgatgaagatgtttgataaggtaaaggtgaacgttaatctgctaatctatctgcttaataaaaagttttatgggaagtag

SEQ ID NO: 121182 - DNA, 3234 bp, synthetic construct
  misc_feature 1..3234: note = Description of Artificial Sequence: Synthetic coding sequence
  source 1..3234: mol_type = other DNA
atggtgaacgcccagatccaggaagaaaacgacagagttgtggcagtcggatacattaatgaagctatcgatgaggggaaccctctgaggacacttgagaccctgctgctgcccactgctaatatttctgacgttgatccggctcacgcgcagcattaccaggacgtactttaccacgccaagtcccagaaactgggcgactccgagtcggtgtccaaagtgctgtggctagacgaaatccagcaggcagtggatgacgctaacgtggacaaggacagggccaagcagtgggtgacattggtggttgacgttaaccaatgcctggaggggaaaaagtcaagtgatattctgtccgtgctaaagagctctacttctaatgcaaacgatattatccctgagtgtgccgacaaatactatgacgctctggtcaaagccaaagagctcaaaagtgagagagtgtccagcgacggctcatggctcaagctgaacttgcacaagaagtatgactattactacaacacagactctaaggaatctagctgggtaacacctgaatcatgtttatacaaggagtcgtggcttacaggcaaagagattgaagcattttggaagggttacaaacagcgtaaggagtacatgcacagaaggcagacctttatcgataatacagattctattgtcaagattcagtcttggtttaggatggcaacagcacggaagtcatatctctccaggttacagtatttccgggaccacaacaacgagatcgtgaagatccagtcattactgagggctaacaaggcaagggatgactataaaacactggtcggaagtgagaatccccctctcacggtgatccggaagttcgtttatttactggaccagagcgacctggatttccaggaggagctcgaggtggcccggctccgggaagaagtggtgactaagattcgggccaaccagcagctggagaaagacctgaacctcatggacatcaagatcggtttattagtgaagaaccggattacactcgaagacgttattagccactccaagaaactcaacaagaagaagggaggcgaaatggagatactcaataacacagataaccaaggtattaagtctctttctaaggagcggcgcaaaactctggagacataccaacagctgttttatctgctgcagacgaaccccctttatctggcaaagctaattttccaaatgccacagaacaagagtacgaagttcatggacaccgttatcttcaccctctacaattatgctagcaaccagagagaagaatatctcctcctgaagttatttaaaaccgcactggaagaagagatcaagagcaaggtcgaccaagttcaggatatagtgacaggcaacccaactgtgattaaaatggtggtgtcattcaacagaggggcaagaggacagaacacgcttagacaattgctagcacccgttgtcaaggaaattattgacgataagtcgctcatcattaacacaaatcccgtggaggtgtataaggcgtgggttaatcagcttgaaacacagacgggtgaggcaagcaagctcccttacgatgtgacaaccgagcaagcactcacgtatccagaggttaaaaacaaacttgaggcttccatagaaaatctgagacgcgtgaccgacaaagtactgaatagcattatttctagcctggaccttctcccctacggcctgagatacattgccaaggtgctcaagaactcaatccatgagaagttccctgatgcaaccgaagacgaattgcttaagattgtcggcaatcttctgtactatagatatatgaacccagctatcgttgcgcccgacggatttgacattatagatatgacagccggaggtcagatcaactccgaccaaagacggaatctcggctctgttgcaaaggttctacaacacgcagcaagtaacaagctctttgagggcgagaatgaacacctctcatctatgaataattacctgtccgaaacttaccaagagttccgcaagtattttaaagaggcatgcaacgttccagaacccgaggaaaagttcaacatggacaaatacacagatctggtgacggtcagtaagcctgtcatttatatcagtattgaggaaattatttcaacacatagcttgcttctagagcatcaggatgctatagccccagaaaaaaacgatttactgtcagagctactgggatcactgggggaggtcccgacagtagagtcttttttaggagaaggggcagtagaccctaatgatccaaacaaagcaaacaccctgtcacagttgtctaaaaccgaaatctctcttgtcttaacaagtaaatatgacattgaagatggagaggcgatcgatagtcgcagtctgatgattaagactaaaaaactgatcatcgatgttatccgcaaccagcccggcaatactttaacagagatcttggaaactcccgcgaccgcccagcaagaagtggaccacgcgacagatatggtgtccagagccatgatcgattcccggacccccgaagaaatgaagcattcccagagcatgattgaagatgcacagcttccgctggaacagaagaagagaaagattcagaggaacctccggacactcgaacaaactggccacgtcagttctgagaataagtatcaggatatcctaaatgaaatcgccaaagacattagaaaccagcgcatttaccgaaagctcaggaaggctgaactggccaaactgcagcagactcttaacgcattaaacaagaaggctgccttctacgaggagcaaattaattactacgacacttatataaagacctgcctcgacaacctcaaacgcaagaacacccgacgctccattaaactagacggcaaaggtgagccaaagggtgccaaaagagctaaaccggtgaagtatactgccgccaagctgcatgaaaagggcgtcctgttggacatcgacgatcttcagacgaaccagtttaagaatgtgacatttgatattattgccactgaggacgtgggaatctttgatgtgcgaagtaagtttctcggcgtcgaaatggagaaggtccagctgaatattcaagacctcctgcagatgcaatacgagggggtggccgtgatgaagatgttcgataaggtgaaggtcaatgttaatctccttatctacctattgaataaaaagttttatggcaagtag

SEQ ID NO: 121183 - DNA, 3216 bp, synthetic construct
  misc_feature 1..3216: note = Description of Artificial Sequence: Synthetic coding sequence
  source 1..3216: mol_type = other DNA
atgcacagcctaccaggagtcgttgcagtgggatacatcaatgaagccattgatgaaggaaaccctcttcggactctggagactcttttacttccaaccgcgaatatcagtgacgtagacccagcccacgcccagcactaccaagacgtgctctatcacgccaagtcacagaaactgggggactcggagagcgtttctaaggtgttgtggttggatgagattcagcaagctgtggacgatgcaaacgtggacaaggaccgtgccaaacagtgggtcacgctggtggtggatgtgaaccaatgtttagagggcaagaagtccagcgatatcttaagcgttctaaagtcaagtacaagcaatgctaatgacataattccagagtgcgctgacaagtactatgacgctctcgttaaggccaaagagctcaaaagtgaacgagtgagctcagatggtagttggctgaaactcaatctgcacaagaaatatgactactattacaacaccgactccaaagagtccagttgggtgaccccggaatcatgcctgtacaaggagtcttggctaactgggaaagaaattgaggccttctggaaagggtacaagcaacgcaaggagtatatgcacaggcgccagacattcattgataacacggactccattgtcaagatccagtcgtggttcagaatggctacagccaggaagtcatatctctcgcggctacaatatttccgcgatcataataatgaaattgtcaagatccagagcctcctgcgcgctaataaggcacgagatgattataagaccctcgtcggcagcgaaaacccaccgctgacggtaatccgaaagtttgtgtatctcttagaccagtctgatctggactttcaagaggagctggaagtcgctaggcttcgggaggaggtcgtgactaagataagggcaaatcagcagctcgaaaaagacctcaacctaatggacattaagataggcctgctggttaaaaatcgaatcaccctcgaggacgttatctctcacagcaagaaattgaacaagaagaaaggtggagagatggaaatcctcaacaatacggataatcaggggattaaaagtttgagcaaggaacggagaaaaacactggaaacctatcagcaactcttctacctgctccagacaaatcccctgtaccttgcaaaactcattttccagatgccacaaaataagtcaacgaaattcatggacacagtcatctttaccctgtataattacgcctcaaaccagcgcgaggaatatctgctattaaaactctttaagacggctcttgaagaggagatcaaatccaaggtcgaccaggttcaggacatcgtgaccggtaacccaaccgttatcaagatggtggtgtcattcaatcggggcgcccgtgggcaaaatactctgcgccaattactggcacctgtggtcaaggaaattatcgatgataaatctctgattatcaataccaatcctgtcgaggtttacaaggcctgggtgaaccagctcgagacccagactggggaagcctcaaaactgccgtacgatgtgaccactgagcaggccctgacctatccagaggtgaagaacaaacttgaggcatcgattgaaaacctgcgaagagtcacggacaaggtcctgaactcaatcatctcgtcacttgacctcctaccgtacggcctccggtacattgctaaagtcctgaagaatagcatacacgagaagtttccagacgccaccgaggatgagctgttgaagattgtgggaaacctgctgtattatcggtacatgaaccctgccattgtggccccggacggtttcgatattatcgacatgactgcggggggccaaatcaactccgaccagcggaggaacttggggtcagtggctaaagtgctgcagcatgcggcgtctaataagttgttcgagggtgaaaacgaacacctgtcaagcatgaacaactacctttcagagacttatcaggagttccgaaaatatttcaaggaggcttgcaatgtgcctgagccagaggagaagttcaacatggataagtacactgatctggtaaccgtatctaagcccgtcatatacatttccattgaagagattatttcaacgcacagcttgctgcttgagcatcaggatgccattgcccccgagaagaacgacctgctttccgaacttctcggctcgctgggcgaagttccaacagtggaaagtttcctgggggagggagccgtagaccctaacgatcccaataaagccaatacacttagccagctgtccaagaccgaaatttcccttgttttgactagcaagtacgacattgaggacggggaagcaatcgactcaagatccctcatgatcaaaacgaagaagctgattatcgacgtgatccgcaaccaacccggtaataccctcaccgaaatcctggaaaccccggcaaccgcacagcaggaagtcgatcacgccactgacatggtgagtagggctatgatcgatagccggacccctgaggaaatgaaacactcccagagcatgattgaagatgcacagttgcccctcgagcagaagaaaaggaagatccagcgaaatctgcggaccttggagcaaacaggccatgtctccagtgaaaacaagtaccaggacatcctgaatgagatcgcaaaggatattagaaatcagcgcatctaccggaaattacggaaagcggaactggcaaagttgcagcagacactcaacgccctgaataaaaaggcggctttctacgaagagcagataaactactatgacacttacataaaaacctgtctcgacaacctgaagcgcaagaatacccgccgctctatcaaacttgacggaaaaggcgaaccgaaaggtgcaaagcgggccaaaccggtaaagtacaccgccgccaaattacacgagaagggtgtgctgttagatattgacgacctgcagactaaccagttcaagaatgtgaccttcgatattattgctacagaagatgtcggaatcttcgatgttaggagcaagtttctcggtgttgagatggagaaagtgcaactgaacattcaggatttgctgcagatgcagtacgaaggggtagcagttatgaaaatgttcgataaagtcaaggtgaacgtcaatctgctcatttatttgcttaacaaaaagttttatggcaagtag

SEQ ID NO: 121184 - DNA, 1134 bp, synthetic construct
  misc_feature 1..1134: note = Description of Artificial Sequence: Synthetic coding sequence
  source 1..1134: mol_type = other DNA
atggggtgtttcaaaggcgtcgttgccgtggggtatattaatgaggcaattgatgagggcaatccactccgcaccctggaaaccctgctcttaccaaccgctaatatttctgacgtcgatcctgcacacgcacagcactaccaggatgtgttgtatcacgctaagagccagaaactgggggatagcgagagcgtcagcaaggtactgtggctggacgagatacaacaggccgtcgacgatgcaaacgtcgacaaggacagagcaaaacaatgggtgactctcgtggtagatgtgaaccagtgcctggagggaaagaaaagctccgatatcctctctgtgctcaaatcaagtacctccaatgctaatgacattattccagagtgcgccgataaatactatgatgccttggtcaaggcgaaggagctaaaatcggagagagtgtcttccgatgggtcatggctgaagctgaacctgcataaaaaatacgattattattataacacagacagcaaggaaagctcctgggtgactcctgagagctgtttgtacaaggagtcatggttgaccgggaaagaaatcgaggatattatagaggaggtcacagtgggatatattcgggagaacatctggagtgcatcagaagagcttctattgcgtttccaggccaccagcagtggacccattctgcgggaggagtttgaggctcgcaaaagcttccttcatgagcaagaggagaacgtggtaaaaattcaggccttctggaaagggtataaacagaggaaggagtacatgcacaggagacaaactttcatcgataacacagactctatcgtgaagatccagtcgtggttccggatggccaccgcccggaagagctacctcagtcggcttcaatatttccgcgaccacaataatgagattgtcaagatacagtctctgttaagagccaacaaggcaagggatgattacaagaccctggtcggctccgagaacccacccctcactgtaataagaaaatttgtctatctacttgaccaatccgaccttgatttccaagaagagcttgaggtggccagacttcgagaggaagtagtgaccaagattagggcaaaccagcaacttgagaagacgtag

SEQ ID NO: 121185 - DNA, 3084 bp, synthetic construct
  misc_feature 1..3084: note = Description of Artificial Sequence: Synthetic coding sequence
  source 1..3084: mol_type = other DNA
atggcccagaacactgagaaccacgacccggtcggttcaatattgattcagatccacgaggatttatatcagttaaaggaaaagctcacaaagttctcacctgaggaaaaaggggaaacccttgacatacaaagtcttgagacagctattaagcgtaccgaagtaggccttcgcattcatatcgaaaagtacctcaacgttgtaaaccagaatgtcctgaccacatcagtcaacgatgaatctctgtacacacctcaggcgagcaaatggctgttaccgactgtgatcgatcagaagagctttatatttccccaggagtctgagggcaccttctggcagccccagaggcagcactcgagcagcctgcctgtcttccccagggccaaaattaaggtgagcaagctgattaaggggagtaatatctctagtctgacagtgctgcctagttctcactgtactgatccatacttcaccccaatccctgttctccaggccgatgcccataagggcatcctgtccatgattgaaagggggctgattccacccactgctcgcataaccttccagaacccacccatcactccaagagctgcaccactccactcattcgacgaggcccgcaagatacctactgtggcaacattcaccatccccagagagccgccaccttcaccagctgaggtgaagttctttcccaagaagcagaggagcaaggggaagtcaaggagatctcgaggacatcacgatagaaaagcgatgaaggtgaagacacccttacgggccctgaagtccctttgggattatgatttcctgatctacgatggggtgatcgataacaccgctcctgacttcctggccttcaaggagcatttcagcctggcgtggggcggcatcttctctttacttgaacacgtcgaaaaatttctccggaattatgctattcccgaggtaaagattaagggcaacaacctggtcgctctgctgccagaattcgaacttacaaataagctcacacgctacgacctgctgtctgtgctggaggaccccgcgcatgtgcagatgctgatcaatttgcctggacagcgatacaagggacaggatggcaactcggaagccgcaatgaaaatccaagcaacttggaagtgttacaaggcacgtaagtttttccttttttacaggcagcagaaatgggccagtggggtgatcgccatcgcctggctgttatattgccacaagacccgtctcaaaaagattttaaaagagtcacgccagcgccacttagaaaactttcgtatcagagctaagcatctggccgccaattggaacaggatcagaacctctcggcgcaccattatccatattccttcactggggtattcacagccagtgagggagcacatagctgatttcaacacccagcagaatatgcagctaggtcgactctgtgatattctagacgctaatgtgaacgtaatctacatttgttcccaccacatgaacgacgagttagtgctctactacaaaaaaatcctgtctttgcacgctgcagtaaagtcaggtaacctcgaggacagatctgatctgcaggatcgctttaagattataactccggaagccgtaaatatatttcctaaacaccatatgtgtttggccactcacctgatgtactctccaaaggcaatcaaacgaataaagaatctcattcgggggaccgaggcatatattgtgtcagggttattgcaccgcgacgatctggccgtggccgacatgttagacattcccatccttggttctgaacccgaacttgctcacctatacagtactaaaagtgggggcaaaagggtgttcgactccgcaaacgtggcagtacccccaggaatttatgatatctactcacagcagcaaatgattgagcagctttcgcaactgataactgaccatctccaaatccagcgatggctctttaaaatggacagcgagtttcgtggaaacggcactgcattttgcgacatacctagctatctgaaatgctacaaatgggttttgaaagagagcagccgctacgggctggaggattggcgcaaaaagtgggctcaggaacctgccctcgtcaaaatctctgaagagcttgccggcatcctcgcccagcacgcccagcccgtgaacgaaaagcggtttcctacctggagaaagtttctgcagacttttctcagccagggcggggtgatcgaagccttccccccggccgacaacgtaactaacctgaccgtggacatgctgattgagccaaatggaaaaatctcagtgcttagtactggcgaccagctgcatgcagagagcccatttatttcctccggcaccacagtgccccagacttctgtggacccccaggtcctgacctatctttgtctgcagatcggcaaagcctgccgtatgagagacgttgtcggctacttcagcatcgacctcgttacttttatagaccctagcactctcgaacagcaggtttgggccacaggactgaatctggcatatagtgatcagttggccctcacccagctgactctttacttaacaaatgggcatctggactgctcacttagcacattggaggtgcctaggtttgtccccaaggagcgaaagaagacaaagtgcatgagcgccttgtccatgccaatgttggctactagtcgctacgccgttatgacaacacagcttaggcactctaatctcagtctggtctttcattacgtattcttgcagatttgtcgcgctcatggaattgggtacgacgtcgaagaacgccagggcactgtttttatactgtacgagcacttaaagcgccacaagctaggcatgttaactattggagaggacctgcagggcgtgctgatgacattcgcccgccacctgtttatcatccaccaggagatttctgcccccaacatgcagggagaaacgaatttcaagaccacaattgcggacattgaaactatcctgagggtaaccaaggagaacaagatgcggtttgaggaggagcaacagtcgaaggacgacaagaacctttcaaaacctaagaaatag

SEQ ID NO: 121186 - DNA, 2091 bp, synthetic construct
  misc_feature 1..2091: note = Description of Artificial Sequence: Synthetic coding sequence
  source 1..2091: mol_type = other DNA
atgatcgagcggggcctgatccctcctacagcaaggataacctttcagaacccacccatcactcctcgtgccgcaccgttgcacagcttcgacgaggcccggaagatccccacagttgctacttttacaattcccagggagcctcctcctagccctgctgaggtaaaattctttcctaagaagcagcggtcgaaagggaaatccaggagatcgagaggacatcacgacaggaaggccatgaaggtaaaaactccacttagggcacttaaaagcctttgggattacgactttctgatttacgatggggtgatcgataataccgcccccgattttctggcattcaaggagcacttctctctagcctgggggggcatttttagtcttctggaacatgtggagaagtttctgcggaactatgcaattccagaggtaaaaattaaaggaaataacttagtggcgcttttgcccgaatttgagttaacgaataagctgaccaggtacgatctgctgagcgtgttggaggacccagcccacgtgcagatgctaattaaccttccggggcagcgatataagggacaggatgggaacagcgaggccgccatgaagattcaggcaacttggaagtgctataaagccagaaaattctttctgttttatcgccaacagaaatgggcgagtggagttatcgccatcgcttggctactgtactgtcacaagacgagactgaaaaaaatcctgaaggaatccagacagcgccacctcgaaaatttccgcatacgggccaagcacctggccgccaactggaatcgcattaggacatcaagacgaacaattatccacattcccagccttggctattctcagccagtgcgggaacacattgctgacttcaatacacagcagaatatgcagcttggcagactctgcgacattctggatgctaacgtgaatgtgatatatatatgttctcatcatatgaacgatgagttagtgttgtattataaaaagattctgagcttacacgcagctgtaaaatccggtaacttggaggacagaagcgatctccaggatcggttcaaaataattacaccagaggcagtcaatattttcccgatgatcgagcagttatcccagcttattaccgatcaccttcaaatccagagatggctgttcaagatggacagcgagtttaggggaaacgggactgccttctgcgatataccctcttacttgaaatgttacaaatgggtcttaaaggaaagttctagatacggcttagaagattggcggaagaagtgggcgcaggaacccgccttagttaagatttctgaagaactggccgggattcttgcacagcatgcccagccagtcaatgagaaacgattccccacttggcgtaaatttctgcagacattcctctcccagggtggcgtgattgaggccttccccccagcggataacgttacaaatttgactgtcgatatgctgattgagccaaacggcaaaatctcggtactgagcaccggcgaccaactgcatgccgaaagcccgtttatatcttctgggacgaccgttcctcagacaagcgtggatccacaagttctgacctatttgtgccttcaaattggcaaagcttgtcggatgagagatgtggtgggatacttttcaattgacttggtcactttcattgatccatctacactagaacagcaggtgtgggccaccggactcaacctggcttactcagaccagttagctctgacacaattaactctctacctgaccaatggtcacctcgactgctcgttgagcacccttgaagtgccccgtttcgtgcccaaagaaagaaaaaagactaagtgcatgtctgccttgtctatgccaatgctcgccacttcccggtatgccgtcatgactacccagctccgccattctaacctatctctggtatttcactacgtgtttctccagatttgtagagcacatggtatcggctatgacgtcgaaaacaacagaagaggatcccccggaggaccccatgatctctgttccccaagcttgcaccacccatccaggaatatctccacttag

SEQ ID NO: 121187 - DNA, 1866 bp, synthetic construct
  misc_feature 1..1866: note = Description of Artificial Sequence: Synthetic coding sequence
  source 1..1866: mol_type = other DNA
atgactaaggccatgaaggttaagactcctctgagggcccttaaaagcctgtgggactacgactttctcatttacgacggagtgatcgataatactgcacctgattttttagccttcaaagaacacttctctctggcttgggggggtatattcagtttgctcgagcatgttgagaaattcctgaggaactacgctatccccgaggtgaagataaagggaaacaatctggtagcactcctgccagagttcgagctcactaacaagctcactcggtatgacctgctctccgtgttggaggacccagctcacgttcagatgctaattaaccttcccggccagagatataagggccaagatggcaactcagaagccgccatgaagatccaggctacttggaagtgctacaaggcccgaaagtttttcttattctacaggcagcaaaagtgggctagtggtgttatagctatcgcatggttgttgtattgccataagacccggcttaagaagatcctaaaggagtcacgccagagacatttagagaacttcaggatcagagcgaagcacttggcggccaactggaaccgaattcgcacaagccgccgcactatcatccacatacccagcctggggtactcccaacccgtgagggagcacattgccgactttaatacccagcagaacatgcagctcggaaggctatgcgacatactggatgctaatgtgaacgtcatctacatttgttcccatcacatgaacgatgaactggtgctgtattacaaaaagattctgtcattgcacgctgcggtgaagagtggaaaccttgaggatagatccgacctgcaggataggtttaagataatcaccccagaagcagtgaacattttccctatgatcgagcagctgagccaactgatcaccgaccacctccagatacagcggtggttgttcaagatggactccgaattcagaggtaacggcacagccttttgcgacattccctcctacctcaagtgctataaatgggtgctgaaggaaagcagccggtacggactcgaagactggcggaaaaaatgggcacaggaacccgccctggtgaaaattagcgaggagttagcagggattcttgcccaacacgctcagcctgtcaacgagaagcgcttccctacatggaggaagtttttgcagaccttccttagtcagggcggtgtgattgaggccttcccaccagccgataacgtgacgaatctgacggttgacatgttgattgagccgaacggcaagatctccgttctctctacaggcgaccagttacatgcagaaagtccattcatcagtagcgggacaacagtgcctcaaacttccgtagatccacaggtgctgacttacctgtgcctgcaaatcggtaaggcatgtcgcatgcgggacgtcgtcggctatttcagtatcgacttagtgacctttatagacccttccactctcgagcagcaggtttgggcaacaggactcaatcttgcctactctgatcaattggctcttactcagctaacactttatcttactaacggccacctagactgcagcctttctacactggaagtcccgagattcgtgcccaaggaaaggaagaagactaagtgtatgtccgctctgtcaatgccaatgcttgccacttctcggtacgctgtgatgacaacccagctgaggcactcaaacctgtcactggtatttcactacgtctttctgcagatatgccgggcacacggcatcggctacgacgttgagaataacagacgtggatcgccaggcggcccccacgatctgtgttctccctccctccaccacccctccagaaacatctccacatag

SEQ ID NO: 121188 - DNA, 2055 bp, synthetic construct
  misc_feature 1..2055: note = Description of Artificial Sequence: Synthetic coding sequence
  source 1..2055: mol_type = other DNA
atgaaggtaaagaccccactgagggcactcaagagcctgtgggattacgattttctcatttacgatggagtgatagataacaccgccccagatttcctagccttcaaggagcatttcagtctggcctggggaggaatcttcagccttttagaacatgtggaaaagttcctgcgaaattacgcaatccctgaagtgaaaatcaagggtaacaatctcgttgcgctgctccccgagttcgagctgaccaataagctgacgcggtatgatcttttgtctgttctagaggatcctgctcatgtccagatgttgattaatctgcccgggcaacgctacaaaggtcaggacggcaacagcgaggccgccatgaagattcaggctacttggaagtgctacaaagcaagaaagttctttctcttttaccgccagcagaaatgggcaagtggtgtgatagcaatcgcatggctgctttactgtcacaagaccaggctgaaaaagatcctgaaggaatcaaggcaacgccacctcgagaactttaggatcagggctaagcacttagcagctaattggaacagaatcagaacttcgcgtagaacaatcattcacataccgtccctggggtactcacagcccgtacgtgaacatatcgctgactttaatactcagcagaacatgcagctagggcggctgtgcgacatcctggatgccaatgtaaatgttatatacatctgcagtcaccatatgaacgacgaactggtcttgtattacaagaaaattctaagcctgcacgccgccgtgaagtcaggaaatctggaggatcgaagcgacctccaggacaggtttaaaataatcacccccgaggctgtaaacatatttcctatgatagaacagctcagtcagcttatcacggatcacttacagatccaacggtggctgtttaaaatggattccgaattcagaggcaatggtactgcattttgtgacatcccatcatacctgaagtgctacaaatgggttctgaaggagtcgtcccgctacggcctcgaagactggaggaagaagtgggcacaagaacccgccctggtgaagattagcgaggaacttgccggaattctggcccagcacgctcagcccgtgaatgaaaagaggttcccaacctggcggaaattcctacagacattcctaagtcagggtggggttattgaggcatttcccccagccgataatgttaccaaccttactgttgatatgcttattgaaccaaatgggaaaattagcgttttatccacaggcgatcagttgcacgccgaatctccattcatctcaagcggaaccacagtaccacagaccagtgtggatccacaggtgctgacctacctctgcctgcagattggtaaggcttgtaggatgcgggacgtcgtgggctacttctctatcgatctggtcaccttcattgacccctccactttggagcagcaagtgtgggccaccgggctgaatctggcatatagcgaccagctggctcttacccagctgactctatacctcactaatggacacctagattgcagcttatccacgcttgaggtgcccagatttgtcccgaaagaaagaaagaaaactaaatgcatgagcgccctgtccatgcctatgttggctacttcacggtatgcggttatgaccacacagcttaggcactcgaatctgtccctggtctttcattacgtctttcttcagatctgccgggcccacggcatcggctacgatgtcgaagaacgccagggcacagtcttcattttatatgaacatctgaagaggcacaagctcgggatgcttacgatcggcgaagatctgcagggtgttttgatgacgttcgcacggcatctatttattatccaccaggaaatttcagcccccaacatgcaaggcgaaactaatttcaagacaaccatcgcagacattgagaccatcctgcgggtgaccaaggagaataaaatgaggttcgaggaagagcagcagtctaaagatgacaagaacctgagcaagcccaagaagtag

SEQ ID NO: 121189 - DNA, 507 bp, synthetic construct
  misc_feature 1..507: note = Description of Artificial Sequence: Synthetic coding sequence
  source 1..507: mol_type = other DNA
atggcccagaatacagaaaatcacgaccctgtgggttccattctcattcagatccacgaggatttatatcagctgaaggaaaaactgaccaaattctcaccggaggaaaaaggcgagactttggacattcagagtctcgagactgcaataaagagaactgaggtgggacttcggattcatatcgagaagtacctgaacgtcgtcaaccagaacgttcttacaaccagcgtgaatgatgagtcactgtataccccgcaggcatccaagtggctgcttcccaccgtgattgaccagaagagtttcatattccctcaggagagcgaaggcactttctggcagcctcagagacaacatagtagctcccttcccgttttcccgagagccaaaagaaaaatcggactgaacgtcaaaattcttcaggatcccgaaaatatccaccatagagccgcagtgaacgctaattacggtatcagtctcccttatattaatcagcgcaaggcctgctag

SEQ ID NO: 121190 - DNA, 339 bp, synthetic construct
  misc_feature 1..339: note = Description of Artificial Sequence: Synthetic coding sequence
  source 1..339: mol_type = other DNA
atgaggctggaagaattaaagcggttgcaaaatccactagaacaggtgaacgatgggaaatactcattcgaaaatcatcagctggccatggatgccgagaataacatcgagaaatacccattgaatctgcagcccttagagtccaaagttaagattatccaacgcgcttggcgagaatatctgcagcgtcaggagcccctggggaagaggagtccaagccctcccagtgtctcatctgaaaaactctctagttcagttagcatgaacacgttctcggacagctctacacctgtctctgtgatgtttctgttcctgtgtcctgatctgacattcaactag

SEQ ID NO: 121191 - DNA, 480 bp, synthetic construct
  misc_feature 1..480: note = Description of Artificial Sequence: Synthetic coding sequence
  source 1..480: mol_type = other DNA
atgagactggaggagctgaagcggctgcagaatccacttgagcaagtaaacgacggaaagtactcctttgaaaatcaccagctagccatggacgctgaaaacaatatcgagaaatacccactgaatctgcaaccgcttgaaagcaaggtgaaaattatacagcgtgcctggcgtgaatatctgcagcgccaagagcctctgggaaagaggagcccttctcctccttcggtaagtagcgagaagctgtcttcatccgtatcaatgaacactttctctgattcaagcaccccttttgccagagcgccggtggggaagattcatccatacatctcctggcgattgcagagccccggggataagttaccaggcgggagaaaggtgattcttttgtacctcgatcagttggctcgccctacagggtttatccatacactgaaggagccccagatcgaacgcttgggcttccttactctgcagtag

SEQ ID NO: 121192 - DNA, 399 bp, synthetic construct
  misc_feature 1..399: note = Description of Artificial Sequence: Synthetic coding sequence
  source 1..399: mol_type = other DNA
atgcgacttgaggagctcaaacggcttcagaatcctctagaacaagtaaatgacggcaagtattcattcgagaacattcagcgcgcttggagagagtatctccagaggcaggagccactgggcaaacgcagtccaagtcccccctcggtctcatccgaaaaactgtcttcaagcgtatcgatgaacaccttttctgattcttccaccccttttgcccgggcccccgtcggaaagattcacccatacatttcatggaggcttcaatccccaggagacaagttgcctggcggtcgcaaggtgatactgctttatttggatcaactggctagacccaccgggtttatccacaccctgaaagagcctcaaatcgagcgcctgggctttctgaccctccagtag

SEQ ID NO: 121193 - DNA, 2892 bp, synthetic construct
  misc_feature 1..2892: note = Description of Artificial Sequence: Synthetic coding sequence
  source 1..2892: mol_type = other DNA
atggatgccccgaaggccggttatgcattcgagtatctgatcgaaacgttaaatgactccagtcacaagaagttttttgacgtgtcaaagcttggaacaaagtacgacgtcttgccctatagcatacgcgtcctgcttgaggccgccgtgaggaattgcgatgggtttttgatgaagaaagaggacgtgatgaatatcctggattggaagacaaaacagtccaatgtggaagtgccctttttcccggccagagtccttttacaagatttcaccggtatccctgcaatggtagacttcgcagctatgcgggaggcagtgaagactctggggggtgatccagaaaaagtgcacccagcgtgccccactgatctaacagtggatcactccctccagattgatttctccaagtgtgccattcagaacgctccaaatcccggcggcggggacctccagaaagctggcaagctctcccctgtgaaggtgcagcctaagaaattgccatgccggggacagactacatgcaggggaagctgtgattcaggggagctcgggcgtaactcaggaactttctcctctcaaattgaaaacaccccaatcttatgtccattccacctccagcctgtaccagagccagaaaccgttctgaagaaccaggaagttgaatttggaaggaatcgtgagaggctgcagttcttcaaatggtcatcccgggtgttcaaaaacgtggccgtgattccacccggcacgggcatggcacaccagatcaatctcgagtatctgtcgcgggtggtattcgaggagaaggatctcctgttccccgactctgtggtggggacagactctcacattacaatggtgaatggattaggtatcctgggttggggcgtgggtggcatcgagactgaggcggtgatgctgggcctccccgtctccctcacccttcccgaagttgttggctgtgagctgactggctcatccaacccatttgtgacaagcattgatgtggtgctggggatcactaagcacttaagacaggtgggtgtagcaggtaaatttgtcgaattttttggaagtggtgtgtcccaactgagtatagtggataggaccacgatagccaatatgtgccctgaatacggcgcaatactcagttttttccccgttgataacgtgacgctgaaacacctagaacataccggtttttctaaagccaaactcgaatccatggaaacatacctgaaggctgtaaaactgtttaggaatgatcagaatagtagcggagagccagagtatagccaggtcatccagataaaccttaacagtattgtaccatcagttagcggacccaaaaggcctcaggatagggttgcagtcaccgacatgaagtccgacttccaggcctgcctaaacgaaaaagtcggttttaaaggatttcagattgcagccgaaaagcaaaaagatatcgtgagcatacattatgagggatctgagtacaagctcagtcatggctctgtcgtgatcgccgctgttatttcttgcaccaacaattgtaacccaagcgtgatgcttgccgccggcttacttgctaaaaaggcggtcgaggcagggttacgggtcaaaccctatatccgcactagcctgtctcctggaagtggcatggtgacccactacctttctagcagcggcgtcctcccttatctgtccaagttgggtttcgagattgtgggctatggctgcagtatctgcgtgggaaacaccgccccactttcggatgccgtgctcaacgccgtcaaacagggcgatttggtgacttgcggtatcctatccggtaataaaaattttgaaggccgtttgtgcgactgcgtacgcgctaactacttagcgagtcctccactcgtggtggcttacgcgatcgccggaacggtaaatattgactttcaaactgaacctctggggacggatccaacggggaagaatatctatctgcacgacatctggccttcccgagaggaagtgcatcgtgtcgaggaggagcacgtgattttgagcatgttcaaggctctcaaagataagattgagatgggcaacaaacgatggaattccttagaggccccagactccgttctgtttccttgggatctaaaatccacctatatcaggtgtccaagcttctttgataagctgaccaaggagcctatcgcacttcaagcaattgagaacgcccacgtgctattgtacctcggagattctgtgacgaccgaccatatttcccccgccgggagcattgctcgcaatagtgctgcagcgaaatatctgaccaatagaggactcactccgcgtgagttcaacagttatggcgcacggagggggaatgacgcagtgatgactcgaggtaccttcgccaacataaaattatttaacaaattcatcgggaaaccggcccctaaaaccatccattttccatccggccagacactggatgtttttgaagcagccgaactgtatcagaaagaagggatcccgttaattatcctcgccggcaagaagtacggctctgggaatagcagggattgggcagctaagggcccgtatctgctgggcgtaaaggccgttctagcggagtcttacgagaagatccacaaagaccacctcattggaatcgggattgctccactgcagtttttgcccggcgaaaatgcagattctttggggctcagcggccgggagacttttagcttgacgtttcccgaagaactcagtcctggcatcaccctcaacatccagacttccactggtaaggtctttagcgtgatcgcaagtttcgaggacgatgtggagattaccctgtacaagcacgggggcctcctgaattttgtggcccgcaaatttagttag

SEQ ID NO: 121194 - DNA, 96 bp, synthetic construct
  misc_feature 1..96: note = Description of Artificial Sequence: Synthetic coding sequence
  source 1..96: mol_type = other DNA
atggattacgttgaggataagcttagttcagagttcgtatttaataatccaaatatcaaggggacatgtggttgtggtgagtccttcaatatttag

SEQ ID NO: 121195 - DNA, 261 bp, synthetic construct
  misc_feature 1..261: note = Description of Artificial Sequence: Synthetic coding sequence
  source 1..261: mol_type = other DNA
atgtcggcctcccttgtgcgggctaccgttagggccgtgtcaaaaaggaagttgcagcctacaagggcagcgctgaccctgaccccatcggctgtcaataagataaagcaactgctaaaagataaacccgagcatgtgggcgttaaagttggcgtccgtactcgggggtgtaacggtctatcatacaccctggagtatactaaaaccaaaggcgacagcgacgaagaggtgatccaggatgggtggagcgctgtcgtctag

SEQ ID NO: 121196 - DNA, 390 bp, synthetic construct
  misc_feature 1..390: note = Description of Artificial Sequence: Synthetic coding sequence
  source 1..390: mol_type = other DNA
atgtctgcctcgctcgttcgtgccacagtgcgcgcagtgagcaaaagaaagttgcagccaacacgagccgctctaactctgaccccgagtgctgtgaacaagattaagcagctcttgaaggataagcctgagcatgtcggcgtgaaggtgggcgtgagaacacgaggttgtaacggcttatcttatacactggagtacactaaaaccaagggagattccgatgaggaagtgatccaggatggcgtccgagtgttcatcgagaagaaggcccagctcactctattggggactgagatggattacgtcgaggataagctgtctagcgagtttgtgttcaataatccaaacataaaaggaacctgcggatgcggtgaaagcttcaatatctag

SEQ ID NO: 121197 - DNA, 531 bp, synthetic construct
  misc_feature 1..531: note = Description of Artificial Sequence: Synthetic coding sequence
  source 1..531: mol_type = other DNA
atggttgccgccgggggcggagctagaacagaaggcgcagtgagaaggagcttgtggcggcaatgcgcccggcgtgttcatggagagaaactaaggaggcctacttttggcccccggcaccggggggcggggacggccaaaatgtccgcctctttagtgcgggcaactgttagagcagtctctaaacggaagctgcagccgacgagggccgccctgaccctcactccatcagcagtcaataagatcaagcagctgctgaaggacaagcccgaacatgtcggggtcaaagtgggagtgagaacacgcggctgcaacggcctgtcgtataccttggagtatacgaagaccaagggcgactcagacgaagaagtcattcaggatggagtgagagtgtttatagaaaagaaagcacaattgacactgctgggaaccgaaatggactacgtggaggacaagctgtctagcgagtttgtgttcaacaatccgaatatcaagggaacttgtggttgcggggagtcttttaatatctag

SEQ ID NO: 121198 - DNA, 504 bp, synthetic construct
  misc_feature 1..504: note = Description of Artificial Sequence: Synthetic coding sequence
  source 1..504: mol_type = other DNA
atggccgcagcaggagcgtttcggctcagacgggcagcgagcgcactgctgttgagaagccccagattgccagctcgcgagctatctgcaccggcacgtctttatcacaagaaggttgtcgaccactatgaaaacccaagaaatgtggggagcctggataagactagcaaaaacgtgggcacaggactagtaggagcacctgcgtgtggggatgtaatgaagctgcagatccaggtggatgagaagggcaaaattgtggatgcccgattcaaaacgttcggatgcggctcagcaattgcctcatcctccctagcaactgagtgggtaaaaggcaagacggtggaagaagccctgaccataaaaaacaccgatatcgctaaagagctctgcctgccccctgtcaagctccattgcagcatgctggcagaagacgcgataaaagcagcattagcagattataaactcaaacaggaacctaagaaaggagaagctgaaaaaaagtag

SEQ ID NO: 121199 - DNA, 390 bp, synthetic construct
  misc_feature 1..390: note = Description of Artificial Sequence: Synthetic coding sequence
  source 1..390: mol_type = other DNA
atggtacttatcgacatgagcgtggatctgagcacgcaggtggtagaccattacgaaaatccgcgaaacgtgggctcactggacaagacctccaaaaatgtgggcaccggactggttggggcccccgcctgcggcgatgtcatgaaacttcaaatccaggtggacgaaaagggaaaaatcgttgacgctagatttaagacctttgggtgtggcagcgccatcgcatcttcctctcttgctacagagtgggtgaaaggcaagaccgtggaggaagccttaaccatcaaaaatacagatatcgcaaaggagctatgtctgccgcctgtgaagctccattgtagcaagtcggtcctgttccctgcagaggagaagacacagttaagcccctag

SEQ ID NO: 121200 - DNA, 429 bp, synthetic construct
  misc_feature 1..429: note = Description of Artificial Sequence: Synthetic coding sequence
  source 1..429: mol_type = other DNA
atggtcctaatagatatgagtgttgacttgagcacccaggtggttgaccattacgagaaccccaggaatgtgggaagcctcgacaaaacatccaagaatgtgggcaccggcctggtcggagcacctgcctgtggcgacgtgatgaagctccagattcaggtggatgaaaagggaaaaattgtcgatgcccgatttaagacttttggttgcggaagcgctatcgcatcctcatcacttgctaccgagtgggtgaagggcaagaccgtggaggaggctttgacaataaagaacacggatatcgccaaagaactttgcctccctccggtgaagctgcactgctcaatgctggccgaggacgccattaaggctgcgctggctgactacaagctgaaacaggaacctaaaaagggcgaagcagagaagaaatag

SEQ ID NO: 121201 - DNA, 1443 bp, synthetic construct
  misc_feature 1..1443: note = Description of Artificial Sequence: Synthetic coding sequence
  source 1..1443: mol_type = other DNA
atgtccttcccacaattgggataccctcagtacctgtccgccgccggccccggcgcctacgggggggagaggccaggtgtgctagccgctgcggccgcagccgctgccgccgctagcagtggccgcccaggcgccgctgagctcggcggcggcgctggcgccgccgccgttacatcagttctcggtatgtatgccgcggcagggccttacgccggggctccgaactactctgcctttttaccttatgccgcagatctgtctctgttctcacagatgggttcgcaatacgaactcaaggacaatcccggcgtgcatcctgccacattcgcggcccacacagcaccggcttattatccctatggacagtttcagtacggcgacccgggcaggcccaagaacgctactagggaatccacctctactttaaaggcttggctcaatgagcacagaaaaaatccgtatcctacgaagggagaaaaaataatgctggcgattatcacaaaaatgacacttacacaagtgtccacgtggttcgcaaatgccagaagacgcctgaaaaaagagaacaaagtgacctggggcgctaggtcaaaggatcaggaagacggggccctgtttggaagtgataccgaaggagaccccgaaaaggccgaagacgatgaagaaatcgacttggaaagtattgatatagacaagatagacgaacatgatggggatcaaagcaacgaagacgatgaggataaagcagaggctccccacgcaccagctgctccctccgccctggcccgcgatcaaggctcccccctggcagccgctgatgtcctcaaaccacaggattctccacttggcttagccaaagaggctcccgaaccggggagcaccagactgcttagtccgggagcagctgccggggggctacagggggcacctcacggcaaacccaagatctggtcgctggctgagaccgcaaccagtcctgacggcgctccaaaggcttcaccaccaccgcctgctggccacccgggtgcccacggaccatccgctggtgccccattgcaacatccagcattcctccccagccacggactgtatacctgtcacatcggaaaattttctaattggacaaatagcgcattcctggcacagggttccctgttaaacatgaggagctttcttggcgtaggcgccccacacgcagccccccatggcccacatcttccagcccccccccccccccagccgccagtggcaattgcacctggggccctgaacggggacaaggcgagtgtgaggagttcccctaccttacccgagagagacttggtgcctcggcccgattcccctgcgcagcaattaaaaagtccgtttcaacctgttagggacaacagtcttgccccgcaagaagggacacccaggatcctcgccgccctccccagtgcttag

SEQ ID NO: 121202 - DNA, 1416 bp, synthetic construct
  misc_feature 1..1416: note = Description of Artificial Sequence: Synthetic coding sequence
  source 1..1416: mol_type = other DNA
atgtcatacccgcagggatacctttaccaggcaccaggctctctggccctgtactcctgccccgcgtacggggcatcggcactcgctgctccccgctccgaggagctagctaggagtgcatcaggtagcgcattctccccatatcctggcagcgcagctttcaccgcgcaagctgccaccggattcgggtctcccctccagtactccgccgatgcggctgccgccgctgccgggttccccagttacatgggcgccccttacgatgctcataccacaggtatgactggggcaatctcttaccacccatacggctcggcggcctacccataccaattgaacgaccccgcctataggaagaacgccactcgggatgccacggccacactcaaggcctggttaaacgaacatcgcaaaaacccctatccgactaaaggcgaaaagataatgctggcaatcatcacaaagatgacactaacccaggtcagcacatggttcgcgaacgctaggaggagacttaagaaagagaacaagatgacctgggcaccacgcaacaaatccgaagacgaggacgaagacgaaggcgatgcaactcgttctaaagatgagtctccagacaaagcacaggaaggaacagagaccagtgcagaagatgagggtatctcgttgcacgtggacagtctgaccgaccatagctgctccgccgaatccgacggggaaaagctgccctgtagggcaggcgatccactgtgtgagtccggttccgagtgtaaagataaatacgacgacctggaggacgacgaggatgatgatgaagaaggcgagagagggttggctcctccaaagccagtcacttcgagccctctgaccggactggaggccccactgctgtcgcctcccccagaggcagccccaaggggaggtcggaagacacctcaggggtcacggaccagccctggagctccacctccggcctcaaaacccaaactctggtccttggccgagatcgcaactagcgacctgaaacagccaagcctgggcccgggctgcggaccccccgggttgccagccgcggcagcccccgcttcgaccggcgctccccccggaggaagcccctaccccgccagcccgctgctgggtcgcccattatactatacatccccgttctatggtaactatacaaattatgggaacctgaacgctgcacttcagggccaaggtttgctgcggtacaattccgcggctgctgctccaggcgaggcccttcacaccgcacccaaggcagcgtccgatgctggaaaagcaggagctcatccactggaaagtcattacaggtcaccaggggggggctatgaaccaaagaaagacgcctcagagggatgtaccgttgtgggcggaggggtgcagccatacctgtag

SEQ ID NO: 121203 - DNA, 1416 bp, synthetic construct
  misc_feature 1..1416: note = Description of Artificial Sequence: Synthetic coding sequence
  source 1..1416: mol_type = other DNA
atgagttacccacaggggtacctgtaccaggcacctggttccctagccctatactcatgcccggcctatggagcctctgcacttgcagctcctagatcagaggagcttgccagaagcgccagcggttccgccttctccccctacccaggatccgccgctttcaccgcacaggctgcaaccgggtttggcagccccctccagtatagcgccgatgccgcagcagcagccgctggctttccatcttatatgggcgctccctacgatgcccatacgaccggcatgacaggggcgatttcttaccacccctacggctcggctgcttatccttatcagctgaatgacccggcatacaggaaaaatgccacacgggatgccaccgccactttaaaggcatggttgaatgaacacagaaaaaacccataccctaccaagggggagaagatcatgctggccatcattactaagatgaccctgactcaggtctctacctggtttgctaacgctagacgacgcttgaaaaaggagaataagatgacttgggccccaaggaacaaaagcgaggatgaggacgaggatgagggggacgctacacggtctaaggatgaatcgccagacaaagctcaagaaggcacagaaaccagcgccgaggatgaagggatcagcctgcacgtggactccttgacggatcactcatgctctgccgagagcgacggagagaaactgccatgcagggcaggggatcccctgtgcgagtcaggaagcgagtgtaaggacaaatacgacgatctcgaagacgacgaggacgacgatgaggaaggagagcggggattagcccctcccaagcccgtgacctcttcaccacttacaggactcgaggcccctcttctttctccccctccagaggccgcccctaggggaggcaggaagaccccgcagggatctcgcacgagccccggggctccgcctcctgcatccaaaccaaaactgtggagcctggctgagattgcaacatctgatttgaagcaaccttcacttggaccaggctgcggccctcctggattacccgccgccgcggccccagcttccactggagccccccccgggggctctccttatcctgcaagtccattgcttggtcggcccctgtactatacatcacctttttatgggaactataccaattatggaaacttgaatgccgccctgcagggccagggcctgcttcgatataattcggcggcagctgccccaggagaggccctgcatacagcaccaaaggccgcctccgacgccggaaaggcaggtgcccatccccttgagtcacattaccgttctcctgggggagggtacgaacctaagaaagacgcctctgagggctgcaccgtcgtgggaggaggagtgcaaccatacctgtag

SEQ ID NO: 121204 - DNA, 1506 bp, synthetic construct
  misc_feature 1..1506: note = Description of Artificial Sequence: Synthetic coding sequence
  source 1..1506: mol_type = other DNA
atgtcgtttccccaactgggatatcagtatatccggcccctctatccatctgagaggcccggagctgcgggggggtccggcggttctgccggggccaggggagggctcggggccggagcaagcgagcttaacgcctccggcagcttaagcaatgtactgtctagcgtgtacggcgcaccttatgcagctgcggccgccgccgccgccgctcagggctatggtgcgtttttgccttatgccgctgaactacctatcttcccccaactgggcgctcagtacgaactgaaagatagccctggtgtccagcatccagcagcggctgccgcttttcctcacccccatcctgcattctatccctatgggcagtaccagttcggcgacccttctaggccaaagaatgcgacacgcgagtcaaccagcaccctgaaggcctggttaaacgaacacaggaaaaatccatacccaactaagggcgagaagattatgttggctataattacaaaaatgacactgacgcaggtatctacctggttcgccaacgctaggaggaggctgaagaaagagaacaagatgacttgggcccctcgaagtcgaacagacgaggaggggaacgcttatggttctgaacgggaggaagaagacgaagaggaggatgaggaagacggaaagcgagagctggagctggaagaggaggaactcggcggggaggaggaggacaccggcggcgagggactggccgacgacgacgaagacgaagagatcgatctggagaatttagatggagccgccacagagcccgagctatccctggctggagcagctaggagagatggcgatctgggtcttggtccaattagtgactctaaaaatagcgactcagaagactcaagcgaagggttggaggataggcctcttcctgtcctaagcctggccccagctcctccacccgttgcagtcgcctcaccttcccttccttctccgcccgtgtccctcgatccatgtgcccccgcacctgctccggcctctgccctgcaaaagccaaagatatggagtctcgcagagactgctactagccccgacaatcccaggagatctcccccaggcgcaggtggttcaccacctggcgccgccgtagcgccatctgcgctccaactgtccccggcagccgccgctgctgccgcacaccgccttgttagcgcccctctcggcaagtttccagcctggacaaataggccttttccaggccccccacccggcccacgcctgcatccgctttcactcctagggtctgcccctccccaccttcttgggctgccgggggcagccgggcaccccgccgcagctgctgctttcgctcgacccgctgaaccagagggaggcactgaccgatgctccgctctggaggtggaaaaaaaacttctgaaaactgctttccagccagtgcctcgaaggccacagaatcacctagacgcagccctggttctctcagctctttcaagtagctag

SEQ ID NO: 121205 - DNA, 741 bp, synthetic construct
  misc_feature 1..741: note = Description of Artificial Sequence: Synthetic coding sequence
  source 1..741: mol_type = other DNA
atgctgtggaggcagctgatctactggcaactgcttgcactcttttttctgccattttgtttgtgtcaggacgagtatatggagtcccctcagacaggaggtctgccacctgactgctccaagtgctgccacggcgactattctttccggggctaccagggtcctcccgggccaccagggccccccggtatccctgggaaccacggcaataacggcaacaacggcgcaaccggccacgaaggcgcaaaaggggagaaaggcgataagggggatctggggccaagaggagaaagggggcaacacggcccaaagggggagaaaggctatccagggatcccaccagagcttcagatcgctttcatggcaagtctggctactcacttttcgaatcagaactccggaattatatttagcagcgtggagacaaacatcgggaatttcttcgacgtcatgacaggacggttcggggcaccggtgtcgggagtgtacttctttacctttagcatgatgaagcacgaagacgtagaggaagtctatgtgtatctcatgcataacggcaataccgtgttctcaatgtattcttacgagatgaagggcaagtcagatacctcctctaatcatgctgttcttaaactcgctaagggggatgaggtgtggcttaggatggggaacggcgctctgcacggtgaccatcagcgattctccaccttcgcaggcttcctgctgtttgaaacgaaatag

SEQ ID NO: 121206 - DNA, 1560 bp, synthetic construct
  misc_feature 1..1560: note = Description of Artificial Sequence: Synthetic coding sequence
  source 1..1560: mol_type = other DNA
atgtcctaccctcagttcgggtatccctacagctccgcaccgcagttcttgatggccacgaacagcctgtccacctgctgcgaatctggtggccggaccctggccgatagcggcccagccgcttctgctcaggctccggtctattgccccgtgtatgaatcgcggttgttggccaccgccagacacgagttgaatagcgccgccgcgcttggagtgtatggaggaccttatggtgggtcccagggatacggcaactacgttacatacggatccgaggcgagtgctttctactctctgaattccttcgacagtaaggacgggtccgggagtgcccacggggggctcgcgcccgcagctgccgcctactacccttatgagcctgctctagggcagtatccatatgatcgctacggcacaatggactctgggacgcggaggaaaaacgctaccagagaaacgacatctactcttaaggcttggctgcaggagcatagaaaaaatccctacccgaccaagggggaaaaaatcatgctggccataataactaaaatgaccctaacgcaagtgagtacttggttcgcaaacgcacggagaagattgaagaaggagaacaaaatgacatggcctcctagaaacaagtgcgccgatgagaagaggccctacgcagagggtgaggaggaggagggaggcgaagaagaagcccgtgaggagccattaaaaagtagcaagaatgcagaaccggtcgggaaagaagaaaaagaacttgagctttccgacctggacgattttgaccccctggaagcagagccaccagcctgtgaattgaagcctcccttccacagcctggacggtgggcttgagagggtgcccgctgcaccggacggacctgtgaaagaggccagcggtgctttgcgtatgtcactggccgccggcggtggcgccgccctggatgaagacttggagagggcccggtcttgtctgcgcagcgccgccgctggacccgagccactgcctggggctgaagggggtccccaggtgtgcgaggccaagttgggttttgtgcctgctggagcctctgccggtctcgaagccaagccacgtatatggtcattagcgcataccgcgactgccgcagctgccgccgcaacatctttatctcagacagagttccctagttgtatgctgaagaggcagggacctgccgcgcctgcagcggttagctccgcaccagcaacatccccctctgtggctctccctcatagcggtgcacttgacaggcaccaggactccccagtcacatctctgagaaactgggtcgacggtgtgtttcacgacccgatcttgagacattccacattgaaccaggcctgggctacagctaaaggcgcgctgttggaccctggacccctgggacgttctctgggagctggagccaacgtgctgaccgcgccactagccagggcattcccaccagccgtgccccaagatgctccagccgccggcgctgcccgagaattgttggctcttcccaaggctgggggtaaacccttttgtgcctag

SEQ ID NO: 121207 - DNA, 1560 bp, synthetic construct
  misc_feature 1..1560: note = Description of Artificial Sequence: Synthetic coding sequence
  source 1..1560: mol_type = other DNA
atgtcatacccacaatttggctacccctattcctccgcaccgcagttcttgatggcaaccaacagcttgtcgacgtgctgcgagtcagggggcaggacactcgccgacagcggaccagcggcctcagcccaagctccagtgtactgtcccgtgtacgagagtagactcttggccacagcacgacatgagttaaatagtgcagcggcactgggtgtctatggaggtccatatggaggcagtcagggctatggaaactacgtgacatacgggagtgaagcctccgcgttttattccctgaactcttttgattcaaaagacggttcaggtagcgctcatggtggccttgccccagccgcagcagcttattacccttacgaacccgccttaggccaatatccatacgaccgttacggcactatggatagcggcactaggagaaagaacgctaccagagaaacgacgagtacattgaaagcctggctacaggagcaccgcaaaaacccgtatcccactaaaggcgagaagataatgcttgccatcattaccaagatgaccctgacccaagtgtcgacgtggttcgccaatgcaaggaggcgtctaaaaaaagagaacaaaatgacttggccgccacgcaacaagtgtgcagatgaaaaaagaccttacgccgaaggggaagaggaagagggcggagaagaagaggcacgggaggaacccttgaagagtagtaaaaacgcagaaccagtaggaaaagaggaaaaagagctcgagttgagcgacctggatgatttcgatccactggaggcagaacctccagcctgtgaactcaagcccccttttcacagtctggacggaggactggagagggtgcccgccgcgccagacgggccagtgaaggaagcctcaggtgccctgagaatgtcccttgccgccgggggcggcgctgctttagacgaggatctggaaagagcacggagctgcctgaggtcggcagctgccgggccagagcctctaccaggcgctgaaggtggtcctcaggtttgtgaggcaaaactcgggtttgtgcccgccggagcttcagctggattagaggcaaaacccagaatttggtcacttgctcacactgctacagctgcagcagcggccgcaacatctctctcccagacagagtttccgtcttgcatgttaaagcggcaggggccggctgcccctgccgccgtttcctctgcacccgccacatcaccatccgtggccctgccccacagtggagcactggatcggcatcaggattcgccggtcacctccttaaggaattgggtggacggagtgtttcacgaccccatccttagacattcaacactgaatcaggcctgggccacagcgaaaggtgctctgctcgaccccgggcctctgggacgatctctgggggcgggtgccaacgtgttgaccgcacccttggctagagcctttcccccagcggtgcctcaggacgcgccggctgccggagctgctagggagctgcttgcccttccaaaagcaggcgggaagccgttttgtgcttag

SEQ ID NO: 121208 - DNA, 1452 bp, synthetic construct
  misc_feature 1..1452: note = Description of Artificial Sequence: Synthetic coding sequence
  source 1..1452: mol_type = other DNA
atgagctatccccaagggtatctatatcagcccagcgcatcactggccctatacagctgtcccgcttattctacgtcagtcatcagcggaccaaggactgatgagctcggaagaagctcaagtggtagtgcgttttctccctatgccggatcaacggcatttaccgctccatccccaggatataattcccatttgcagtatggagctgaccctgcagccgccgcggcagccgcgttttcctcctacgttgggtctccatacgatcacacccccggaatggctgggagcttgggataccatccttatgccgcgccgctggggtcttatccctacggagaccctgcctatcgaaagaacgccacacgggacgcaacagcgaccttgaaggcctggcttaatgaacatcgaaagaatccctacccgactaagggggaaaaaatcatgttggcaatcattacaaagatgacactgacccaggtgtcaacttggttcgccaatgcacggcggcgcctcaagaaagagaataaaatgacatggaccccgagaaaccgtagtgaagatgaagaagaggaggaaaatattgacctcgagaagaacgatgaagatgaacctcagaagcctgaagataaaggggatccagaaggcccggaggccgggggcgctgaacagaaggccgccagcggatgtgagaggctgcagggaccccctactccagcaggaaaggaaaccgagggctcattaagcgattcagacttcaaggaaccaccgtcggaagggagactggacgcccttcaaggacctccaaggacaggaggcccctctccggccggtccggccgcagccaggctagctgaggatcctgctccccactatcctgcaggcgccccggctccggggccgcatccagctgctggtgaggtccccccaggtcccggggggccttctgttatacactcccccccacccccgcctcctccagcagtcttggctaagcctaagctgtggagtttggccgagattgccacaagcagcgataaggtcaaggatgggggtggggggaatgaagggagtccttgccccccttgtcctggtcctattgctgggcaggccctgggcgggagccgggcgagtcctgccccagcaccgtctcgaagcccctctgcccagtgcccttttcctgggggcaccgtgctatctagacccctgtactacaccgcccccttttatcctggctatactaactacggaagcttcgggcaccttcatgggcatccaggtcctggcccagggccgaccaccggtcccggcagccattttaacgggctgaaccagactgtgctcaacagggctgacgctctcgcaaaggaccccaagatgctcaggtcccagtctcagttagatctgtgtaaagacagcccatacgaattgaagaaggggatgagcgacatttag

SEQ ID NO: 121209 - DNA, 441 bp, synthetic construct
  misc_feature 1..441: note = Description of Artificial Sequence: Synthetic coding sequence
  source 1..441: mol_type = other DNA
atgtcctacccgcaggggtacctgtaccagccgtctgcttcccttgcactttatagctgtcctgcttacagcacttccgtgatctctggccctagaaccgatgagcttggtcggtcctcaagtggcagtgcatttagcccatatgcgggcagtactgcatttacagcaccaagccctggctacaacagtcaccttcagtacggcgctgatcccgccgcagctgctgcagcagcattctcatcatacgtcctgctgaaaaaggagaagaagtctctcgactttccatgtttccccccacttcgcccaacatgtgtgagatctcccgccgaaaggggcgtcgcaagtgtcgcccaggccagcatctgcatggagggtagggccgcagtggcccgttctgcccatgggggaagtccttacgcccacagagttcccggcccatag

SEQ ID NO: 121210 - DNA, 498 bp, synthetic construct
  misc_feature 1..498: note = Description of Artificial Sequence: Synthetic coding sequence
  source 1..498: mol_type = other DNA
atgggctgggatctaactgttaagatgctcgcagggaacgaattccaagtgtccctgtccagctcgatgagtgtgagcgagctgaaagctcaaataactcagaagataggagtccatgcatttcagcagcgcttggcagtccacccgtcgggagtagcacttcaagaccgcgttccactcgcgtcccaggggcttggtcctggatctactgtgttgctggtggtggataagtgcgatgagcctctcagcattctggtgagaaataacaaagggcggtctagcacttatgaagtgcgcctgacccagaccgtggcccacctgaaacagcaggtgtctgggctggagggggttcaggacgacctcttctggctgacttttgaaggtaaacccctggaagaccagcttcctctaggggagtatggcctgaaacctctctccacagtcttcatgaacctacggttgaggggcggagggaccgaacccggaggcagatcatag

SEQ ID NO: 121211 - DNA, 3129 bp, synthetic construct
  misc_feature 1..3129: note = Description of Artificial Sequence: Synthetic coding sequence
  source 1..3129: mol_type = other DNA
atggcagacgcattcggggatgagctgttcagtgtgtttgagggagactccaccaccgcggccggaacgaagaaggacaaggagaaggacaaagggaagtggaaaggacctcctggtagtgccgataaggccggcaaacgattcgatggcaaactgcagagtgagagtaccaataatggaaaaaataagcgcgatgttgatttcgaaggtactgacgagcccatctttgggaagaaacccagaattgaggagtcaatcaccgaggatttgtccctcgctgatctgatgccaagggttaaggtgcagagtgtggagactgttgaaggttgtacacatgaggtggccctgcccgctgaggaagactatcttccacttaaacctcgcgtaggcaaagccgctaaggagtatccctttatcttggacgcattccagagggaagctatccagtgtgtggacaacaaccaatccgtgctcgttagcgcccacacttctgccgggaaaactgtctgcgccgagtacgctattgcactcgccctgcgggaaaagcagcgagtgatcttcaccagtccaattaaagccctgtccaaccagaaatatagggagatgtacgaggaattccaggacgtggggttaatgaccggggacgtgactatcaaccccactgctagttgtctggtcatgacaactgaaatcctgagaagtatgctgtacaggggttctgaagtcatgagagaggtagcgtgggttatcttcgacgagattcactatatgcgtgattctgagcgtggggtggtgtgggaggaaaccatcatcctgttgccagacaacgtacactacgtcttcctgtctgctactattcctaatgccaggcagtttgcagagtggatctgtcatcttcacaagcagccttgccatgtgatttacaccgactatcgtcctacgcccctgcaacactacatctttcctgcgggaggcgacgggcttcaccttgtggtggacgagaacggagacttccgggaagataattttaacactgccatgcaggttctaagagacgcaggcgatcttgccaagggggatcagaaaggacgcaagggcggcaccaagggaccctctaacgtattcaagatcgtgaaaatgataatggagcggaatttccaaccagtgatcatttttagtttctcaaaaaaagactgtgaagcatacgcactacagatgactaaactggatttcaataccgacgaggagaaaaagatggtggaagaggtgtttagtaacgctatagattgtctgtctgatgaggacaaaaaactcccacaggttgagcatgtgctgcctctcctaaagaggggcatcgggatccaccatggcggtctgctgccaatcctgaaagagaccatagagatactcttcagcgagggcctcatcaaagccctattcgcaacagaaacgttcgcgatggggattaacatgcctgctcgcacggtcctgttcaccaacgcccggaaattcgacgggaaagactttaggtggatttctagcggggagtatatccagatgagcggcagggcgggccgccgcgggatggatgatcgcggtattgtgatactcatggtcgacgaaaagatgtcacccaccattggaaagcaactgcttaagggaagtgctgatcctctgaattctgccttccacctgacatataacatggtgctgaatctcttgagagtcgaagaaatcaaccccgagtacatgctggaaaaatccttttaccaattccagcactatagggccatacccggggtggttgagaaagtaaagaatagcgaagagcagtacaataagatagtgattcctaatgaggaatccgttgtcatctactacaagattagacagcagcttgccaagcttggtaaggagatcgaagagtacattcacaagcctaagtactgcctgccttttctccagccagggaggcttgtgaaagtgaaaaatgagggagacgatttcggatggggcgtcgtagtgaatttctctaagaagagcaacgtgaagcctaactcaggggagctcgacccattgtatgtagtagaagttctgctccgttgctcaaaagaatccttaaaaaacagcgctaccgaagccgctaagcccgccaaaccagatgagaagggggaaatgcaggtcgtcccagtgctggtgcatctgctcagcgcaatctctagtgtgcggctgtacatccctaaggatcttcgtcctgtggataacaggcagagcgtcttaaagtccatccaggaggtgcaaaaaagatttcccgatgggatccctttgctggatcccatagatgacatggggattcaggaccagggtctgaagaaagtgattcagaaggtagaagcttttgagcaccgcatgtactcccatccattgcacaatgacccaaacctggagacagtttacactttgtgcgaaaagaaagcccagatcgcaatagacataaagtccgcgaagagggagctcaagaaagcaagaaccgtcctccaaatggacgaacttaagtgccgaaagagagtcctaagacgtctgggcttcgccacctcctcagacgtcattgaaatgaaaggtagagtcgcttgtgagattagttctgctgacgagctgttactcaccgaaatgatgtttaacggcctgttcaatgacttgagcgcagaacaggccactgcactcctcagctgcttcgttttccaggagaacagctcagagatgcccaaattgactgagcaactggcgggcccactcagacagatgcaggaatgtgcaaaacgtatagccaaagtaagcgcggaggcaaagttggaaatcgatgaagaaacctacttgtcctccttcaagccacacctaatggacgtcgtctacacatgggccacaggagcgactttcgcccatatctgcaaaatgacggacgtgtttgagggctccatcataaggtgtatgaggagactggaggagttgcttcgccagatgtgccaggcagccaaggcaatcgggaataccgaactggagaataagtttgccgaaggaatcacaaagattaaaagagacatagtgttcgccgccagcctgtatctctag

SEQ ID NO: 121212 - DNA, 981 bp, synthetic construct
  misc_feature 1..981: note = Description of Artificial Sequence: Synthetic coding sequence
  source 1..981: mol_type = other DNA
atgggcgatatgggcgaccctccgaaaaaaaaacggctcataagtctttgcgtgggctgcggtaaccagatccatgatcagtatatcctgcgtgtctccccagacctggagtggcacgcagcttgtctcaagtgcgcggaatgtaaccagtatctagatgagagctgcacctgttttgtgcgcgatggaaaaacctactgcaagcgcgactacataaggctgtatggtatcaaatgtgctaagtgctcaatcggcttttcaaagaatgactttgtgatgcgcgccaggagcaaagtttatcacattgagtgttttcgctgtgtcgcctgtagtagacagcttatacccggcgacgagttcgccttgcgagaggacggactgttctgcagggcggaccatgacgtcgtcgagcgggccagcctgggcgccggagacccactgtccccgctgcatccggctcgaccgctgcagatggcggctgaaccgataagcgctagacagcccgcattgaggccgcacgtccataagcagcctgagaaaaccaccagggtgcggacggttctgaacgaaaagcagttacataccctgaggacttgttatgccgctaacccaaggcccgacgccctgatgaaggaacagctggtggagatgaccggtctgagccccagagtaatccgcgtgtggtttcaaaacaagcggtgcaaagacaagaaacgctcaatcatgatgaagcagctacagcagcagcaaccaaacgataagaccgcgaatcctgtagaagtgcagagttatcaacctccctggaaagtgctaagtgactttgctcttcagtccgatatcgaccaaccagcctttcagcagttggtgaatttttccgagggcgggcctgggtccaactctactgggtctgaagtggccagcatgagtagccaactccccgacactcctaattctatggtggccagccctattgaggcatag

SEQ ID NO: 121213 - DNA, 270 bp, synthetic construct
  misc_feature 1..270: note = Description of Artificial Sequence: Synthetic coding sequence
  source 1..270: mol_type = other DNA
atgggtatcctgaagctacaagtatttctgattgtcttgtctgtagccctgaatcacctgaaagccactcctattgagtcgcatcaagtggagaaacggaaatgtaatacagcgacatgcgccacacagcgcctggcaaactttctggttcatagcagcaacaattttggcgctatcctatccagcacaaacgtaggctctaacacatatggcaagagaaacgctgtggaagtgctaaaacgagagcccctgaactacctacctttgtag

SEQ ID NO: 121214 - DNA, 240 bp, synthetic construct
  misc_feature 1..240: note = Description of Artificial Sequence: Synthetic coding sequence
  source 1..240: mol_type = other DNA
atggggatattaaagctgcaagtcttcctcatcgtgctgtcagtggccttgaaccatttgaaagccacacctatcgaatctcatcaagtcgagaaaagaaagtgtaataccgcaacatgcgcaacccaaagactggcaaactttcttgtgcattcatcaaacaatttcggagcgatactgtcttctacgaatgttggttcaaacacttatggtaaacgtaatgccgtagaagtgttgtag

SEQ ID NO: 121215 - DNA, 270 bp, synthetic construct
  misc_feature 1..270: note = Description of Artificial Sequence: Synthetic coding sequence
  source 1..270: mol_type = other DNA
atgggaattctcaaactgcaggtgtttcttattgtgctctcagttgctctcaatcatttgaaagcaaccccgatagagagccatcaggtcgagaagaggaagtgtaatacagcgacttgcgctacccaaaggctcgccaacttcctcgtgcatagttcaaataattttggagctatcctatcttcaacaaatgtgggcagtaacacttatgggaagagaaatgctgttgaagtgctgaagagagagcccctaaattacttacctctgtag

SEQ ID NO: 121216 - DNA, 1449 bp, synthetic construct
  misc_feature 1..1449: note = Description of Artificial Sequence: Synthetic coding sequence
  source 1..1449: mol_type = other DNA
atgtcaggccacaaatgctatccttgggatttgcaggaccggtacgctcaagataagagtgtcgtcaacaaaatgcaacagaaatattgggagaccaaacaggccttcatcaaagctactggaaagaaggaggacgagcacgtcgtggctagcgacgctgatcttgatgcaaagctcgagctgttccactctatccagcggacgtgcctggatctttccaaagctattgtgctgtaccaaaagcgtatctgctttctttctcaagaggagaatgaacttggtaaattccttaggtcacagggctttcaggataagacaagagcgggcaagatgatgcaggcgaccgggaaggcactgtgcttctcttctcagcagcgcctggcccttcgcaaccccctgtgccggtttcaccaggaggtagaaactttccgtcaccgcgccatctctgacacttggctgacagtgaacaggatggagcagtgccgcaccgaatacagaggcgcgttactgtggatgaaggacgtgtcgcaagagcttgatcctgacctgtataaacaaatggaaaagttcaggaaagtccagacccaggtgcggcttgccaagaagaactttgacaaactgaaaatggatgtctgccagaaagtcgatctcctgggcgcctctcgctgcaatctcctgtcacacatgctcgccacctaccagactaccctcctgcacttttgggagaagacgtcacatactatggcagccatacatgagtcattcaaaggctatcaaccctacgagttcaccacgctcaaatctctccaggatcccatgaaaaagctggtcgagaaagaagaaaaaaagaagatcaaccagcaggagtctactgatgcagcggtccaggagccttctcagttgatctctctcgaggaggagaatcagcggaaggagagtagttcgtttaaaactgaggatgggaagtcaatcctgtccgcacttgacaaagggagtactcacacagcatgttcggggcctatcgacgaattactcgacatgaagagtgaggagggggcatgcttgggaccggtggcgggtacccccgaacctgagggcgccgacaaagatgacctgttattgctctctgaaatattcaatgctagctccttagaggaaggtgaattcagcaaagaatgggctgccgtgttcggagatggacaggtgaaggagcctgtcccaacaatggccctgggcgaacccgaccctaaggctcagacaggtagcggttttctgccctcgcagctgttggaccaaaatatgaaggacctccaggcgagcctccaggagccggcaaaggccgcatctgatctgactgcctggtttagcctctttgctgacttagatccattgagcaatcctgatgccgtaggaaaaacggataaagaacacgagctgttgaatgcgtag

SEQ ID NO: 121217 - DNA, 774 bp, synthetic construct
  misc_feature 1..774: note = Description of Artificial Sequence: Synthetic coding sequence
  source 1..774: mol_type = other DNA
atgagtgggcataaatgtagctacccatgggatttgcaggaccgttacgctcaggataagagcgtggtgaacaagatgcaacagaaatattgggaaaccaagcaggcctttattaaagctacgggaaaaaaggaggatgaacacgttgtagcttccgatgccgacctggacgccaagcttgaactcttccattccatacagcggacatgcctggatctctccaaggcaatcgttctctatcagaaaaggatctgttttcttagccaggaggagaacgaactgggaaaatttttacgctctcagggatttcaggacaagacccgcgcaggaaaaatgatgcaagccacgggtaaggccctgtgttttagcagtcagcagcgactggccttaagaaaccccctgtgccgctttcaccaagaggtagagaccttccgccatcgagccatatccgatacttggctcacagttaaccgcatggagcagtgccgtaccgagtaccgcggggctttgttatggatgaaggatgtgtctcaggagctcgatccagatctgtataagcagatggagaagttccggaaggtgcaaactcaagtgagactggccaagaagaattttgacaagctaaagatggacgtgtgtcaaaaggtcgatctcctaggcgccagtcgttgcaacctgctcagccacatgctggctacctaccagcttgcatgggatcagtggcagggcccacgaaacctcaaagttctgacaaaaatgacgtgctgctgttag

SEQ ID NO: 121218 - DNA, 1452 bp, synthetic construct
  misc_feature 1..1452: note = Description of Artificial Sequence: Synthetic coding sequence
  source 1..1452: mol_type = other DNA
atgtccggccacaagtgtagctacccttgggacctccaggatcggtatgcgcaagacaaaagcgtggttaacaaaatgcaacagaagtattgggagactaaacaggctttcattaaagcaaccggcaaaaaggaggatgagcatgttgtggccagcgacgctgatttggacgctaaactggagcttttccacagtattcagagaacttgcctggacctgagcaaggccatcgtgctgtatcagaagcggatatgcttcctttcacaggaggaaaatgaacttggaaaatttctgcgatctcaaggattccaagacaaaactcgcgccggaaaaatgatgcaggctaccgggaaggccttgtgcttttcaagtcagcagagattagcactcaggaaccctctgtgtcggttccatcaagaggttgagaccttcagacatcgggcaatcagcgacacctggttgaccgtgaaccgtatggaacaatgcagaaccgagtaccgcggcgcacttctgtggatgaaggacgttagccaagagttggacccggatctctataaacaaatggagaagtttcgtaaggtccagacccaggttcgcctggcgaagaaaaacttcgataagctcaagatggacgtgtgccaaaaggtcgacctgctgggtgcctctcgttgtaatctgctcagtcacatgcttgcaacgtatcagactaccttgctgcacttctgggaaaagacctcacatacaatggcagctatccacgaatcttttaagggttaccagccctatgagttcactactctaaagtctcttcaggaccctatgaagaagctggtcgaaaaagaggaaaaaaagaagatcaaccagcaggagagtactgatgctgcagtgcaggagccctcccagctgatctcactggaggaagagaatcagcgcaaggagtcttcttcatttaaaacagaagacggtaaatccattttaagcgcgctggataaaggatctacccatacggcatgttcgggaccgatcgacgaactgttagatatgaaaagcgaagagggcgcttgcctgggacccgtcgctggcaccccggagccggagggtgctgacaaggatgatctccttttgctctctgaaatcttcaacgctagctcattggaagaaggagagttcagtaaggaatgggctgcagttttcggcgatggacaggtaaaagagcccgttccaactatggcactaggggagccagatcctaaagcacagacaggtagtggatttttgcccagtcagttgttggaccagaacatgaaggacctccaggccagtcttcaggagcctgcgaaggcagctagcgacctcaccgcgtggttcagccttttcgcagacctcgacccgctgagcaaccctgacgcagtcgggaagaccgataaagagcatgagctactgaatgcctag

SEQ ID NO: 121219 - DNA, 1452 bp, synthetic construct
  misc_feature 1..1452: note = Description of Artificial Sequence: Synthetic coding sequence
  source 1..1452: mol_type = other DNA
atgtcagggcataagtgttcgtacccatgggacctgcaggaccgctacgcgcaggataagagcgtggtgaacaagatgcagcaaaaatactgggaaacaaaacaggcattcatcaaagcgacggggaagaaagaagatgagcatgtagttgcatccgacgccgaccttgatgcaaagcttgaattatttcatagcatccagaggacatgtctagatctgtcaaaggccattgtcctgtaccagaaacgaatctgtttcctgagccaggaggaaaacgaactggggaaattcctcaggagccaggggttccaggacaaaacccgagccggaaaaatgatgcaggcaaccggcaaagctctgtgtttttccagccagcaacgactggctctgcgaaaccccctctgccgatttcatcaggaggtcgaaacttttcggcaccgtgcgatttcggacacctggctcacggtgaaccggatggagcaatgtagaaccgagtatcgcggagccttactgtggatgaaggacgtttctcaggaactagatcctgacttgtacaagcagatggagaaatttaggaaagtacagactcaagtgcgcctcgcgaagaaaaactttgacaaattgaagatggacgtgtgccagaaggtggatcttcttggagccagtaggtgcaacctcctatctcacatgctggctacataccaaacaacgcttctccatttttgggagaaaacttcacataccatggctgccatccatgaatccttcaagggctatcaaccctacgagttcaccaccttaaagagtctgcaggaccctatgaagaagctagtagagaaggaggagaagaaaaaaataaatcagcaggagtctaccgacgctgccgtacaggaaccatcccagcttatttctctggaggaagaaaaccagaggaaggagagcagcagcttcaagactgaagacgggaagagcatacttagcgccctggacaagggctctacccatacagcctgctcgggcccgatcgacgagctcctagatatgaaaagcgaggagggtgcctgcttagggccagttgccgggacccctgagccggagggggccgataaggacgatttgctcttgctatctgagattttcaacgctagctccttggaggaaggcgaatttagcaaggagtgggcggcggtgtttggtgatggacaggtgaaggagccggtgcccacgatggccctgggtgagccagatcccaaagctcagaccggtagtggatttctgcctagtcagctgcttgatcagaatatgaaggacctccaggcaagcctgcaggaacccgccaaggcagcatccgatcttaccgcatggttctccctgtttgcagacttggaccccctgtctaatcctgacgccgtgggaaagacggataaggagcatgaactgctcaatgcttag

SEQ ID NO: 121220 - DNA, 1452 bp, synthetic construct
  misc_feature 1..1452: note = Description of Artificial Sequence: Synthetic coding sequence
  source 1..1452: mol_type = other DNA
atgtccggacataaatgtagttacccttgggatttgcaagaccgatacgctcaggataagtcagtggtgaacaaaatgcagcagaaatattgggaaactaaacaggccttcataaaggcaacaggaaaaaaggaggatgagcacgtggttgcttccgacgctgatctagatgctaagctggagctttttcactccatccaacgcacctgcctggatctctcaaaggccatcgtgctttaccaaaaaagaatctgcttccttagccaggaggaaaacgaactcgggaagtttctccggtctcagggcttccaggacaagaccagagccggcaaaatgatgcaagctaccggcaaggctctgtgcttcagtagtcagcagcggctcgcccttagaaaccctctgtgtcgctttcaccaggaggtagagacttttaggcatagggcgatcagtgatacatggctgacagtcaatcggatggaacagtgccgtactgaataccgtggagcattactatggatgaaagatgtatctcaagaactcgaccccgatttgtacaagcagatggagaaattccggaaggtgcagacacaggtgcgccttgccaagaagaacttcgacaagctcaagatggatgtttgtcagaaagtagatctgctaggggcatcgcggtgtaacctgctgagccacatgctggcaacttatcagactaccctcctacatttttgggagaagaccagccacacgatggcggctatccacgaatcatttaagggatatcagccctacgagtttacaacactgaagtccctgcaagaccctatgaagaaactcgtggagaaggaagagaagaaaaagataaatcagcaagaaagcaccgatgccgctgtgcaggagccatcccagctgatttccctcgaagaggagaatcagaggaaagagagttcttcctttaaaacagaagacggtaagagcatcttatccgccctggacaaagggtctactcacacagcatgctcaggtcccattgacgagctgcttgacatgaagagtgaggagggtgcttgcctagggcctgtggccggaacccccgagccagagggagccgataaggacgacctgttactcttgtccgaaattttcaacgcctcaagtctggaggagggggagttctctaaagagtgggcagccgtgttcggagacgggcaggttaaggaacctgtgcctacgatggctcttggcgagccagaccctaaggcacagacgggatcggggttcttgccttctcagctgctggaccagaatatgaaagatctgcaggcaagcctgcaggagcccgccaaagctgcgtctgatctaaccgcctggtttagtctgttcgccgatttagatcctctgtccaacccggacgctgtgggtaagacagataaagagcatgaactgttaaacgcttag

SEQ ID NO: 121221 - DNA, 1539 bp, synthetic construct
  misc_feature 1..1539: note = Description of Artificial Sequence: Synthetic coding sequence
  source 1..1539: mol_type = other DNA
atgagcggccacaagtgctcgtacccctgggacctgcaggaccgctatgcccaagacaagagcgtagttaacaaaatgcagcaaaagtattgggaaacaaagcaggcttttatcaaagctactgggaaaaaggaagacgaacatgtcgtggcgtctgacgccgatctggatgcaaagctcgagcttttccacagcatccagcggacatgtctggatctgtctaaagctatagtactctaccaaaaacggatctgcttcttgagtcaggaggaaaacgagcttggcaagttccttcgcagccaggggttccaagataaaacaagggccgggaagatgatgcaggcaaccgggaaagccttgtgcttcagttcccagcagcgcctggctctgagaaatccactgtgccgcttccaccaggaggtggagactttccgacaccgtgctatctccgacacgtggctgacagtgaacagaatggagcagtgccgcacggaatatcgcggagccctgctttggatgaaggacgtgtcacaagaactggacccagacttgtataaacagatggagaagttcaggaaggtccagacccaggtgaggcttgcaaaaaagaacttcgataaattgaaaatggatgtgtgccagaaggtggacctattaggagcgtctcgctgcaaccttctcagccacatgcttgccacgtaccaaactactctgctgcatttttgggagaagacatcccacacaatggcagccattcacgaatccttcaagggctaccagccatatgaattcaccaccctgaaaagcctgcaagaccccatgaagaagctggtggagaaagaagaaaagaagaagattaatcagcaggagtcaactgacgcagctgtccaagaaccctctcagtatctacagaatatttgtctggaaatgaaggcaaactccgatatcaagatgttgcagaagggcaaagagggacagcaaatagggattctgatcagcttggaggaggagaaccagcgcaaggagtcctcttcttttaaaactgaggacgggaaaagcatcctgtccgcactcgacaaggggtccacccatacagcctgctccggccctatcgacgagctgctcgacatgaagagtgaggagggtgcatgcctgggccctgtggcaggcacaccagagcctgaaggggcagataaggatgaccttctgctgctctctgaaattttcaacgcctcaagtttggaggagggcgaatttagcaaagaatgggctgctgttttcggagatgggcaggtaaaagaacctgtcccgacaatggcccttggagaaccagacccaaaagcacagacagggagcggcttcctgccatcacagctcttggatcagaatatgaaggatctccaagccagtcttcaggagcccgccaaagccgcatctgatcttacggcttggtttagtctgtttgctgatctggatcccctctcaaatccagatgctgttggaaagacggataaggagcatgaactgctaaatgcttag

SEQ ID NO: 121222 - DNA, 405 bp, synthetic construct
  misc_feature 1..405: note = Description of Artificial Sequence: Synthetic coding sequence
  source 1..405: mol_type = other DNA
atgtcgggccataagtgttacccctgggatcttcaggaccgttacgcacaagacaaatctgttgtcaacaagatgcagcaaaagtactgggaaactaaacaggcatttattaaggccaccggaaagaaagaagacgagcacgtggtcgcctcggacgccgatctggacgcaaagctggagttgtttcattccattcagcggacttgcctggatctatctaaggcaatcgtcctgtaccagaaaagaatctgcttcttgagccaggaagagaatgagcttggcaagttcctgaggtcccagggcttccaggacaaaacgcgagccggtaaaatgatgcaggctacgggcaaagcactgtgtttctcctcccagcagagactggcgctgaggaaccccctttgctag

SEQ ID NO: 121223 - DNA, 489 bp, synthetic construct
  misc_feature 1..489: note = Description of Artificial Sequence: Synthetic coding sequence
  source 1..489: mol_type = other DNA
atgagcgggcacaagtgctcatatccatgggacctgcaggatcggtacgcccaggataagagtgtcgtgaacaagatgcaacagaagtattgggagaccaagcaggccttcatcaaggcaaccgggaaaaaagaagatgagcacgttgtcgccagtgacgcagacttagacgccaaactggagcttttccactccattcagcggacctgcctcgatctttccaaagctattgtcctttaccaaaagaggatctgtttcctgagccaggaagaaaacgaactgggaaagttcctacgcagtcagggattccaggacaaaacacgcgccgggaaaatgatgcaggcaacaggaaaggcactgtgtttctcttcccagcagaggctggccctccggaatcccttatgcagattccaccaggaggtggaaacgttccgacacagagctatatctgatacatggctcaccgtaaacaggatggagcagtgctag

SEQ ID NO: 121224 - DNA, 666 bp, synthetic construct
  misc_feature 1..666: note = Description of Artificial Sequence: Synthetic coding sequence
  source 1..666: mol_type = other DNA
atggctgcggcgagaccctccctcgggagggtcctccctggaagctccgtgctgtttctctgtgatatgcaggagaaatttcgccacaatattgcttactttcctcagatcgtaagcgtggccgcccgcatgttgaaagtagcacgcctgcttgaggtccctgtcatgcttacagaacagtacccccagggcctgggtccaaccgtgcccgaactgggcaccgaggggttgcgacctctggctaaaacttgcttttccatggtacctgctctgcaacaggaacttgattcaagaccccagctgaggtcagtgctgctgtgcggaatcgaggctcaggcatgcatactcgacccaaggtcatacccaggcctggcgctgactagcctatacccacagaacaccactctggacctgctagataggggacttcaggtacacgtggtcgtcgacgcctgcagctcacgatcccaggtcgaccggctggttgccctggcacgcatgagacaatcaggcgcattcttgtccaccagtgagggccttatcctgcaactggtgggagatgccgtacacccccagtttaaggagatccagaagctcatcaaggaacctgctcctgatagtggccttttgggtctgtttcaggggcagaattcgctgttacactag

SEQ ID NO: 121225 - DNA, 618 bp, synthetic construct
  misc_feature 1..618: note = Description of Artificial Sequence: Synthetic coding sequence
  source 1..618: mol_type = other DNA
atggccgctgcacggccttctctgggaagggtcttacccggcagctccgtgttgtttttatgcgatatgcaggaaaagtttcggcacaacatcgcctatttcccacagatagtgtctgtggccgccagaatgctaaaggttgcgaggttgctagaggtgccggtcatgctgacagagcagtatcctcagggactggggccaaccgtgcccgagctgggaacggagggcctgagacccttggctaaaacatgctttagtatggtgcctgccctccagcaagagctcgacagccgcccgcaattgcggtctgtgctgttatgtggcattgaagcacaagcgtgcattctgaacacgactctggatttactggaccgcggtcttcaggtacatgtggtggtggacgcttgttcgtcaagatctcaggtggataggctcgtcgctttggccagaatgagacagtctggtgcattcctctctacatcggagggcttgattctgcaactagtgggcgacgcagtgcacccacagtttaaagagatacaaaagttgatcaaggagccagcacccgatagcggattgttaggcctgttccagggtcagaactcacttctccactag

SEQ ID NO: 121226 - DNA, 408 bp, synthetic construct
  misc_feature 1..408: note = Description of Artificial Sequence: Synthetic coding sequence
  source 1..408: mol_type = other DNA
atggccgccgctcggccaagcctggggagggtcctcccgggtagcagcgtcctttttctgtgcgacatgcaagaaaagttccggcataacattgcctattttcctcaaatagtcagtgtggccgcgagaatgcttaagaatactacgctggatttattggatagaggtctccaagtccacgtggtggtagacgcttgttccagcagaagccaagtggatcgccttgtagcactggctcggatgcgccagtcgggggctttcctctcaactagtgagggtctgattttgcaactcgtgggtgacgctgtccatccacagttcaaggagatccagaagctcataaaagagccagcccccgacagcgggctcctcggactgttccagggtcaaaactcccttctgcactag

SEQ ID NO: 121227 - DNA, 1101 bp, synthetic construct
  misc_feature 1..1101: note = Description of Artificial Sequence: Synthetic coding sequence
  source 1..1101: mol_type = other DNA
atggctggccccgcctggattagtaaagtcagccgcctgttaggcgcttttcacaaccctaagcaggtgactagaggcttcactggcggcgtgcaaactgtgaccctaattcctggagatggtatcggcccagaaatctcggctgccgtcatgaaaatttttgacgcggccaaggcacccattcaatgggaagagcgtaatgtgacggctattcagggtcctggcggaaaatggatgatcccttcagaggccaaagagtccatggacaagaataagatggggttgaaaggacccctgaagacaccaatagccgctggccacccaagcatgaacctattgctgcggaagaccttcgacctatacgcgaatgtaaggccctgcgtgtcaattgagggctacaaaactccgtacactgacgtaaatattgttaccatcagagaaaatacggaaggagaatactctggaatcgagcacgttatcgtggacggagtagtccagagtatcaaactgattacagaaggagcatccaagcggatcgccgagttcgcgtttgagtatgcacggaataaccatcgttcaaatgtcaccgccgttcacaaggcaaatatcatgagaatgtcagacgggctctttctgcagaagtgccgggaggtggccgaatcttgcaaggatatcaaattcaacgagatgtatcttgacaccgtgtgcctgaatatggtccaggaccctagccagttcgatgtgttggttatgcctaacctgtatggggacattctgagcgacctgtgcgccggactgataggtggacttggggtgacaccaagcggcaacataggggccaacggggtggcaatcttcgagtctgtgcatggcacagctcctgacatcgccggaaaagatatggctaaccctaccgctctgctgcttagtgcagtgatgatgttgcgccatatggggctgttcgaccatgctgcgagaattgaggccgcctgttttgcgaccatcaaagatggtaaatcacttacaaaggacttgggagggaacgctaaatgtagtgacttcacagaagagatctgcaggagggtaaaggacctggattag

SEQ ID NO: 121228 - DNA, 774 bp, synthetic construct
  misc_feature 1..774: note = Description of Artificial Sequence: Synthetic coding sequence
  source 1..774: mol_type = other DNA
atgaacttgttactgcggaagacgttcgacctgtacgcgaacgtaagaccctgtgtctccattgaaggctacaaaacaccatataccgacgtgaacatagtaacgattcgtgaaaacacagaaggggagtatagcggcattgaacacgtgatcgtagacggggttgttcagagcatcaagcttatcacagaaggcgctagcaaacgaatcgcggagtttgctttcgagtacgctcgtaataaccacaggtctaatgtaactgccgtgcacaaggccaatatcatgaggatgtcagatggacttttcctccagaaatgccgcgaagtagccgaaagctgcaaagatattaagttcaatgaaatgtacctggatactgtatgcctgaatatggttcaggatcctagtcagtttgatgtgctcgttatgcccaatttatacggagatatcctcagtgacctctgcgcaggactcatagggggtctcggggtcacccctagcggcaatatcggggccaacggagtcgccatttttgagtctgtccatgggaccgctccagacatagccggcaaagatatggccaaccctaccgctctcctcttgtccgcagtgatgatgctgaggcatatgggattgttcgaccatgcggcccgcattgaggcagcatgttttgcaaccatcaaggatgggaaatcccttactaaagacttaggaggcaacgctaaatgcagtgattttaccgaagagatttgccgcagagtgaaagacctcgattag

SEQ ID NO: 121229 - DNA, 495 bp, synthetic construct
  misc_feature 1..495: note = Description of Artificial Sequence: Synthetic coding sequence
  source 1..495: mol_type = other DNA
atggctgcgttgtcgggagtccgctggttgacccgggctctggtttccgcggggaaccctggggcttggagaggacttagcactagtgcggcggcccatgccgcttcccgttcacaagctgaggacgtccgggtcgagggatcattcccagtgaccatgctgcctggcgacggtgtcggccccgagctgatgcacgccgtgaaagaagtctttaaagcagccgccgtccccgtcgagtttcaggagcaccatctttcggaagtccagaacatggcttcagaagaaaagttagaacaagtccttagctctatgaaagaaaataaggtggccataatcggcaaaatccacaccccgatggagtacaagggcgagctcgcatcttacgatatgagacttaggcgcaagttagatctcttcgcaaatgttgtccacgtaaagagtctccccggatatgatagcgcccagcagagtcggcctggagatcatagtaggtag

SEQ ID NO: 121230 - DNA, 1158 bp, synthetic construct
  misc_feature 1..1158: note = Description of Artificial Sequence: Synthetic coding sequence
  source 1..1158: mol_type = other DNA
atggccgcgctatcaggtgttcgatggctcaccagagcgctggtgtccgccggaaatccaggagcatggaggggtcttagcacatcagctgctgcacacgcagcgtcacgttcacaggcagaggatgtgcgtgtggaaggctcctttcccgtgactatgttacctggtgatggggtaggcccagaacttatgcacgcagtcaaggaagtgttcaaagcagcagcagttccggtcgaatttcaggaacatcatctctctgaggtgcagaacatggcatctgaagagaagctcgagcaggtgctatccagcatgaaggaaaataaggtggccatcattggcaaaattcacacgccaatggaatataaaggggagctggctagttacgacatgaggttgaggcgaaagctggacctttttgcaaacgtggtccacgtcaagagtttgcctggttacatgacacgacacaataatctggacttggtgataattcgggagcagaccgagggagaatattcctcgttggaacacgaaagtgcacgcggcgtgatcgagtgcttaaaaatagtgaccagagccaaatcccagcggatcgctaaatttgcctttgattatgccaccaagaagggaagagggaaagttaccgccgtacacaaggccaatatcatgaagctgggggacggtctgtttctgcagtgctgcgaagaagtggcagaactctaccccaagataaagttcgagacgatgatcatcgacaactgctgcatgcaactggtgcagaacccataccagttcgacgtgttggtaatgccgaacctatacggaaacataatcgacaacctcgcagccggcctcgtgggcggcgctggcgtcgtgccaggggaatcgtactctgcagaatatgccgtgttcgagaccggcgctaggcaccccttcgcccaggcagtcggacgcaatattgcgaaccccacagctatgttgttaagcgcttcaaacatgctccgacacctcaacctggaatatcactcatcaatgatcgctgacgccgtgaagaaggtgatcaaagtcggcaaggtccgaaccagagacatgggcgggtacagcaccactaccgactttatcaaatcagtaataggccacctccagactaaaggatcatag

SEQ ID NO: 121231 - DNA, 1152 bp, synthetic construct
  misc_feature 1..1152: note = Description of Artificial Sequence: Synthetic coding sequence
  source 1..1152: mol_type = other DNA
atggccgctctgagcggcgtgcgctggctgacccgggcactcgtgagtgccggcaacccgggcgcgtggcgtggactgtccacgtctgcggcagctcacgccgcaagtagaagtcaggcagaagacgtgcgtgtcgagggaagtttcccagtgacaatgctgcccggcgacggagtgggaccggaactgatgcacgccgttaaagaggtttttaaagcggccgccgtccccgtggaattccaggaacaccatctttctgaggtgcagaatatggcctcagaggaaaaactcgaacaggtgctatcctctatgaaagagaataaggtggcaatcatcggaaagattcatacccctatggaatataagggcgagctggcttcctatgacatgagactgaggcggaagttggatttgtttgccaacgtggtgcatgtgaaatccctgcccgggtacatgacccgccacaataatctggatctagtcataattagggagcagaccgagggcgaatacagttccctcgagcacgaaagcgctaggggggtaatcgaatgtcttaagattgtcactcgtgccaaaagtcagaggattgccaaatttgctttcgactatgccacaaaaaaaggtaggggtaaggtcaccgcggtgcataaggccaacattatgaagctgggggatggactctttctgcagtgttgcgaagaggtggctgaactctatcccaagattaagtttgagaccatgatcattgacaactgttgcatgcaattagtgcagaacccctatcagtttgacgtcttagtgatgccaaatctctacggaaacatcattgataatctggccgcaggcctcgttggaggcgccggagtcgtgccgggagagagctactctgccgagtatgccgtttttgaaacaggagcaagacaccctttcgcgcaggctgttggtagaaacatcgctaatccaactgcaatgctgctctctgcgtccaacatgctgcgtcatctaaatctggaatatcactcttccatgatagctgacgcagtgaaaaaagtgatcaaggtgggaaaggtaaggacttctgacatgggtgggtacgccacctgtcacgattttacagaggccgtaatcgctgctctgccacatccatag

SEQ ID NO: 121232 - DNA, 702 bp, synthetic construct
  misc_feature 1..702: note = Description of Artificial Sequence: Synthetic coding sequence
  source 1..702: mol_type = other DNA
atgaagatgggcgagagatggagtagtctgtttccattcccagtgtctccaagctgctgctttctcttgacccagtccgctcgcggagtgatcgaatgcctgaagattgttactagggctaaatctcagcgcatcgccaaatttgcctttgactacgcgacaaaaaagggcagggggaaagtgactgcagtgcacaaggccaacattatgaaacttggcgacggcctcttcctccagtgttgcgaggaagtcgcagaactctacccaaagatcaagtttgaaacaatgatcatagacaattgttgtatgcagctcgtacaaaacccgtaccagtttgatgtgctggtaatgccaaacctctacggtaacatcatcgacaatctggcggcaggccttgtcgggggcgcaggagtggtacctggggagagttactcagccgagtacgctgtctttgagacgggagctagacatccattcgcccaggcggttggaaggaatatcgccaaccctaccgctatgttactgagcgctagtaacatgttacgtcatctgaatctcgaataccattcatcaatgatcgccgatgccgtaaagaaagtgattaaggtgggaaaggtgcgaacaagagacatggggggctactccaccaccaccgatttcatcaagagcgtgataggacacttgcaaactaaagggtcctag

SEQ ID NO: 121233 - DNA, 795 bp, synthetic construct
  misc_feature 1..795: note = Description of Artificial Sequence: Synthetic coding sequence
  source 1..795: mol_type = other DNA
atggagagtggcaagaccgcgtcacctaaaagcatgcctaaggacgctcaaatgatggcccagattcttaaggatatgggcatcaccgagtatgagccacgagtcatcaatcagatgttggaatttgcgttcaggtacgtgacaaccatcctggatgacgccaaaatctatagttctcatgccaagaaagccaccgtggatgcagatgatgtgcgtctcgctattcagtgtcgggccgaccagagcttcacctctccccctccacgggatttcctgctcgatattgcccggcagcgaaatcagacccccctccctttaattaagccctatagtggacccaggctgcctcctgataggtactgtttgactgccccgaactataggctgaagagtctgcaaaagaaggccagcactagcgcggggcgaatcactgttccacggctgagtgttggatctgtgacgagccgaccgtcgacaccaactctaggcaccccaactccgcagaccatgagcgtgagcactaaggtaggaactccaatgagcctgactggtcaaagattcactgtccagatgcctacgagtcagagccccgcagtgaaagcttcgattcctgcaactagcgcagtgcagaatgtgcttataaatccttcgctgatcggcagcaaaaacattcttatcacgacaaatatgatgagcagtcagaacactgccaatgagtcttcaaacgccctgaaaaggaaaagagaggacgatgacgatgacgacgatgacgatgacgattacgataatttgtag

SEQ ID NO: 121234 - DNA, 906 bp, synthetic construct
  misc_feature 1..906: note = Description of Artificial Sequence: Synthetic coding sequence
  source 1..906: mol_type = other DNA
atggccattcgacggaatcgggttgcgctgaagggtaatatcgaaaccaaccacaatttaccaccttcgcacaagtcacggaataatatccttagaacctccctggacttatatgctaatgtgatccactgcaagagtctacctggcgttgttacaagacataaagatatagacattcttatcgtgcgcgagaatacagaaggagaatattcatctctcgagcacgagagcgtcgctggagtagtagagtccttaaaaatcattaccaaagcgaagtccctccggattgctgaatacgcatttaagctcgctcaggaaagtgggcggaaaaaggtcaccgcggtccacaaggcgaatattatgaagctcggcgacggcctgtttctccagtgttgcagagaggtcgcggcccgttatccacaaataactttcgaaaacatgattgtggataacactaccatgcaacttgtgagccggcctcagcaattcgacgtcatggtcatgcctaatctgtatgggaacattgttaacaacgtctgcgctggcctggtaggagggccagggctggtcgcgggtgctaattacgggcacgtgtatgccgtgtttgagaccgcaaccaggaacacagggaagtctatcgccaacaaaaatatcgccaatccaacagcaacactcctagcctcctgcatgatgctagatcacctgaagctgcactcgtacgctacctcgatccggaaagctgtacttgctagcatggataacgaaaacggcctggtctgcgctgagcctgcttgcgtcctgcagatgcacactccagatattggtgggcaaggcaccacgtcagaggcgattcaggacgttataaggcatatccgtgtcataaatgggcgtgccgtagaagcttag

SEQ ID NO: 121235 - DNA, 1143 bp, synthetic construct
  misc_feature 1..1143: note = Description of Artificial Sequence: Synthetic coding sequence
  source 1..1143: mol_type = other DNA
atggctttgaaggttgccacggtggccggaagcgctgcaaaagcagtgcttgggcccgccttgttatgcagaccgtgggaggtgctgggcgcgcatgaagtgccttcacgtaacatctttagcgagcagaccatccccccatccgctaaatatgggggccgccacaccgtcactatgattcccggggacggcatcgggcctgagcttatgcttcatgtaaaatcagtcttcagacatgcgtgcgtgcccgtggatttcgaggaagtgcacgtgagcagtaatgctgacgaagaagatattagaaatgctatcatggcaattcggaggaatcgcgtggcacttaagggaaatatcgagactaaccacaacttaccaccttcacacaagtctcggaataatattctgaggacctccttggacctctacgctaacgtgattcattgcaagtccttgcccggcgtggtgacccgtcacaaggacattgatatactaatcgtgcgcgaaaacactgagggagaatacagtagtctggagcacgagtccgtcgctggggtggttgaatccctcaaaattataacaaaggccaagtctctgagaattgccgaatacgctttcaaactcgctcaggagtccgggcgcaagaaggtgaccgctgtacacaaggctaatatcatgaaattgggcgacggcctttttctgcagtgttgtagggaggtcgcagcaaggtacccccaaattacattcgaaaacatgatcgtggacaacactacgatgcagctggtcagtcggccgcagcagtttgatgtcatggtgatgccaaacctgtatggaaacattgttaacaacgtctgcgcagggctggtgggtggaccaggactggtggcgggagccaactacggacacgtgtacgccgtattcgagacggcgacgcgcaataccggcaaaagcatagccaataaaaacatcgcgaacccgacggcaacccttctcgcatcttgcatgatgttggaccatttaaaacttcacagctacgctaccagcatacgcaaggccgtgctcgccagcatggacaacgagaacgtgcggttcccttcacaccctactctcctcccccgccccgtgagcccatgttctctgctttag

SEQ ID NO: 121236 - DNA, 525 bp, synthetic construct
  misc_feature 1..525: note = Description of Artificial Sequence: Synthetic coding sequence
  source 1..525: mol_type = other DNA
atgtatacgttcgatcaggccactggcggcaccgcccaatttgaggctcattccgacgctcaggccctcgttctactggatgtgacccccgaccaatccatggtcgatgagggtatggctcgcgaggtgattaatcgcatccaaaaactgcgcaaaaaatgtaatctggtccctacggatgagattaccgtgtactataaggcgaaatctgaaggaacatacttaaacagcgtgatcgagtcacacacagaatttatctttaccactattaaggcaccattgaagccataccctgtctctccatcagacaaggtgctcatacaggagaaaacacagctcaaagggagcgaactcgagatcacactcactagggggtcaagcctgcccggaccagcttgcgcatacgtgaatctgaatatctgcgcgaatggctctgaacaaggcgaaatgcagtggatcatccccgaaatctatcatttctggaagcctaggtggagcatcgccccagggaagagtaagaggtag

SEQ ID NO: 121237 - DNA, 525 bp, synthetic construct
  misc_feature 1..525: note = Description of Artificial Sequence: Synthetic coding sequence
  source 1..525: mol_type = other DNA
atgtatacctttgaccaagcgaccggcggaactgcccagttcgaagcgcactccgacgcccaagccctggttcttctagacgtgacgcctgaccagtcaatggtggacgaagggatggcgagagaagtaataaatagaatacagaagttacgtaagaaatgtaatttagtgcctacagatgaaatcactgtctattacaaagctaagagtgaggggacgtatctcaactcagtcattgagtcccatactgagttcatcttcactacaataaaagctccactgaaaccataccccgtttctccgagcgacaaagtgcttatccaagagaagacccagctgaagggatcagagctagagattactcttacgcggggctccagcctgcccggccccgcctgtgcatacgtgaacttaaatatctgtgccaatggaagcgagcagggcgaaatgcagtggatcatccccgagatttatcacttttggaaaccccgctggtcgatcgccccaggcaagtcaaaacggtag

SEQ ID NO: 121238 - DNA, 3789 bp, synthetic construct
  misc_feature 1..3789: note = Description of Artificial Sequence: Synthetic coding sequence
  source 1..3789: mol_type = other DNA
atgctgcagcaggtccctgaaaacattaattttcccgccgaggaggagaaaattctggaattctggacagaatttaattgcttccaggagtgcctgaaacaatccaaacacaagccaaagttcacattctacgacggtcctccgttcgctacaggactgccccattatggacacatattggccggtacaatcaaggacatagtcacgcgctatgcccaccaatcagggtttcacgtcgataggcgcttcgggtgggactgtcacggactgcctgtcgaatatgaaattgacaagacgctgggaatccgcggacccgaagacgtggccaagatgggaatcaccgagtataataatcagtgcagagcaatcgtcatgcgatactccgctgagtggaagtccactgtgtccaggctgggaagatggattgactttgacaatgactataaaacactgtacccccagtttatggagtcagtgtggtgggtattcaaacaactatacgataagggccttgtgtatagaggtgtgaaggtcatgccattcagcaccgcctgcaacacacccttgagtaactttgagagtcatcagaactataaggatgtgcaagatccgagcgtgtttgtgaccttccctcttgaagaggatgaaaccgtgagtttagttgcttggaccactaccccttggactctgcccagcaatcttgccgtctgcgtgaaccccgagatgcagtatgtaaagataaaggatgtggccagagggagattactgatcctgatggaggctcgattatccgccctgtacaaattggaaagcgactacgagatcttggagaggtttcctggtgcatatcttaaaggtaagaaatatcgcccactattcgattattttctcaaatgtaaagaaaatggggccttcactgtcctggtggacaattacgtaaaagaagaagagggtaccggggtagtgcaccaggccccatattttggggctgaggattacagggtgtgtatggattttaacattattagaaaggacagtcttcctgtctgtcctgtggacgcgtcaggttgtttcacgactgaggtcactgactttgctggccagtacgtgaaggatgccgacaagagcatcatcagaaccctcaaagagcagggaaggctgctggtggccacaacctttacgcactcatatccattctgctggagatccgacacccccttgatctacaaggccgtcccctcgtggtttgtgagggtcgaaaacatggtggaccagctcctgagaaacaatgacctctgctattgggtccccgagctggtgagggagaagagattcgggaactggttgaaggatgccagagattggaccatcagtcgcaatagatactgggggacaccaatcccactgtgggtttcagatgactttgaagaagtcgtctgtattggatctgtcgctgagctcgaggaactgtcgggcgccaagatctctgacctgcaccgtgaaagcgtcgatcatcttaccattcccagccggtgtgggaaaggtagcctgcatcggataagtgaagtgttcgactgttggttcgagagtggaagcatgccatacgcccaggtgcactacccttttgaaaacaaaagagaatttgaggacgcatttcctgccgactttatcgcggaaggaattgaccagactcgggggtggttttacacccttctggttctggcaaccgccctgtttgggcaaccaccattcaagaatgtcatcgtcaatggactggtgcttgcctcagatggccagaagatgagcaagaggaaaaagaattatcccgatcctgtttcaattatccagaaatacggggctgatgcccttcgtctgtatctcatcaactctccagtggtgcgagccgaaaatttgcgttttaaagaggagggcgttagagatgtactcaaagatgtgcttctgccgtggtacaatgcttaccgcttcttaattcagaacgtgcttaggctgcagaaagaggaggagatcgaatttctctataatgaaaacactgtgcgcgagagccccaatatcacagaccgctggattctgtcatttatgcagtctctgattggcttcttcgagacagagatggcagcctacaggctgtacaccgtggtccctcggctggtgaagtttgtcgatatacttactaactggtatgtgcgcatgaatcgccgccggctgaagggcgagaatggaatggaagactgcgttatggccctagagactctctttagtgtgctgctgtccctgtgtcgactcatggccccctatacaccctttctgacagaactgatgtaccaaaatctgaaggtgctgatagaccccgtgagcgttcaggacaaagatactctgagtatacactatctgatgctgccacgggtgcgcgaggagctaatcgacaaaaagaccgaaagtgccgtgtctcaaatgcagtcagtcatcgaactggggcgagtgattagagacaggaagacaattccaattaagtaccctttgaaggaaattgtggttatacaccaggacccagaagccctgaaggacattaaatcactggagaaatatataattgaggaactgaatgtgcgcaaagtcactctgtcaacagacaagaacaaatatggtatccgtctcagagccgagcccgaccacatggtgctaggcaaacgcctcaagggggctttcaaggccgtgatgacttccattaagcagctgtctagtgaagagctggagcaatttcagaaaacaggtactatcgtagtggaaggacatgaattacacgacgaggacatccgactaatgtacacattcgatcaggccacaggtgggactgctcagttcgaggcacacagtgacgcccaggccctggtcctgcttgacgtaaccccagaccaatccatggtcgacgaggggatggccagagaggtcatcaaccgcattcaaaaactcaggaagaaatgtaatttggtccctaccgacgaaatcaccgtgtattataaggctaagtctgagggcacttaccttaatagcgttatcgagagccacactgagtttatcttcaccacaattaaggccccccttaagccctaccccgtgtcaccatcggataaggtgctcattcaagaaaagactcaattgaagggcagcgaacttgagataacactgacgcgaggctcaagcctgcctggcccagcatgtgcctatgtgaatctgaacatatgcgctaatgggtccgaacagggcggcgtactgctgttagaaaacccaaaaggcgacaatagattagacctgctcaaacttaaatcagtggtgaccagcattttcggagtgaagaacactgagttagctgtgtttcacgacgagacagagattcagaatcaaactgatctgcttagcctgtctggcaagactctctgtgtgacagccggttccgcacccagtctgatcaactcctctagcacgctcctgtgtcagtacatcaatttacagcttttgaatgcaaagccccaggaatgtctcatgggtacagtggggacgctgctattggaaaacccccttggccagaatggtttgacccatcaaggtctcttgtatgaagctgctaaggtgttcggcctcaggagcagaaagctgaaactgtttttgaacgagacacagacccaagaaataacagaagacatccctgttaaaaccctgaacatgaaaacagtgtatgtgtctgtactccctaccaccgccgatttctag

SEQ ID NO: 121239 - DNA, 3729 bp, synthetic construct
  misc_feature 1..3729: note = Description of Artificial Sequence: Synthetic coding sequence
  source 1..3729: mol_type = other DNA
atgctacagcaggtccctgagaatatcaacttccccgctgaggaagagaagattctggagttttggacagagtttaattgtttccaggaatgtttaaagcagtctaagcacaagcccaagttcacattttacgacggaccgcccttcgccaccgggctgccccattacgggcatatcctagcgggcacaattaaagatatcgtcacgcgatacgcacatcagagtggctttcacgtcgaccgtcgtttcggttgggactgccatggcctgccagtcgagtacgagattgataaaacccttgggattcgtggccccgaagatgtggcaaaaatgggaataactgagtataacaatcagtgtcgagcaattgttatgagatacagcgctgaatggaaaagtaccgtgtcccggctcggccgctggatcgatttcgataacgactacaagaccctctacccgcagttcatggagtcagtatggtgggtgtttaaacagctctacgacaaaggcctcgtgtaccggggggtgaaagttatgcctttttcaaccgcttgcaacactcctctcagcaactttgagagccatcagaattataaagatgtgcaggatccatccgtatttgtaacattccccctggaagaggacgagactgtctcgcttgttgcttggactacgacaccttggaccctgccaagcaacctggcagtgtgcgttaatcctgaaatgcagtatgtgaaaattaaggatgtcgctagaggccgtttgctcatcttgatggaagcgagattgagtgctttgtacaagctggagtctgattacgagatccttgagaggtttccgggcgcgtacctcaaggggaaaaagtaccggcccctattcgattacttcctcaaatgcaaggaaaacggtgctttcacagtgcttgtcgataactacgttaaagaagaggaaggtaccggagtggtccaccaagcaccatatttcggtgccgaggattaccgcgtgtgcatggatttcaacattataagaaaagacagcctgcctgtatgtcctgtggacgcgtctggctgttttacgacagaggtgaccgattttgccggacagtacgtgaaggacgcagacaagtctattatccgaacattaaaggaacagggtaggctgctcgtggctactactttcacgcacagctaccccttttgctggaggtctgatactcctctgatctataaagctgtgcccagttggtttgtgagagttgagaacatggtggatcagctgctgagaaataatgacctttgctattgggtgcccgaactcgtcagagagaagagatttggcaactggcttaaagatgcgcgtgattggacaattagtcgcaaccggtactgggggacacctattcctttgtgggtttcagacgattttgaggaggttgtgtgcattggatcagtagcagagctcgaagagctgtcaggcgctaagatctctgatctgcaccgagaatctgtcgaccacctcacaatcccctccagatgcggcaaaggatcacttcaccgtatttctgaagttttcgactgttggttcgagtctggctctatgccgtatgcccaagtacattacccattcgaaaacaagagggaatttgaggacgcgtttccagctgattttattgctgagggcatcgatcagaccagggggtggttttatacactactggtcctagcaacagcactcttcgggcagccccctttcaaaaatgtgatagttaatggcttagttctcgcctcagacggacaaaagatgtcgaaacgcaagaaaaactatcctgaccccgtgtcaattattcagaaatacggcgcggacgccctgcggctctatctgattaactctcctgtcgtgcgcgcggaaaacctccgatttaaagaagagggagtgagggacgtgctgaaggatgtgctccttccttggtataacgcttaccgattcctgattcagaacgtattgcgcctgcagaaggaggaggagattgagttcctgtacaatgagaacaccgtcagagagtctccaaacatcacagatcgctggattttatcttttatgcaatccctcataggattcttcgaaactgagatggccgcatacaggttatacaccgtggtgccacggctggtgaaattcgtggatatcctgacaaattggtatgtcaggatgaaccgccgacgcttgaaaggcgagaacggaatggaagactgtgttatggcattagagactctgttttctgttcttctgtcactctgtaggctgatggcaccttataccccgtttcttacagaacttatgtaccaaaatttaaaggtgttgatcgatcctgttagcgtgcaggataaagacacgctgagcatccattacctcatgctcccacgcgtgcgagaagagcttattgacaagaaaaccgaaagcgctgttagccagatgcaaagtgtcattgagctcggccgggttatccgcgaccgcaaaaccatacccattaagtaccccctaaaagaaatcgttgtaattcatcaggaccccgaagctcttaaggacataaagtctttagaaaagtacataattgaagagttaaacgtgaggaaagtgacactttccacagacaagaacaagtatgggatccggctccgcgcggagcccgaccacatggtgctagggaaacgtcttaagggtgccttcaaggctgtgatgaccagtatcaaacaactgagcagcgaggagttggagcagttccagaagaccggcacaattgtggttgagggccacgagctgcacgacgaggacatccggctgatgtacactttcgatcaagccacaggtggaactgctcaatttgaagcgcatagcgacgcccaagccctggtacttctggacgttacacctgatcagtcaatggtcgacgaaggcatggcgagggaggtgatcaaccgaatccagaagttgagaaagaagtgcaatttggtccctactgacgagatcactgtgtactataaagcaaaaagcgaagggacatacctgaatagtgtcatagagagtcacaccgagttcatattcacgaccattaaagctcctttgaagccctaccctgtgtcaccctcagataaagttctgatccaggaaaagactcaactgaaggggagtgagctggaaatcactttaactcggggatcctcgctgccagggcctgcttgtgcttatgtaaacctgaacatctgcgcaaatggttccgagcaaggcggagttcttttgcttgagaatcccaaaggggataacagactcgacctgctgaaactcaagtctgtcgtcacttctattttcggcgtgaagaataccgaactcgcggtgtttcacgacgaaaccgaaattcagaaccaaaccgacttgctgagcttaagtggaaagacactgtgcgttaccgctgggagtgcgccttctctgatcaattctagttctaccctcttgtgccagtacatcaacctgcaattgctgaatgctaagcctcaggaatgcctgatgggcaccgtgggcactcttttgttggagaacccactcgggcagaacggcctaacacaccaagggctcctctacgaagcagccaaggtgttcggcctcaggagcagaaaactgaaactgttcctgaacgagacccaaacacaggagatcaccgaggatatcccttag

SEQ ID NO: 121240 - DNA, 993 bp, synthetic construct
  misc_feature 1..993: note = Description of Artificial Sequence: Synthetic coding sequence
  source 1..993: mol_type = other DNA
atgctccagcaagtgccagagaatattaattttcccgcggaggaagaaaagatattagagttctggacagagttcaactgcttccaagagtgtctaaaacagagtaagcataaacccaagtttaccttctacgacgggccaccctttgccaccggactgccccactacggccacatactggccggaacaattaaggacattgtaacacggtatgcccatcagtctggattccatgtggacagaaggttcgggtgggactgccacggcctgcccgtggaatacgagatcgacaagaccctgggaattcgtgggcccgaagacgtggccaagatgggcataacagaatataacaatcaatgcagggctatcgtgatgcgttatagcgcagaatggaagtccaccgtctctcgtttgggccgctggatcgactttgataatgactacaagacgttgtatcctcagttcatggaaagtgtgtggtgggtcttcaaacagctatacgacaagggccttgtctaccggggggtaaaggtgatgcccttcagcacggcctgcaatacacccctgtcaaacttcgagtcccatcagaattacaaggatgtacaggacccttctgtgttcgtgacattcccacttgaggaagacgagaccgtgtccctagtggcctggacaactacaccatggaccctgcctagtaatctggccgtgtgtgttaaccctgagatgcagtatgtcaagatcaaggatgtggcgagaggcagattgctgatattaatggaggccaggctgtcagccctgtacaagctggagtctgactacgagattctagagcgctttcccggcgcttacctgaaaggcaagaagtaccgcccactgttcgattactttctgaagtgcaaagagaatggcgcttttacagtgctggtggacaactatgtgaaagaagaagaagggaccggagttgtgcatcaggcaccctacttcggagcatag

SEQ ID NO: 121241 - DNA, 513 bp, synthetic construct
  misc_feature 1..513: note = Description of Artificial Sequence: Synthetic coding sequence
  source 1..513: mol_type = other DNA
atggcaccctacaccccttttttgacagagctgatgtaccagaatctcaaggtcttgattgaccctgtgagcgtgcaagacaaagacactctgtccattcattatctaatgctcccaagagtacgggaagaactgattgacaagaagacagagagtgccgtatcacaaatgcagagcgttatagaattaggcagagtaataagggataggaagacaattcctatcaagctaaagggttccgaacttgagattactcttactaggggttcctctttacccgggccagcttgcgcttatgttaatctgaatatttgcgcaaatgggagcgaacagggcggcgtactgctgctcgaaaatcccaagggagataacaggctggacctcctgaagctgaaatctgtagttacgagcattttcggtgtaaagaataccgaactcgccgtgtttcatgatgaaaccgagatacagaaccagaccgatctgctgagcctgtcagggaagacgctgtgctag

SEQ ID NO: 121242 - DNA, 3789 bp, synthetic construct
  misc_feature 1..3789: note = Description of Artificial Sequence: Synthetic coding sequence
  source 1..3789: mol_type = other DNA
atgctgcagcaggtaccagagaacattaattttccggcggaggaagagaagatcctagagttctggaccgagtttaattgttttcaagagtgcctgaaacaatctaaacacaaacctaagttcacattttatgatggaccaccctttgccacaggtctgccccattacggccacatccttgccggaactatcaaggacatcgtgacacgctacgcacatcagtctggtttccacgtcgatagaagattcgggtgggactgccatggacttcccgttgaatacgagatcgataaaacactgggtatcagggggcctgaggatgtggctaagatgggtataactgaatataataaccagtgcagggctatcgtgatgcgttattcggccgagtggaaatccaccgtgtcccggctgggcaggtggatcgatttcgataatgactataagaccctctatcctcagttcatggagtcagtctggtgggtctttaaacaactgtacgacaaaggtctggtctataggggcgttaaagtgatgccattctccacggcttgcaataccccactctctaattttgagagtcatcagaattacaaagatgtgcaagatccatctgtcttcgtgacttttcctctggaggaggacgagacagtgagcctggtggcctggaccaccacgccgtggaccctcccatccaacttggcagtgtgtgttaacccagaaatgcagtacgttaaaatcaaagacgttgcacgcggcagactactaatcctcatggaagcaagactctcggctctttacaagttggaaagtgattatgagatcctcgaacgcttcccaggcgcctacctcaagggcaagaaataccgaccattattcgactacttcctaaagtgtaaagaaaacggggcattcaccgtgctcgtggataattacgtgaaggaagaagaagggacgggtgtcgtgcaccaggctccttacttcggcgccgaggactatcgggtctgcatggattttaacatcatacgtaaggactccctgcccgtgtgtccagtggacgcgagcggatgctttactaccgaggtgaccgactttgcagggcagtacgtcaaggatgctgataagtcgatcattcgcacattgaaagagcaagggcgtctgctcgtggccactacattcacccatagttaccctttttgctggcggagtgatacaccgttaatctacaaggccgtacccagttggtttgtgcgtgtcgaaaatatggtagaccagctgcttaggaataatgacctctgctattgggtccccgagcttgtgcgcgagaaaaggtttgggaattggcttaaagatgctcgtgactggactattagtagaaaccggtactggggcacccctatacccctctgggtgtccgatgacttcgaggaagtggtgtgcattggcagtgtggccgagcttgaagaactgtccggcgcgaaaatctcagaccttcaccgggaaagtgtggaccatctgactattccgagcagatgtggaaaggggtccctccatcggattagcgaggtcttcgattgctggttcgaatccggtagtatgccgtacgctcaggtccactatcctttcgagaataagagggaattcgaggacgctttcccagcggattttatcgctgagggcatcgatcagactcgagggtggttctacacattgctggttttggccactgctctgtttggacagcccccttttaagaatgttattgtaaatgggttggtgctggcctccgacgggcagaagatgagcaaaagaaagaaaaattaccctgatcccgtttcaataatacagaaatacggtgccgacgccctcagactgtatcttatcaattcaccagtcgtgagggcagaaaatctccgattcaaggaggaaggagtgagggatgtgctcaaagatgtccttcttccttggtacaacgcctaccgtttcctcatacagaacgtgctccgcctgcaaaaagaggaggagattgaatttttatataacgaaaacactgtgcgcgagagccccaatatcactgaccgctggattctgtcattcatgcagtctcttatcggtttctttgagactgagatggccgcttacagactgtatactgtggtgcccagactggtcaaattcgtggatattctgacaaactggtatgtcaggatgaatcggagacggctgaagggagaaaatggcatggaagactgcgtaatggcactcgagactctgtttagcgttctcttgagcctttgccgattgatggcgccttacacccccttcctgaccgaacttatgtatcagaacctcaaggttttgattgatccagtgagcgtccaagataaagacaccctaagcatccactacctgatgttgcccagagtgagggaagagctgatcgacaaaaaaaccgagtcagccgtaagccagatgcagagtgttatcgaacttggaagagttattagagaccggaagacgatccccatcaagtatccgttgaaagagatcgtagttatccaccaagatccagaagcactgaaagacatcaaaagtttggaaaaatacataattgaggagctgaatgtgcgtaaggtgaccctgagcactgataagaataagtacggtatccgactccgagccgagcccgatcatatggtgttgggaaaacgccttaagggagcgtttaaggctgtgatgacgtcgatcaagcaattgagtagcgaagagcttgaacagttccaaaagaccggcactattgtggtcgaaggccatgagctccatgatgaggatatacgcttgatgtacacctttgaccaagcaaccggaggcacagctcagttcgaggctcatagtgatgcccaggcccttgtactgttagatgtgacccctgaccaaagcatggtcgatgaggggatggcacgggaggtcatcaatcgtattcagaagcttcggaagaaatgcaacttagtgcccaccgacgagataactgtatactacaaggcgaaatccgaaggcacttatctcaacagcgtgatcgaatctcataccgagttcatctttaccacaatcaaggccccactaaagccctaccctgtgtctccttctgacaaggtgcttatccaggagaaaacgcaacttaaaggcagtgagttggagattacacttacccggggtagctctttaccaggtcctgcttgcgcttacgttaacctgaacatctgtgctaatggttctgaacagggaggagtcctgctgctggagaatcctaagggagataacaggctcgacctacttaagctgaaatctgtggtcacctccatcttcggcgtaaaaaatactgaactggccgtcttccacgacgaaaccgaaattcaaaatcaaacagacttattatccctgtcaggcaagacgttatgtgtcactgctggtagcgcaccttcattaatcaattcttcctccactctgctgtgccagtatataaaccttcagctgctgaatgctaagccccaggagtgcctgatgggcaccgtgggtacacttctactcgagaatcctttgggccagaacggtctcactcaccaaggacttttgtatgaggccgccaaagtgtttgggctcaggagtcgaaaactgaaactgtttctcaatgagacccaaacccaagaaatcacagaagacattcctgtcaaaacattgaatatgaaaacggtttatgtcagcgtcctgcctacaaccgccgacttctag

SEQ ID NO: 121243 - DNA, 3459 bp, synthetic construct
  misc_feature 1..3459: note = Description of Artificial Sequence: Synthetic coding sequence
  source 1..3459: mol_type = other DNA
atgggcatcaccgagtataacaatcaatgccgcgcaatcgtgatgcgctattctgcagagtggaaaagtactgtgagcagactgggccgctggatcgatttcgacaatgattataaaactctgtatccccaatttatggagtccgtgtggtgggtcttcaaacagctgtacgataaaggactggtataccgcggggttaaggtgatgccattctccacggcctgcaatactcctctgtccaatttcgagtctcatcaaaactataaggatgtgcaagatccctcagtgttcgtgactttcccattagaggaagatgagacggtgtctctagtggcgtggactactacgccctggaccctgccctctaacctggctgtttgtgttaaccctgagatgcagtatgtgaagattaaagacgtcgcccgtggtaggcttctcatcttgatggaggccaggcttagcgccctctacaagctggaatctgactacgagattttggagaggttccccggggcctatctgaagggcaagaaatatcgtccattattcgactacttcctgaaatgtaaagaaaatggagcattcaccgtcctcgtggataattacgtcaaagaggaggaaggcacgggtgtagtgcaccaggccccgtattttggcgccgaagactatagagtatgcatggattttaacattataaggaaggactcactgccggtatgccccgtcgacgccagcggctgtttcacaacagaggtaacagactttgccggccagtacgtaaaggacgctgacaagagtataataaggactctgaaagaacaagggaggctcctggtggcaacgactttcacacactcctatcctttctgctggagatccgacacaccgttgatttacaaagccgtccctagttggttcgtgcgcgtcgaaaacatggtggatcagctcctccgcaacaatgacctgtgctattgggtgccagaactggtgcgggagaagaggttcggtaactggttgaaagatgcccgggactggactatctcccgcaatcgatattggggtacgccaatccccctgtgggtgagcgacgatttcgaagaagttgtgtgtatcggaagcgttgcagagctggaggagttgtccggcgccaagatcagtgatctacatagagaaagtgtcgatcatctcactatcccgtcccgctgcgggaagggtagtctgcatcggatatctgaggtgttcgattgctggttcgaatctggatcgatgccatatgcccaggttcactatcccttcgagaataaaagagagtttgaggacgccttcccagccgattttatcgccgaaggaattgatcagacccgagggtggttctacacgttgctcgtgttggccactgccttgttcggacaaccgcctttcaagaatgttattgtaaatggccttgtgctggcgagcgatggtcagaagatgtccaagcgcaagaagaattacccggatccggtgtccattatccagaagtacggcgctgacgctctacgcctatacctaatcaatagtccagtggtgcgtgccgagaatctgcgctttaaagaggaaggggtgcgggatgtcctgaaggatgtgctgctgccttggtacaacgcctatagattcctgatacagaacgtgttaaggttacagaaagaagaggagattgagttcctgtacaacgagaatacagtgcgcgagagcccaaatataaccgaccgctggatcctgtcgtttatgcagtccttgatcggattcttcgagaccgaaatggccgcctataggctgtataccgtggtgccccgcctggtaaagtttgttgatattctaacgaattggtacgtgcgcatgaacaggagaaggcttaaaggtgaaaatggtatggaggattgtgtcatggcgcttgagaccctgttttctgtactcctgtccttgtgccgcctgatggctccctacactcctttcctgactgaacttatgtatcagaacctgaaggtactcatagatcctgtgagcgtgcaggataaagacactctttccatccactacctgatgttgcctcgcgtgagagaagaactcattgataagaaaaccgagagcgctgtcagccagatgcaatcggtgatagaactagggcgcgtgatccgggatcggaagaccatacccataaaatatcctcttaaggagatcgtggtgatacaccaggaccccgaagcccttaaagatataaaaagcctggaaaagtacatcatcgaggaactcaatgtgcggaaggtgactttaagcactgacaagaacaaatacggtatccgccttcgtgccgaacctgatcatatggtgctcggaaagaggctcaaaggcgcctttaaagctgtcatgacctccatcaagcaactttcaagcgaggagttggagcaattccaaaagactggcacaatagtggtggaagggcatgaactgcacgacgaagacattaggcttatgtatacttttgaccaggccactggaggcaccgcccagttcgaagcacactcggacgcgcaggcactggtgctcctggatgtgacacccgaccagtcaatggtcgacgagggtatggccagagaggtgatcaataggatccaaaaactacgcaagaagtgcaatctcgttcccactgatgaaatcacagtgtattacaaagccaaatctgagggtacatacctgaattccgtgatcgaatcacatacagaattcatcttcaccacgataaaggctcctcttaagccgtatcctgtgtctcctagcgataaagtgttgatacaggagaaaacccagcttaagggaagcgagctggaaataacgcttacccgcggcagtagcctccccggcccagcgtgcgcatatgtcaaccttaacatctgcgcgaacggttctgagcaagggggcgtgctgctcctggagaatccaaagggggacaaccgcctggacctgctcaagctcaaaagcgtagtcacctcaatctttggagtcaaaaatactgaactggctgtttttcacgacgaaaccgaaatccagaatcagaccgacctgctcagcctgtcaggcaaaactctctgtgtgacagccgggagcgcgcccagcctgataaatagtagtagcactttgctgtgtcagtacatcaatctgcagcttctgaacgcaaaaccccaagagtgcctgatgggcactgttgggacgctgctgttggagaaccccctgggccagaatggattgacccaccagggcctattatacgaggctgctaaggtgtttgggctgcgaagcaggaagcttaaactctttctgaatgagacccaaactcaggagatcactgaggatatcccagtgaaaaccctgaatatgaaaacagtttatgtcagcgtattacccactactgccgatttctag

SEQ ID NO: 121244 - DNA, 750 bp, synthetic construct
  misc_feature 1..750: note = Description of Artificial Sequence: Synthetic coding sequence
  source 1..750: mol_type = other DNA
atggccccgtatacacccttccttacagaactgatgtatcaaaatcttaaggtactaattgatcccgtgtccgttcaggataaggacacactctctatccactatctcatgctgccccgtgtaagggaggagctgatcgacaaaaagacagagagcgccgtctcgcagatgcagtccgttatcgaacttggcagagtgatacgagataggaaaacgatccccatcaagtatccactgaaggaaatcgtagtcattcaccaggatccagaggccttaaaggacattaagagcttggagaagtatattattgaggagctcaatgtgcggaaagtgaccctttctacagacaagaacaagtatgggatccgccttcgtgctgaaccggaccacatggtgctgggcaagcgcctcaaaggtgccttcaaggcggttatgactagcatcaagcagctgtctagtgaggaactggagcagtttcagaagaccggcactatcgtcgtggaaggacacgagctgcatgatgaagacatccgactgatgtatacttttgaccaggctaccgggggcaccgcccagtttgaggctcactccgacgcacaagctctggtccttttggacgtgacccctgatcagtcaatggtggatgaggggatggctagggaggtaattaacaggatccagaagcttaggaagaagtgcaacctggtgcctaccgatgagatcaccgtgtattacaaggctaagtcttag

SEQ ID NO: 121245 - DNA, 513 bp, synthetic construct
  misc_feature 1..513: note = Description of Artificial Sequence: Synthetic coding sequence
  source 1..513: mol_type = other DNA
atggcgccctatacgccatttctcactgagctgatgtaccagaatcttaaagtgcttattgatcccgtcagtgttcaggataaggacaccctaagcatccattatctcatgttgccccgggtgcgtgaggaactcattgataagaagacagagtccgcggtgtcccaaatgcagtcagtaattgaattgggcagagtgatccgggacaggaagacaatccctattaagcttaagggatccgaactcgagattaccttgacgagagggtccagtcttccaggaccagcctgcgcttacgtaaatctgaacatctgtgctaatggctctgaacaaggcggagtgctcctgctggaaaaccccaaaggtgataataggctggatctgttaaagctcaagagcgttgtgacgtccatctttggggtcaagaataccgagcttgcagtgtttcatgacgaaacggagatccagaaccagaccgacctgctgagcctgagcggaaaaacattgtgctag

SEQ ID NO: 121246 - DNA, 816 bp, synthetic construct
  misc_feature 1..816: note = Description of Artificial Sequence: Synthetic coding sequence
  source 1..816: mol_type = other DNA
atgatggtactacttctgcagctggattgcctgaccatggacatatatttgcgggacaaggataccctttccattcattacctaatgctgcctcgggtccgggaggaactgatcgataaaaagaccgaaagtgccgtcagtcagatgcagtctgtgatcgagttaggaagggtgattagggatcgaaaaaccatccccatcaaactgaagggctccgagttggagatcaccttgacccgtggtagctctctgccgggacctgcctgtgcctatgtgaacctgaatatttgtgctaacggatcagaacaaggcggcgtgctcctgttggaaaatccaaaaggagacaaccgcttggaccttcttaaactgaaatcagttgtgacaagtattttcggggtgaaaaatacagaacttgctgtatttcacgatgagaccgaaatccagaaccagactgaccttctatccctgtccggcaagactctttgcgttacagctgggtcagccccttcattaatcaactcctcctctacactgctttgtcaatacattaaccttcagctgctgaatgctaagccccaagagtgccttatgggtactgtagggactctcctcctggaaaatcccctcggccagaacggcctgacacaccagggactcctttacgaggcggcaaaagttttcgggctgcggtcacggaaactgaagctttttttaaatgagacgcaaactcaagagatcacagaagacattcccgttaagactctgaacatgaagacagtttacgttagcgtcctcccaactacggccgacttttag

SEQ ID NO: 121247 - DNA, 3039 bp, synthetic construct
  misc_feature 1..3039: note = Description of Artificial Sequence: Synthetic coding sequence
  source 1..3039: mol_type = other DNA
atgcgatggggattacggccacgcggaccaggggccgctgctctggctacagccaggtccctttggggaacaccaaggctaccatgcagccccggttggcagggggctacgaagaggctgctggtcagaagcgttagcggtgcaagtaatcaccagcccaacagcaactcaggacgctaccgcgacaccgtgctgctgcctcaaacttctttccctatgaagcttctcggccggcagcagcccgacacagaactcgagattcagcaaaagtgtggcttctctgaattatattcttggcagcgggaaagaaaggtaaaaaccgaattctgcttgcatgatgggccaccctacgccaacggtgacccacatgtgggtcacgcattgaacaaaatcttgaaagatatagccaaccgttttcacatgatgaacgggtctaaaatccattttgtgccagggtgggactgccacggactgcccatcgaaatcaaagtgttgagtgagctgggcagagaggcccagaatctctcagcaatggaaatccgaaagaaggccagatcctttgctaaggccgctattgaaaaacagaaatctgccttcatcagatggggcatcatggccgattggaataattgctactatacattcgacggtaaatacgaggctaagcagctgcgcactttttaccaaatgtacgacaaaggcctcgtttatagatcttataagccggtcttttggagcccttcttctcgtaccgcattggccgaagcagagctggagtataaccccgaacacgtgagtagaagtatatacgtcaaattcccgctgcttaaaccttctcccaaacttgccagccttatcgacggatcatcccccgtaagcatactagtgtggactactcagccatggacgatacctgcaaacgaagccgtgtgttatatgcctgagtcaaaatatgcagtggtgaaatgttctaaatctggcgacctatatgttctcgctgctgacaaggtagcgagcgtggcgtcaaccctggagaccacctttgaaaccatctccactctcagtggagttgatttagagaatggcacatgtagtcaccctctcatccccgacaaagcatcacccttgctgccagccaaccatgtcactatggccaaaggcactggactcgtccacacggccccagctcacggcatggaggattatggcgttgcgagccagcacaatctgcctatggactgccttgtagacgaagacggtgtgttcaccgacgttgctggacctgaactccagaacaaggctgtgcttgaggagggcacagacgtagtgatcaaaatgttacaaacggccaagaatctacttaaggaggaaaagttggtgcactcatatccttatgactggaggactaagaagccagttgttattcgtgcaagcaagcaatggtttattaacattaccgacataaagactgcagccaaagaactgctgaaaaaggttaaattcatcccaggtagcgctctaaatggcatggtagaaatgatggatcgccgtccctattggtgcatctcccgacaacgcgtgtggggtgtgccaatcccagtgtttcaccacaaaactaaggacgaatatctgatcaattcacagaccacagaacacatcgtgaaactcgttgagcaacatggtagtgatatctggtggactttgccaccggagcagctgctccccaaggaggttttatccgaagttgggggcccagatgcactggagtacgttcctggccaggacatccttgacatttggttcgactcgggcacaagctggtcctacgtgctgccggggcctgaccagagggccgatctttacctggagggcaaagatcagctgggcgggtggtttcaaagtagcttgttgacctcagtggcggccagaaaaagggcgccatataaaacagtcattgtgcacgggttcactctcggcgagaaaggcgaaaagatgagcaagagcctcggaaatgtgatccacccagacgttgtcgtgaacggcggtcaggatcagtccaaggagcccccatacggggccgacgtcctccggtggtgggtggcagattctaacgtctttactgaggtggccatcgggcccagcgtgttgaatgccgctagagatgacattagtaaactgcggaacacactcaggtttttgctgggaaatgtcgctgactttaatcctgagactgattctattcctgttaacgatatgtatgttattgatcagtacatgctccatctgcttcaggatctggccaacaagatcacagagctctacaagcagtacgatttcggtaaggtggtgagactgctgcgaactttctatacccgggaactgagcaatttctatttctccatcatcaaggataggttgtactgcgaaaaggagaatgatccaaaaaggcgcagctgccagacggctctggtcgaaatcctggacgtgatcgtacggtcattcgccccaattctgccgcacctggctgaagaggtgttccagcacatcccttatatcaaggagcccaaaagcgtatttcgtacagggtggatttccacctcgtccatctggaagaaacctggtttagaagaagcagtagagagtgcatgcgccatgcgggactcttttctggggtcaattcccgggaagaacgccgccgagtacaaagtgatcaccgtgatcgaaccaggtctgctgtttgaaatcattgagatgctccagagcgaggaaactagtagcactagccagctgaacgagctgatgatggcatctgagtctactctactcgcccaggagccaagggaaatgaccgcggacgtgattgagctgaaggggaagttcctcatcaacctggaggggggcgatatccgtgaggaatccagctacaaagtgatagtaatgcctaccaccaaggaaaaatgccccagatgttggaaatacactgccgagtccagcgatactttgtgtcctcggtgtgccgaggtagtgagcggcaaatag

SEQ ID NO: 121248 - DNA, 2823 bp, synthetic construct
  misc_feature 1..2823: note = Description of Artificial Sequence: Synthetic coding sequence
  source 1..2823: mol_type = other DNA
atgaagctgctcggacgacaacagcccgacaccgagctggaaattcagcagaagtgcggcttttccgagttatattcatggcagagagagcgtaaggtgaaaaccgaattttgcctgcacgatggacctccctatgccaacggggacccgcatgttgggcacgctctgaataagatactcaaagatatagcaaatcgatttcacatgatgaatggatccaagatccacttcgttccaggctgggattgccacgggctgcctattgagatcaaggtcctgtctgagctgggtagggaggcccaaaacctgagcgctatggagattaggaaaaaagcccgatccttcgcaaaggctgctatcgaaaaacagaaatcagcattcatacgttggggaattatggctgactggaacaactgctattacaccttcgatggtaagtacgaggcaaaacagctgcgcaccttctatcaaatgtatgataagggactcgtgtatcgttcatacaagcctgtgttttggtcacctagttcaagaactgcacttgcagaagctgaactcgaatacaaccccgagcatgtgagtcggagcatctatgtgaagtttccactgttaaagcccagtccgaagctggcctccctgattgacggatcctctcccgtgagcatcctggtgtggaccacccagccctggacaattcctgctaatgaagccgtgtgctacatgccggagtccaagtatgcagtcgtcaagtgctcgaaaagtggtgatctgtacgttctcgccgcggacaaggtggcctcggtcgcatcaacgctggagacaaccttcgagactatctcaacactcagtggcgtagatctggagaacggaacgtgctcgcatcccctgataccagacaaagcctccccacttctcccagccaatcatgtgacaatggcaaagggcacgggtctggttcataccgccccagcccatgggatggaagactacggtgttgcttcccaacataatctgcccatggattgtctggtagacgaagacggggttttcaccgatgtcgctgggcccgaactccaaaataaagcagtgctggaggagggcaccgacgttgttataaaaatgttgcaaaccgctaagaacctgctgaaggaagagaagctggtgcacagttacccatacgactggagaacaaaaaaacctgttgtcatcagagcttccaaacaatggtttataaatattaccgacatcaaaacagcggccaaagaactcctcaaaaaggtgaaatttatcccaggctctgccctaaatggcatggtggaaatgatggaccgccgtccctactggtgcatatcccgccaacgtgtttggggcgtcccaatccccgtctttcaccacaaaactaaagatgaataccttatcaacagtcagactacagaacacatagttaagctggtggaacagcatggaagcgatatttggtggactttgcctcccgagcagctgctcccgaaggaagtattgagcgaggttgggggaccagacgctcttgagtacgtgcccggtcaagatatattggacatatggtttgactcaggtacctcttggagctacgttttaccaggacctgatcagcgggctgatctctatctggagggcaaggaccagctgggaggttggttccagagcagtcttctcactagcgtcgcagcccgaaagcgggctccttacaagaccgtgatcgtgcacggctttaccctcggggaaaagggagagaaaatgagcaagagtctcggaaatgtgatacaccctgatgtagtagtcaatggcgggcaggaccagtctaaggagcccccctacggggctgacgtactcagatggtgggttgccgattcaaacgtctttacagaggtggcaatcggccccagtgtgcttaatgcggctcgggatgatatctctaaactacggaataccctgagattcttactaggtaatgtggctgatttcaatcctgaaaccgattcaatccccgtcaatgacatgtatgttatcgaccagtacatgctacatctgttgcaagacctggctaataagataaccgaattgtataagcaatacgactttggaaaggtggttagattactgaggaccttttacactagggaactttccaacttttatttttccatcataaaagacagactgtattgtgagaaagaaaatgatccaaaacgcaggagttgtcaaacagccctggtggaaatcctggacgtgatcgtgcggagcttcgctccgattctgccgcatttggctgaagaagtgtttcagcatataccttacatcaaagagcctaagtcagtttttcgtactggctggatttccacatcttcgatctggaaaaaacctggcttagaagaagccgtcgagagcgcctgcgccatgagggattcctttctcggctcaatcccaggcaagaatgctgctgagtataaggttatcacagtcattgaaccgggtcttcttttcgaaataatcgaaatgcttcaatcagaagagacttcatccacctcccagctgaacgagctgatgatggcctctgaatccacacttcttgcccaagagccccgtgaaatgaccgccgacgtgattgaactgaagggaaagttcctcatcaatctggagggaggagacatcagagaagagtcttcatataaagtgatagtcatgcccacaaccaaggaaaagtgtccacgttgttggaaatatacagcagagtcaagcgataccttgtgcccacgttgcgctgaggttgtgagtggtaaatag

SEQ ID NO: 121249 - DNA, 855 bp, synthetic construct
  misc_feature 1..855: note = Description of Artificial Sequence: Synthetic coding sequence
  source 1..855: mol_type = other DNA
atggccggatgcgccgctcgcgcccctcctgggtctgaggcacgcttatccttggccacctttcttttgggcgcttccgtgctggccctcccccttcttacaagagcaggcttgcagggtagaacggggctcgccctgtacgtggccggtcttaacgctctcctgctgttgctctacaggcctccacgataccagatcgccataagggcgtgcttccttgggtttgtgtttgggtgcggtactctgctttccttcagccagtcatcctggtcccattttgggtggtacatgtgcagcttgagtctgttccattactccgaatatttggtcacagctgtcaataaccctaaatctttaagcctggactcattcctgttgaatcactcactcgaatataccgtcgccgcactgtcgagctggctggagtttaccctggagaacatcttttggccagagctgaaacagataacctggctctctgtgactggccttttgatggtagtcttcggggagtgcctccgtaaggccgctatgttcaccgcaggcagtaactttaatcacgtggtccagaatgagaagtcagacacccataccctggtgacttccggggtgtatgcatggtttagacaccctagctacgtaggatggttctattggagtataggtacgcaagtgatgttgtgcaacccaatctgcggcgtatcctacgccctgacagtgtggcgtttctttagggaccgaaccgaggaggaggagatatccctgattcacttttttggagaagaatacctggagtataaaaagcgtgtccccaccgggttgccttttatcaagggcgtgaaagtggatttgtag

SEQ ID NO: 121250 - DNA, 351 bp, synthetic construct
  misc_feature 1..351: note = Description of Artificial Sequence: Synthetic coding sequence
  source 1..351: mol_type = other DNA
atggccggttgtgcagcccgtgctccacccggctcagaggctcgtctgtcactcgccacattcctgcttggcgcgtctgtgctggccttacccttgctaactcgcgccggcctgcagggtagaacaggtttagctctatacgtggctggtctgaatgccctgctgttgcttctgtatcgcccacctagataccagatcgccatcagggcgtgcttcctgggctttgtctttggctgtggaacgcttctatccttttcacaatcttcctggagtcacttcgggtggagtcacctagtgcacccccactcccattgcagaatttttccctacactatgatttctgttccttag

SEQ ID NO: 121251 - DNA, 567 bp, synthetic construct
  misc_feature 1..567: note = Description of Artificial Sequence: Synthetic coding sequence
  source 1..567: mol_type = other DNA
atgtgctcactgtccctgttccattatagcgagtacttagtgacagccgtcaataatccgaaatctctgagtctggacagtttcttgctcaatcactctctggagtacaccgtggccgccctgtcttcctggctcgaatttacacttgagaacattttttggccagagctcaaacagatcacatggctatccgtcacggggttgctaatggtcgtgtttggggagtgcttacggaaggccgcaatgttcaccgctgggtcaaatttcaatcacgtcgtgcagaacgagaagtcggacacgcacaccctggtgacctccggagtatacgcttggtttcggcatccttcctatgtaggttggttttactggagcatcggcacacaggtgatgctctgcaatccaatttgtggtgtttcttatgcgcttactgtatggcgtttctttcgcgatcgtactgaggaggaagagatatctctgattcacttttttggcgaggaatacttagaatacaagaagcgggtccctacaggcttgcccttcatcaaaggagttaaggtggacctgtag

SEQ ID NO: 121252 - DNA, 1272 bp, synthetic construct
  misc_feature 1..1272: note = Description of Artificial Sequence: Synthetic coding sequence
  source 1..1272: mol_type = other DNA
atggccactgcaacgagactgctcggctggcgtgtagcctcttggaggcttaggccccccctggccggctttgtgagccagagggcccactccttgctgcctgtcgatgatgctataaatgggctcagcgaggaacagcggcagttaagacagacaatggctaaatttttgcaagagcacctggctcctaaagcccaggagatcgaccgaagcaacgagttcaaaaatttgcgggagttttggaagcaactgggcaatcttggggtgctgggcatcaccgcgcccgtgcagtacggagggtccggcctgggctacttagagcacgtgcttgttatggaggagatttcccgtgctagtggagccgtgggactgagctacggcgcccactccaacctgtgcatcaatcagctcgtacggaacgggaatgaagcacagaaagaaaagtacctgccgaaattgatatccggtgaatacattggtgctttagctatgtctgagcctaatgccgggagcgacgtagtctccatgaaactgaaagcagagaaaaaaggcaaccactacatactgaatggaaataaattttggatcaccaatggtccagacgcagacgtgctgatagtgtacgccaagaccgatctggccgcagtgccggcatcaaggggtatcacagccttcattgtggaaaaggggatgcctgggttctccacctcaaagaaactggataagctgggcatgcggggtagtaacacatgcgagttgatctttgaagactgcaaaatacccgctgctaacattctgggtcacgagaataagggggtatatgttctcatgtctgggctagatctggagaggctcgtcctcgctggtgggcctctaggtcttatgcaggccgttctggaccacacgattccatacctccacgtcagagaggccttcggccagaaaatcggccatttccaattgatgcagggcaaaatggctgacatgtacactcgcctgatggcatgccgccagtacgtgtacaatgtggctaaagcgtgcgatgaggggcactgtacagccaaggattgcgccggtgtaatcctttattctgctgagtgcgccacacaggtggctctggatggcattcaatgctttggcggaaacggttatattaatgattttcctatgggccgattcctgagggacgctaagctgtatgaaataggcgcagggaccagcgaagtccggcggctcgtcattggccgcgcattcaacgccgacttccactag

SEQ ID NO: 121253 - DNA, 1191 bp, synthetic construct
  misc_feature 1..1191: note = Description of Artificial Sequence: Synthetic coding sequence
  source 1..1191: mol_type = other DNA
atggccgaaatggctacagctactagactattgggatggagagtggcatcatggcgacttcgcccccctctagccggatttgtctctcaacgggctcatagtctgctcccagtggatgacgcaataaatggactgagcgaagagcagagacaggaattctggaagcagctggggaacttgggggttctgggtataaccgcccctgtgcagtacggcgggtctggtttgggctacctggaacacgtgcttgtgatggaggaaattagccgtgcttctggcgccgtgggccttagctacggagcacattccaatttatgcatcaaccagctggtgcggaacggtaacgaagcccaaaaagagaagtacttgcctaagctgatcagcggcgaatatataggcgcattggcaatgtcagagccgaacgctggcagtgacgtggtatctatgaagcttaaagcggaaaagaagggaaaccattacatcttgaacggcaacaaattttggattactaatgggcctgacgccgacgtcttgatcgtgtacgctaagacagatctggccgcagtccctgcttcgcgggggatcaccgccttcatcgtggaaaagggaatgcccggattctcaacttccaagaagctggacaaattggggatgaggggaagcaacacatgtgagctgatttttgaagattgcaaaatacctgcggctaatattctgggtcacgaaaataaaggggtttatgttctgatgagcgggctcgacctcgagcggcttgtactggctggtggacctctgggtctcatgcaggcggtgctggaccataccataccatatttgcacgtgagggaagcattcggacaaaagatcgggcacttccaattgatgcagggcaaaatggcagacatgtacacccggctgatggcctgccgtcaatatgtgtacaacgtggcgaaggcctgcgacgagggccactgcactgctaaggactgtgccggcgtcatcctgtacagcgcggagtgcgcaacacaagtggcgcttgacggaattcaatgtttcggagggaatggctacattaacgacttccccatgggacgcttcttgcgcgatgccaagctttacgaaattggagcaggcacaagtgaggtgcgcagactcgtaataggacgcgccttcaatgcagactttcactag

SEQ ID NO: 121254 - DNA, 1281 bp, synthetic construct
  misc_feature 1..1281: note = Description of Artificial Sequence: Synthetic coding sequence
  source 1..1281: mol_type = other DNA
atggctgagatggcaactgccacccgcttgttaggttggagagttgcatcatggcggctgcggcccccacttgctgggttcgttagccagagggctcatagcttactaccagtggacgacgctatcaatggcctgtcagaggaacagaggcagcttcgccaaaccatggctaagtttttgcaggaacatctcgctccaaaggcccaggaaatcgatcgttcaaatgaatttaagaatctgcgagagttctggaaacaactgggtaatctgggagttctgggcatcacagccccggttcaatacggcgggtcgggtctcggatacctggaacacgttttagtgatggaggaaatatctcgcgcaagcggagccgttggcctatcttacggggcccacagcaacctgtgtatcaatcaactagtgagaaacggtaacgaggctcagaaagagaagtacttacctaaattaatctccggcgagtatatcggggccctggcaatgagcgagccaaatgccggctctgacgtcgtgtcaatgaagctgaaagcggagaagaaagggaaccactatattctcaatggaaataaattttggataaccaacggtcccgatgcagacgtcctgatagtttatgccaagaccgatcttgcagccgtgccggccagcagaggtattaccgcattcattgtcgagaagggcatgccgggtttttccacttccaaaaagctggacaaactgggaatgagaggcagtaacacatgtgagctgatcttcgaggattgcaagattccggctgctaacatcctgggccacgaaaacaaaggagtctatgtgctcatgagcggcctcgacctggaaaggctggtgctcgcaggaggacccctgggactcatgcaagccgtccttgaccataccatcccttatttgcacgtaagagaagcttttggtcagaagattggacacttccagctcatgcagggaaagatggccgacatgtatactaggctaatggcctgtcgacaatatgtctataatgtagctaaggcgtgcgatgagggacattgcacagctaaagactgcgcaggggtaattctgtacagcgcggaatgcgccacccaggtggctcttgacggaattcagtgttttgggggcaacgggtacatcaatgacttccccatgggcaggttcctgagagatgccaaactctacgaaattggagccggcacatctgaggtcagaaggttggtgataggccgcgctttcaacgctgatttccattag

SEQ ID NO: 121255 - DNA, 1716 bp, synthetic construct
  misc_feature 1..1716: note = Description of Artificial Sequence: Synthetic coding sequence
  source 1..1716: mol_type = other DNA
atgcgcgctcttcgggaccgcgcaggactgttgctgtgcgtcctgctgttagccgctctgctggaagcggcgctgggccttcccgttaaaaagccacggctgcgcggtccacgcccaggctccctcacccgtctcgctgaagtgagcgccagtccagacccaagacctctaaaggaggaggaggaggccccactccttccaagaacccatttgcaggcagaaccacatcagcatgggtgttggacggttacagaacccgcagctatgacgcccggcaacgctacccctccccggacaccagaagtgaccccactcaggctggagctccagaagttgcctgggctggctaacacaaccctttcaaccccgaatccagacacccaggctagcgcttcgcccgatcctagaccactgcgggaggaagaggaggccaggttgctcccgcgcactcacctccaggccgagttacatcagcacggatgctggacagtcaccgagcctgccgcactcacacccggcaatgcaacccccccccgcacgcaggaggtcacccctctcctattagagctacaaaagttaccagaacttgtccatgctacattatcaactcccaacccggacaatcaagttactatcaaagttgtggaggatccccaggcagaggtgtccattgacctcttggcagaacccagtaaccctcccccacaggataccctgagttggctgccagcactgtggtccttcttgtggggcgactataagggtgaagagaaagatagagctccaggagagaagggcgaagaaaaagaggaggatgaggactacccttctgaagacatcgagggagaggatcaggaagacaaagaagaagacgaagaggaacaggctctctggttcaatggtactacagacaactgggaccaagggtggctggcccctggagattgggtatttaaagactcagttagctatgattacgaaccacagaaggaatggagcccttggtcaccttgttctggtaattgctccacaggtaagcagcagcggactcgcccatgcgggtacggctgtactgcgacagaaactcggacatgtgatttgccctcctgtcccggtaccgaagataaggatactctgggactaccaagtgaggaatggaaactgttggctagaaacgctaccgacatgcacgatcaagatgtggacagctgtgaaaaatggcttaactgtaagagcgatttcttaatcaagtacctctcacagatgctacgcgacttgccctcttgtccgtgcgcctatcctctggaagccatggactcacccgtgagcctgcaggatgaacaccaagggcggtcattccgctggagagatgcctcaggacctagagaacgcttagacatctaccagccaacggctcgcttctgcttgcggagcatgttatcaggggagtcttcaaccctcgcagcccagcattgttgttatgatgaggatagtcgtctattgacgagaggaaaaggcgccggtatgcccaatctaatcagtaccgattttagccctaagctgcattttaagttcgacacgacaccttggatcttatgcaagggcgattggtcaaggctgcatgccgttcttcctccgaacaatggtcgtgcttgtactgataatccactggaagaggaatatttggctcagctgcaggaggccaaagagtactag

SEQ ID NO: 121256 - DNA, 1452 bp, synthetic construct
  misc_feature 1..1452: note = Description of Artificial Sequence: Synthetic coding sequence
  source 1..1452: mol_type = other DNA
atgacgcctgggaacgccacacctcccaggactcccgaagtcacacctcttcgactggaactccagaaactgccaggtctggccaatacaactctttccacacctaacccggatacacaggcaagcgcatcaccggatccccgaccactgagggaggaagaggaggcccggctgctcccgaggactcatctccaggccgagctccaccagcacggctgctggaccgtgacagaacccgccgcgctgacacccggcaatgccacccctccacgcacacaagaggtgaccccattacttttagaactccaaaaactcccggaactggtgcacgcaaccctttctacacccaatcccgacaaccaagtgacaatcaaggtggtggaggacccgcaggctgaggtctcaatagatcttctggcagaaccctctaacccacccccccaggatactctgtcttggctacccgccctgtggtcctttctgtggggcgactataaaggcgaagaaaaggatcgcgcacccggcgaaaagggcgaggaaaaagaggaagacgaggactatcctagcgaggacatcgagggggaggatcaggaggataaagaagaggacgaggaggagcaggcactctggttcaacggaactacagataactgggaccagggctggcttgccccaggagattgggtgttcaaagattctgtgtcatacgattatgagcctcagaaggagtggtccccatggtccccatgttccggcaactgctctactggaaaacaacagaggaccagaccttgtggctacgggtgtactgccaccgaaacgcgaacgtgcgacctccctagttgccccggcaccgaggataaggatactttaggtctgccttctgaagagtggaaactgctcgcccgaaatgccaccgatatgcacgaccaggatgttgacagttgtgaaaagtggctgaactgcaagtcagacttcttgataaagtatctcagtcaaatgctaagagatctccccagctgcccttgtgcatatcctctcgaggccatggactctcccgtgagtttgcaagacgagcaccaaggcaggtctttcagatggagggatgcttctgggccccgcgagaggctagatatttaccagcccactgcacgcttctgtctcagaagcatgcttagcggtgaatcatccacgctggctgctcagcattgttgttacgatgaggactcacgtcttttgacgagggggaagggcgctggaatgcccaatttaatctccacagatttctccccaaagctccacttcaagtttgacacaactccttggatattgtgcaagggggactggagccgcctccatgccgtactgcctcctaataacggccgtgcatgtactgacaatccgctagaggaggagtaccttgcccagctgcaggaagccaaggagtattag

SEQ ID NO: 121257 - DNA, 1473 bp, synthetic construct
  misc_feature 1..1473: note = Description of Artificial Sequence: Synthetic coding sequence
  source 1..1473: mol_type = other DNA
atgcgcgccctgcgcgatcgagctggactgttgttgtgcgtgctgttgttggctgctctgcttgaggccgcccttggattacctgtgaagaaaccccgcctcagaggaccaagacccggctcactgactaggcttgcagaagtcagcgccagtccggatccccgtccattgaaggaagaagaagaagcccccctgttacctcggacgcatctgcaggccgagccacaccagcatggatgctggacggtaaccgagccggcagctatgacgcctggcaatgcgacccctcctagaactcctgaggtcacccccctcaggctggagctccaaaagctgccagggctggccaatactacactgagtaccccgaatccggatacgcaggtcactataaaggtggtagaggacccgcaggctgaggtatctatcgatctgctggcagagccctctaacccaccaccccaagataccctgtcctggctgcccgctctatggagctttttatggggtgactataaaggggaggagaaggatagagcccccggggagaaaggcgaggagaaagaggaggatgaggactacccatctgaagatatcgagggcgaagatcaagaagacaaagaagaggacgaggaagaacaggccctgtggtttaatggcaccacagacaattgggatcagggatggttggcccctggggattgggttttcaaggattctgtgtcttacgactatgagcctcaaaaggagtggtccccttggtctccatgcagcggtaactgtagtacaggcaagcagcagagaactagaccctgcggttacggctgcaccgccactgagactcgaacctgtgatctaccatcatgtcccggcaccgaagacaaagatacactgggtctacccagtgaggaatggaagctactggcccgaaatgctactgacatgcatgaccaggatgttgacagctgcgaaaagtggttgaattgtaaatctgacttccttatcaagtatctatctcagatgctgcgagatctgccttcatgcccatgcgcttaccccttggaggccatggactcccccgtcagtctccaagacgaacaccagggccggagcttcaggtggagggacgcctcaggccccagagagcggctagacatctaccagccaacagcccgcttttgcctccgaagcatgctgagtggcgagtcctcaactctggctgctcagcattgctgctatgacgaagattccagactccttacgcggggcaagggcgccgggatgccaaatcttatttcgactgacttctccccaaagcttcatttcaaatttgacactactccatggatcctttgcaagggcgattggagccgactgcacgcggttctccctcctaacaatggcagagcctgcacagataatccactggaggaggagtacctagctcagttgcaggaggcaaaggagtactag

SEQ ID NO: 121258 - DNA, 1473 bp, synthetic construct
  misc_feature 1..1473: note = Description of Artificial Sequence: Synthetic coding sequence
  source 1..1473: mol_type = other DNA
atgcgagcgctcagagaccgcgccggactcctcctgtgcgtcctgctgctggccgcgctgcttgaagcagctcttggcctacccgtgaagaaacctagattaagaggtcctcgaccaggaagcctcaccaggcttgctgaggcatctgcttccccagatcccagaccattgcgcgaggaggaggaggccagactgcttccacggacgcaccttcaggctgaattacaccagcacgggtgttggacggttaccgaacccgccgccctgactcccggcaacgctacgccaccgcggacgcaggaagtgactcccctgctacttgagctccagaaacttccagagttggttcacgcgacgctgtccactcccaacccagacaatcaggtcacaattaaagttgtcgaggaccctcaggccgaagtatcaattgatctcctggccgaaccctctaacccaccaccgcaggacactttgagctggcttccagctctgtggtcattcctctggggcgactataagggtgaggaaaaagatagggcaccaggcgaaaaaggcgaggagaaggaagaggatgaggactaccctagcgaggatattgaaggcgaggatcaggaggataaagaggaggacgaggaggagcaagcactgtggttcaacggaacgactgacaattgggatcaaggctggcttgctcccggagactgggtgttcaaggattcagtatcatacgactatgagccccagaaggaatggtcaccctggtcaccatgtagcggaaattgcagtacaggcaagcagcagagaacacggccttgcggttacggatgcacagccacagagactaggacgtgcgatctgccttcatgtcctggtaccgaggataaggatactctcggcctgccttccgaggaatggaaactcctggccagaaacgcgactgacatgcatgatcaggatgtcgatagctgtgagaagtggctcaactgtaaaagcgacttcctcatcaagtatctctcccaaatgctccgggatctgcccagttgcccatgtgcatatcccctcgaagctatggacagccccgtttctttgcaggacgagcatcaggggcgcagttttcgctggcgggatgccagcgggccacgggagcgtctagacatctatcagccaaccgctcgattctgccttcgctctatgttgtcgggggaatccagcacactggctgcacagcattgctgttacgacgaggactcccgactgcttacaagaggcaagggagccggcatgccaaacttgatttcaacagatttcagccctaaattgcatttcaagttcgacacaacgccatggatattgtgcaagggagactggagtcggctgcacgcagtgctgccacctaacaacggtagagcatgcactgataatccactggaagaagagtatctagcgcagctccaggaagccaaggagtactag

SEQ ID NO: 121259 - DNA, 879 bp, synthetic construct
  misc_feature 1..879: note = Description of Artificial Sequence: Synthetic coding sequence
  source 1..879: mol_type = other DNA
atgcgagccctgagggaccgagccggcctgctcctttgtgtcctactgctggccgccttgctagaagcggctctagggctgcctgttaaaaaaccccgactgcgtggtccacggcctggctcactaacacggctggctgaagtgtctgcatccccagaccctagaccgttgaaagaggaagaagaggcaccactgctgcctagaactcacctccaggccgagcctcaccagcacggttgttggactgttactgagcccgcagccatgacacccggtaacgccacccccccacggactcccgaggtcacacccctgcgactggagctgcaaaaattacctgggttagccaatactaccctgtctactcctaaccctgatactcaggctagcgcgtccccagatccgaggccactccgcgaagaggaggaggcgcggctgcttcctcgaacccatctacaggctgaactgcaccaacatggctgttggacagtgacagagcctgccgcccttacaccggggaatgcaacaccccccagaacccaggaggtcactcccctgctcctcgagcttcaaaaattacctgaactggtacacgccaccctgtcaacaccaaacccagataaccaaactatgtccttgcgccggagcggagtgcctggcctccctgccgtgggaacggctgcgctcgcaagctcgagaggcctgggacccgtggccatggcagcgctgccacccaggccggtcccagtcacgtgtcctcccgtacttgctttgcgtacccgaactccctgggcctcacctgtcagatccggatcaagttggcccgccatgctgcgcacctgtatgatcaaaatgtggactgccgtgcgctctgggtag

SEQ ID NO: 121260 - DNA, 924 bp, synthetic construct
  misc_feature 1..924: note = Description of Artificial Sequence: Synthetic coding sequence
  source 1..924: mol_type = other DNA
atggcaaggaatgccgaaaaggccatgacagcactcgccagattccgacaggcacagctggaggagggcaaagtgaaggaacggaggccgttcctggccagtgaatgcaccgagctccccaaggccgaaaaatggcggcggcaaatcattggcgagatcagtaagaaggtggcgcaaattcagaacgcaggattaggcgaattccggattcgtgatttaaatgacgaaatcaacaagctcctacgcgagaaaggacattgggaagttagaatcaaagagttgggtggacctgactatggtaaagtggggcccaagatgctggatcatgaaggaaaggaagtcccaggcaatcgaggatacaaatattttggagctgccaaggacttgcccggagtgcgcgagctgtttgagaaagagaggcaggtgaggtggctgatgcctgtgatcccagctctgtgggaagctgaggcaggcggtagccaggctctgccgccccccagaaagacacgcgctgaattgatgaaggcgattgatttcgagtactacggttacctggacgaggatgacggagttatcgtgccactagagcaggagtacgaaaagaaactgcgcgccgagttagtggagaagtggaaggcagaaagagaagcaaggctcgcgcggggcgaaaaggaagaagaggaggaggaagaggaagaaattaatatctatgccgtgactgaagaggagtcagacgaggaaggcagccaggagaaggggggtgatgatagccagcaaaaattcattgcccatgtaccagtgccaagccaacaggagattgaagaggcactggttaggcgaaaaaaaatggagttactccagaagtacgccagcgaaacactgcaagctcagtcagaggaggcgagaagactcctgggctactag

SEQ ID NO: 121261 - DNA, 858 bp, synthetic construct
  misc_feature 1..858: note = Description of Artificial Sequence: Synthetic coding sequence
  source 1..858: mol_type = other DNA
atggcccgaaacgccgagaaggccatgactgcactcgcacgcttccgtcaagcccagttggaggaggggaaggtgaaggagaggcgtcccttccttgcttccgagtgcacagagctgcctaaagccgagaagtggcgcagacagatcatcggggagattagtaaaaaagtggctcagatccagaatgccgggctgggcgagttccggatccgagatcttaacgacgaaatcaataagctgctgagagagaaggggcactgggaggtgcgaattaaggagctggggggccccgattatggcaaggtaggccctaagatgctagatcacgagggaaaagaggtaccagggaataggggatacaaatatttcggcgctgcaaaagacctgccaggggtgagggagctcttcgaaaaggagcccctgccgccgccacggaagacccgcgcagagctcatgaaggcgatcgactttgagtattacggctatctggacgaggacgatggcgttattgtgccgctcgagcaggaatatgaaaagaaactccgggccgagctggtggagaaatggaaagccgagagggaagcgcggctggcccgtggcgaaaaagaagaggaggaagaagaggaagaggagatcaatatctatgccgtgaccgaggaagaatccgatgaggagggatctcaggaaaaggggggcgatgatagccagcagaaatttattgcccacgttccagtgccaagccagcaggagattgaggaagccctcgtgagacgcaagaagatggagctgctccagaaatacgcatctgaaacactacaagcacagagcgaggaagccaggaggctgcttgggtattag

SEQ ID NO: 121262 - DNA, 2712 bp, synthetic construct
  misc_feature 1..2712: note = Description of Artificial Sequence: Synthetic coding sequence
  source 1..2712: mol_type = other DNA
atgtcagatagcggatctcagcttggttcaatggggtcgctaacgatgaagtcccagctccagataacggtgatctctgcaaaactcaaggagaataagaagaattggttcggtccctccccctacgtggaggtgaccgttgacggtcagagcaaaaagacggagaagtgtaataacacgaacagcccgaagtggaagcaacctttgacagtgattgtcaccccagtctctaagttgcactttagagtttggtcgcatcagacgttgaagtccgacgttctgctgggcactgcagcgctggacatttatgaaacattgaagtcaaataatatgaagcttgaggaagtggtggttacactgcagctgggaggggacaaggagccgaccgaaacaatcggcgacctttcaatttgcctcgacggtttacagcttgagtcggaagttgtgactaacggggaaactacatgttccgaaaacggtgttagcctgtgtctgcccagattggaatgcaattccgccatttctgcccactgcaatctctgcctccctggcctttctgacagtcccatcagtgccagcagagtggctgggtttacaggagcctcacagaatgatgacggctctaggagcaaggatgagacaagagtgagcactaacggcagcgacgaccccgaggatgccggcgccggtgaaaaccgcagagtcagtggcaacaactcccctagcctgagcaatggggggttcaagccctcccgaccaccgagaccctcccgcccgccccccccgacaccaaggcgcccggcatccgtgaacgggtcaccgtccgccacctcagagagcgacgggtctagtacaggctccttaccgcctacaaatactaacacaaacacatcggagggcgctacaagcggtctcatcatcccactgacgatctctggagggtcaggcccacgccccctgaaccctgttacgcaagcgccactgccccccggatgggagcaacgggtggaccaacacggcagggtgtactatgtggatcacgttgaaaaacggacaacatgggaccggccagaaccccttcccccggggtgggaacggagagttgacaatatgggccggatttactacgttgatcactttacacgcacaaccacgtggcaaagaccgaccctagagtctgtcaggaattatgagcagtggcaacttcagcggagccagctgcagggtgccatgcagcagttcaatcaacggttcatctacggaaaccaggacttattcgccactagtcagtcaaaggagttcgatccgctgggtccattgcctccaggctgggagaagcggaccgactccaatggcagagtgtacttcgtgaaccacaacaccaggatcacccagtgggaagatccacgaagccaaggacagcttaacgagaagccactgccggaggggtgggaaatgcggtttactgtggatggaattccttatttcgtggatcataatcgaagaacaacaacatacattgaccctcgcaccgggaaatccgctctggataacggcccgcagatcgcctatgtcagggacttcaaggctaaggtacagtattttcggttctggtgccagcaactagcgatgccccagcacatcaagattaccgtgactcgcaagaccttgttcgaggactccttccaacagattatgtcttttagtccgcaggacctgcggagaagactctgggtgatcttcccgggtgaagagggcttagattacgggggggttgcccgagagtggttcttcctgctgagccatgaggtgctgaatcccatgtactgtctttttgagtacgcgggaaaagacaactactgccttcagatcaatccggcttcttatattaaccctgaccacctgaagtacttccgctttattggaaggttcatcgcgatggccctgttccacggcaaattcatcgacactggcttcagcctgccattctacaagagaatccttaataagcctgtcggtcttaaggacctggagagcatcgatcccgaattctataactccctcatatgggttaaggagaacaatatcgaggaatgtgatctggagatgtatttctcagtggataaggagatactcggggaaatcaagtctcacgatcttaagcctaatgggggcaacatcctagtcacagaagaaaacaaggaagagtacatccggatggtggctgaatggcgtttaagcaggggggtcgaggagcaaactcaagcattctttgaaggcttcaatgagatattgcctcagcagtacttgcagtacttcgatgccaaagagctggaggttctgctctgtggcatgcaagagatcgatctgaatgactggcagcgccacgcaatctatcggcactacgcacggacaagtaagcaaatcatgtggttttggcagttcgttaaggagattgataatgagaagcggatgcgcctactacagttcgtcacaggaacctgccgactgccagtcggcggttttgctgaccttatgggaagcaacggccctcaaaagttttgcattgagaaggttggcaaagagaattggctgcccagaagccacacctgctttaacaggctggatctgcccccctacaagagctatgaacagctcaaggagaagctgttatttgcaattgaggagactgagggattcggccaggagtag

SEQ ID NO: 121263 - DNA, 2589 bp, synthetic construct
  misc_feature 1..2589: note = Description of Artificial Sequence: Synthetic coding sequence
  source 1..2589: mol_type = other DNA
atgagcgatagtggatctcagctgggatccatgggatcactaacgatgaagagccagttgcaaattacagtgatatcagccaagttaaaggagaataagaagaactggttcggcccctctccctatgtcgaagtgacggtggacgggcagagcaagaagacagaaaagtgtaataacaccaactcacctaagtggaaacagccactgactgtcattgtcactcccgtgtcaaagctgcattttcgcgtttggagtcaccagaccttgaaatccgatgtgttactcggaactgccgccctagatatttacgagacacttaagtccaataacatgaaactggaagaggtcgtcgtgaccctacagctggggggcgacaaggaacccaccgagactatcggggacctcagcatctgtctggatggcttgcagctggaaagcgaagtggtgacgaatggcgagacaacctgttccgaatcggcttcacagaatgacgatggttccaggtccaaagacgaaacccgggtctcaaccaatgggtccgacgaccccgaagacgccggagcaggggagaacaggagagtttcaggtaacaactctcctagcctgtctaatggaggtttcaagccatcccgtccaccacgcccaagccggcctccccccccaacccctagacggccagcctccgtgaacggctccccctccgcgacctctgaatccgatggttcttcaacaggttcccttccccccacgaacacaaacaccaataccagcgagggcgccaccagcggacttataatcccgctaactatttcagggggtagtgggccaagaccactgaacccggttacccaggcaccccttccccctgggtgggagcagagggttgaccagcatggccgagtctattatgttgaccacgtggagaaacggaccacgtgggatagacccgagcctcttccacctggctgggagagacgagttgacaatatggggcgaatttattatgtcgaccactttaccagaacaactacttggcagcgtccgactctcgagtccgtacgcaactacgagcagtggcagttgcagcggtctcagctccagggtgcaatgcaacagtttaaccaacgattcatctacggcaatcaggacttgttcgcaacttcccagagtaaggaattcgaccctctggggcctctccctcctgggtgggaaaaacgcacggactctaacgggcgggtgtacttcgtcaatcacaatactagaattactcagtgggaggaccctaggagccaaggccagttaaacgaaaagcccctacctgaaggctgggagatgagattcactgtggatggcatcccatacttcgtggaccacaaccgtaggacaaccacctatattgacccgaggaccggcaagagcgccctggataacggccctcaaattgcttatgttcgagacttcaaggcaaaagtccaatacttccgattctggtgccagcagctggccatgccccaacatatcaaaataacagtcacgaggaaaacgttgttcgaagatagctttcaacagatcatgagtttttcaccccaggatctgcgccggcggctgtgggtgattttccctggagaggaaggattggactacggaggtgttgcccgggagtggttcttcttgctatctcacgaggttctcaaccccatgtattgtctgtttgagtacgccggaaaagacaactattgtctgcaaatcaatcccgcatcttatatcaacccagaccacttgaagtacttcagatttatcgggcggttcatcgcaatggccctgttccacggaaagtttatagacacgggtttctcactccctttctacaagcgcatcctcaataagccagtcggactgaaggacttagaatccatcgacccagagttctacaattctctcatctgggtgaaagaaaacaacattgaagagtgtgatttggagatgtattttagcgtggacaaggaaatccttggagaaataaagtcccacgacctgaagcctaacggagggaacatcttggttaccgaagaaaacaaagaagagtacatccggatggttgctgagtggaggttgagcagaggcgtagaagagcagacacaggctttttttgaagggttcaacgaaattctgcctcagcagtatctgcagtatttcgacgcaaaggagcttgaagtgcttctttgtggcatgcaggagatcgatctgaatgattggcagcgccacgccatctaccggcattatgcccgtacaagcaagcagattatgtggttttggcagttcgtgaaggagatagacaatgaaaaaagaatgaggctgttgcagttcgtgaccggaacatgtcgcttgcccgtgggtggatttgctgaccttatgggcagcaatggaccacagaaattttgtatcgaaaaggtgggtaaagaaaattggctgccccggtctcatacctgttttaacaggttggacctgccaccttataagtcctacgaacagctaaaagaaaagcttctctttgccattgaggagacagagggattcggtcaggaatag

SEQ ID NO: 121264 - DNA, 2259 bp, synthetic construct
  misc_feature 1..2259: note = Description of Artificial Sequence: Synthetic coding sequence
  source 1..2259: mol_type = other DNA
atgaagttggaagaggtagtggttacacttcagctgggcggcgacaaagagccgacggaaacaattggggatctgtcaatttgtctcgatggcctgcagttggagagcgaggtggtcactaatggtgagaccacctgctccgaatcagcttctcaaaacgatgatggaagtaggagtaaggatgaaaccagagtgtccaccaacggaagtgacgaccctgaagacgccggggctggagaaaataggagagtgtccggcaacaattctccttctctgtctaacggcggcttcaagccttctcgcccacctcgcccatcccggcccccgcctccaacaccccggcgtccagcatctgtaaatggatccccgagcgctacctccgagtcagacggttcctctaccggatctctgcctcctactaataccaatacgaatacatccgaaggcgcaacatccggtcttattattccccttacaatctccggcgggagcgggccccggccattgaatcctgttacgcaagctcccctgcctccaggatgggaacagagagtagaccagcacgggcgggtctattatgtagaccatgtggagaagcggacaacatgggatcggccggagccgttgcccccaggatgggaacggagggtggataatatgggcaggatctactatgtcgatcatttcactcggacaaccacttggcaaaggcccactctggaaagcgtcaggaactacgagcaatggcagctgcaacgatcccaactgcagggcgcaatgcagcagttcaaccaacgctttatttacggcaaccaggatttgtttgccacatctcaatccaaagaattcgaccctttgggtccgctgcccccagggtgggagaaaaggacggatagcaatgggagagtatattttgtgaatcataatacccgtataacccagtgggaagacccacgcagccaaggacaactgaatgagaagccgttgcccgagggttgggagatgcgttttacagttgatgggatcccttattttgtggatcacaacagaagaacaaccacatacatagacccaaggaccggaaaaagtgcgctggacaacggtccacagatagcttatgtgagagattttaaggcaaaagtccagtactttcgcttctggtgccagcagttagccatgcctcagcacattaagatcaccgtcacacgcaaaacgcttttcgaggactctttccaacagatcatgagcttttccccgcaggacctgcggagaagactgtgggtgatcttccccggcgaggagggtctggattacggaggcgtggcgcgggaatggttctttttgctaagtcacgaggtgctgaaccccatgtattgtttgtttgaatacgctggcaaggataactactgtttacagatcaatccagcatcttacataaaccccgaccacttgaagtatttccgcttcatcggtcgcttcatcgccatggccctgtttcacggaaagtttatcgacacagggtttagcctgccgttttacaaacggatcctgaacaagcctgttggactgaaagatctggagtctattgatcccgaattctacaactctctcatttgggttaaggaaaacaacattgaagaatgtgacctagaaatgtacttctcagtcgacaaggaaatcctgggagaaattaagagccacgaccttaagcccaacggcggtaacattttggtgacagaggagaacaaggaggaatatattcgaatggtcgccgagtggcggctgtcgagaggggtggaagaacagacacaggcgttttttgagggatttaacgaaattctcccacagcagtacctgcagtacttcgatgccaaggaactggaagtcttactgtgtgggatgcaagaaatcgacctaaacgattggcagcggcacgcaatctatagacactacgccaggacgtccaagcagattatgtggttctggcaattcgtaaaagagatagataatgaaaaacgcatgcgcttgctgcagtttgtaacagggacctgccgactgcccgtaggcggtttcgccgacctaatgggttccaatggccctcaaaaattttgtattgagaaagtgggaaaagaaaactggctgcctcgttctcatacttgctttaacagactggaccttccaccttacaaatcttatgagcagctgaaagagaaactgctctttgctattgaagagacagagggctttggccaggaatag

SEQ ID NO: 121265 - DNA, 3717 bp, synthetic construct
  misc_feature 1..3717: note = Description of Artificial Sequence: Synthetic coding sequence
  source 1..3717: mol_type = other DNA
atgcgggctcagggacgtggcagactgccgaggagactgctgttactgctcgccttatgggtgcaagctgctcgaccaatgggatactttgaactccagttgtctgctctccgcaacgtgaatggtgagctgctttccggcgcatgttgtgatggcgacggccggaccacgcgtgccggaggatgcgggcacgatgaatgtgatacatacgttagggtttgtctgaaggagtaccaggcaaaggtcacacctactggcccctgttcatacggtcatggggccactcctgttctgggtggaaactccttttatcttccccccgcaggggctgccggggatcgcgcacgggcccgggcgagggctggtggggaccaagatccaggtttagtggtaatccctttccagtttgcgtggccacgctccttcaccctgatcgtggaggcctgggactgggataacgataccactcctaatgaggagcttctcatagagcgggtcagccacgctggaatgataaatccggaagaccggtggaaatctctccacttcagtggacacgttgcccatctggaactgcagattcgagtccgctgcgacgagaattactattctgccacatgcaacaaattctgccggccaagaaatgacttctttggccactacacttgcgatcaatatggaaacaaagcctgcatggatggctggatggggaaggagtgtaaagaagccgtctgtaagcaggggtgcaacttacttcatggcggttgtacagttcccggcgaatgtaggtgctcctacggctggcagggcagattttgcgacgagtgcgtgccatacccagggtgcgtacacggtagctgcgtggaaccatggcagtgcaactgcgagacaaattggggagggttgctttgcgataaagacctcaactactgtgggagccaccacccctgcacaaacggaggaacctgcataaacgcggagccggaccagtaccgatgcacctgccctgatggctattcagggcggaactgcgagaaggctgaacacgcatgtacgtctaatccttgtgccaacggtggctcatgtcacgaggtcccatccggcttcgagtgtcactgtcccagtggatggtctgggcccacatgtgccctggacatcgatgaatgcgcctctaacccctgtgccgccggagggacatgtgttgatcaagtcgatggctttgagtgtatttgcccagagcagtgggtgggagcaacctgccagctggacgcgaacgaatgtgagggcaaaccctgtttgaacgcatttagttgcaagaatctcatcggaggttattattgtgactgcatccctggttggaaagggattaattgtcatataaatgtgaacgattgcaggggtcagtgccagcacgggggcacctgcaaggacctggtgaacgggtaccaatgtgtgtgcccacggggtttcggagggagacattgcgaactggaaagggatgaatgcgcttctagcccctgtcacagcggaggcttgtgtgaagaccttgccgacggctttcactgtcactgccctcaggggttttcagggcccctgtgcgaggtggatgtggatctctgcgagccaagcccttgtcgcaatggagcccgttgttacaatttagagggcgactattattgtgcttgccctgatgattttgggggaaaaaattgtagtgtgcctagagagccatgccccgggggcgcatgtcgcgtgatcgacgggtgcgggtctgatgctgggcctgggatgccaggaacagctgcctccggtgtgtgtggaccccatgggcgctgcgtctcgcaaccaggaggcaattttagctgcatctgcgatagtggttttactggcacatattgtcacgagaatatcgacgattgcctggggcagccctgtcgaaacgggggcacatgcatcgacgaggtcgatgcattcagatgcttctgtccgagcggatgggagggagaactctgcgataccaacccaaatgattgcctgcccgacccgtgccatagtagaggcagatgttacgatcttgtgaatgatttttactgtgcctgcgacgacggctggaaagggaaaacatgtcactctcgcgagtttcagtgtgacgcctatacctgttctaatggcggaacctgctatgatagcggtgacacgttccggtgtgcttgtcctcccggatggaagggctccacctgcgcagtcgccaagaactcatcttgtctgccaaacccctgtgtgaatgggggcacctgcgttggcagcggagctagcttttcctgcatttgccgtgatggctgggaaggacgcacatgtacccataacactaacgactgcaatcctctgccttgctacaacggggggatttgcgtagacggagttaattggtttcgctgcgagtgtgccccaggctttgccggcccagattgccgcatcaatatcgatgaatgccagtcatcaccttgtgcctatggggctacctgcgttgacgagattaacgggtatcgatgtagttgtccccccggaagggcagggcccaggtgccaagaggtgatcggctttggaagaagctgttggtcccgggggaccccttttccacatggttcttcatgggtggaagattgcaattcttgtaggtgcctagatgggcgcagagactgctctaaagtgtggtgtggatggaagccctgcctgctcgcaggtcagccagaggcactcagtgcgcagtgtcccctagggcagcgttgtctggagaaggcgcctggacagtgcctgagacccccatgtgaagcttggggcgaatgtggtgctgaagaaccacccagcacgccatgcctaccacgttccgggcacctagataacaattgtgcccgattgacgctacacttcaaccgggaccacgtcccccaggggacaaccgtaggggccatctgcagcggcattagatctcttccagcaacaagagccgtcgcacgggacagactcctggtgctgctgtgcgaccgcgcctcgtccggtgcttctgcagtggaagttgccgtgagcttcagccccgccagggatctgcctgatagctccctgattcagggtgctgcccatgctatcgtagcagccattactcagagaggcaactcatcgctcttgctggccgtgactgaggtgaaagttgaaacggtggtgaccggagggtcatccaccggtctcctggtcccggtactgtgcggcgctttttccgtgttatggttagcatgtgtcgtgctgtgtgtttggtggacccgtaaacgcaggaaggagagagagagaagtcggcttccgagagaagagtcagccaacaaccagtgggcgcccctgaatcctatccggaacccgatagagcggcccggtggccacaaggatgttttgtatcagtgtaagaatttcactcccccaccccggagagccgatgaagcccttcctggtccagccggtcacgccgccgtgagggaggatgaagaagatgaagatcttggccggggcgaggaagatagtctggaggcggagaagttcctgtcccacaaattcactaaggacccaggccgcagtcctgggcgccctgcacattgggctagcggcccaaaggtcgataaccgggcggttaggtctataaacgaggcacggtacgccgggaaggagtag

SEQ ID NO: 121266 - DNA, 3603 bp, synthetic construct
  misc_feature 1..3603: note = Description of Artificial Sequence: Synthetic coding sequence
  source 1..3603: mol_type = other DNA
atgcgggcccagggacgcgggcggctgccccggagactcctgctcctgctcgccctctgggtccaggccgcacgtcctatggggtactttgaactgcagctctcagcattgaggaacgtgaatggagagctcctcagcggcgcgtgctgtgacggggacggacgaactacgagagctggaggctgcggccacgacgagtgcgacacgtatgtgagggtgtgcttaaaagaatatcaggccaaggtgactcccactgggccctgttcatatggtcatggggctacacccgtacttggcggcaattccttttacctgcctcccgctggggcagcaggcgacagggccagagcccgcgcccgagccggaggggatcaggacccaggacttgtggtgattcccttccagtttgcgtggcctagatcatttactctcatcgttgaggcatgggactgggataacgacaccacgccaaacgaggagctgctaatcgagagggtctcacacgccggaatgattaaccctgaagacagatggaagagccttcatttctcaggccacgtcgcacatttagaactccagattcgggttcggtgcgacgaaaactactactctgccacatgcaataaattctgccgacccagaaatgatttctttggacactacacgtgcgatcagtatggtaataaagcctgcatggacggttggatgggtaaagagtgcaaggaagccgtctgtaaacaggggtgtaacttgttacatggaggctgcacagtgcccggggaatgccggtgttcttacggatggcagggtcgcttttgtgacgaatgtgtcccgtatccgggatgcgtccatggctcatgtgtcgaaccatggcagtgcaactgcgagactaattggggcggattgttgtgtgacaaggacctcaattactgtggctctcaccacccatgcactaatggcggaacatgtatcaacgccgagccggatcaatatcgatgcacgtgcccagatggatatagcgggagaaactgtgaaaaggctgaacatgcgtgtacatcaaatccctgtgctaatggagggtcctgccatgaagtgccttctggatttgagtgccactgtccttcaggatggagcggacccacttgcgcactggatatcgacgagtgtgccagcaatccctgtgccgcaggtggtacctgcgttgatcaagtggatgggttcgagtgtatctgtccagagcaatgggtgggagctacatgtcagttagacgtgaatgattgtcgtggacagtgccagcacgggggcacgtgcaaggatctggtgaatggctatcagtgtgtctgcccacgcggattcggcggacgccactgtgagctcgagagagacgagtgcgctagcagcccatgccactccggcggcctctgcgaagatttggccgacggctttcactgtcattgtccgcagggattcagcggtccattatgtgaggtagatgttgacctgtgcgaaccttcaccctgcaggaatggtgcacgctgctataacctagaaggagactattattgtgcttgtccagatgactttggcggcaaaaattgctctgtgccgagagagccatgccctggcggagcctgtagggtgatcgacggatgcgggagtgatgccggtcctgggatgccaggcacggccgcatccggcgtatgcggccctcatgggcgctgtgtcagtcaacccggagggaacttctcgtgcatttgtgacagcgggtttactggcacctactgtcacgagaatattgacgactgcctgggtcaaccttgtcgtaacggcggcacctgtatcgacgaggtcgacgcttttagatgtttttgtccgtctggctgggagggagagctgtgcgacaccaatcccaatgattgcctgcctgacccatgccattcaaggggtcgctgctatgacctcgtgaatgatttttactgcgcatgcgacgatggatggaagggcaagacgtgccacagccgggaattccagtgcgacgcttatacgtgctctaacggtggtacctgttacgattcaggggacacatttcggtgtgcttgtccacctggctggaagggtagcacgtgcgccgtcgcaaaaaattcctcttgcctcccaaacccatgtgttaacggtgggacctgcgtcggcagtggcgcatcctttagctgcatttgccgcgacggatgggagggtcggacctgtacacacaacactaatgactgcaacccactgccctgctacaacgggggcatatgtgtggacggagtcaattggtttcgctgtgaatgtgcccccggctttgcaggccctgattgtcgcatcaatattgatgagtgtcaaagttcaccttgcgcatacggcgccacatgcgtggatgagatcaacgggtatagatgttcatgccccccgggccgagccggaccacggtgtcaggaagtaatagggttcgggcgctcttgttggtcaagagggacaccgttcccacacggaagcagctgggtcgaagactgtaattcctgtcgttgcctggacggaagacgcgattgttccaaagtgtggtgtggctggaagccgtgcctgctggcgggccagccggaagctctgagcgcacagtgtcctttgggacagcgttgtttagaaaaggcccctggccaatgcctccgacctccttgcgaggcttggggggagtgcggggccgaagagccaccaagcactccctgtcttccaaggtcgggccacttggacaataactgcgccagattgactctgcacttcaacagggaccatgttccccagggcacaacggtgggagccatatgttctggaatccggtctttgcctgcgacgcgtgctgtggcccgcgatcgccttctggtgttgttgtgcgatcgggcctcttctggtgcctctgctgtggaggttgctgtgtcattcagccccgcaagagacctgccagacagctccctgatccagggagcagcccatgccatagtcgcagcaatcacccaacgggggaactcatccctcctcctggctgtgactgaggttaaagtggagactgtggtgacagggggatctagcaccggactgctcgttccagtgctgtgcggtgcctttagtgtgctttggctggcttgtgtggtcctatgcgtttggtggacccggaagagacgcaaggagagagagcgatctcgattgccacgcgaggagtcagccaacaaccagtgggcccccttgaatcccatacgcaaccctatcgaacgtcccggcggacataaggacgtgttgtatcagtgtaaaaattttaccccaccaccacggcgagccgacgaggccctgcccggccccgcgggacatgctgctgtgagagaggatgaggaagacgaagatctcggtcggggagaagaggatagcctggaagctgagaagttcctgtcccacaaatttactaaagaccctgggcggagcccgggacggcccgcccactgggcgtcaggccctaaagtcgataatcgcgccgtcaggagcatcaatgaagcccgatacgctggcaaagagtag

SEQ ID NO: 121267 - DNA, 3465 bp, synthetic construct
  misc_feature 1..3465: note = Description of Artificial Sequence: Synthetic coding sequence
  source 1..3465: mol_type = other DNA
atgcagtatcttaatataaaggaggactgtaacgccatggcgttttgtgccaaaatgagatccagcaaaaaaacagaggtgaacctagaagcccctgagcccggtgtggaagtcatattttacctgagcgaccgtgaacccctcaggctcgggtcaggagaatacaccgccgaggagctgtgcataagggccgctcaggcctgtcgcatctctcctctctgtcacaatctttttgctttatatgatgagaataccaagttatggtacgcacctaatcggactataacggtcgatgataagatgagcctccgactgcattaccgcatgcgcttttattttaccaactggcacgggaccaacgacaacgagcagagcgtctggcgacattcacccaagaagcaaaagaacggctatgaaaaaaaaaaaattcctgatgctaccccacttttagatgcttcctcattggaatacctctttgcacagggtcagtacgacctggtgaagtgcttagcacctatccgggatcccaaaaccgaacaggacgggcatgatattgaaaacgagtgtctgggaatggcagtcttggcaatctctcattatgccatgatgaagaaaatgcagctgcctgaactcccgaaagatattagctataaacgatacattcctgagacactcaataaaagcatcagacagaggaacctgctgacacgcatgcggataaacaatgttttcaaggactttctgaaggaattcaataacaaaactatttgcgactcctctgtgtccacacacgacctcaaggtgaagtatctcgccacactggagacactgacgaagcactacggtgccgagatttttgaaactagtatgctgctgatctccagtgaaaatgagatgaactggttccatagcaatgacggcgggaacgtgctctattacgaagtgatggtgaccggcaacttggggattcagtggcgacacaagccaaacgtggtcagtgtcgagaaggaaaagaacaagcttaagcgcaagaaactcgaaaataaacacaaaaaggacgaggagaaaaataaaatacgagaagagtggaataacttcagctactttcccgaaattactcacattgtcatcaaagagtccgtggtctccatcaataaacaagataataagaaaatggaattaaaactgtccagtcatgaggaggccctctccttcgtatcgctggtggatggatacttcaggttaactgcagacgctcaccattacctttgcactgacgtggcccctccccttattgtgcataatatccagaacggatgccatgggcctatttgtacagaatacgccattaataagctgcgacaggagggctccgaagagggcatgtacgtgttgcgatggtcctgtacagatttcgacaatatattgatgacggttacgtgtttcgagaagtctgaacaggtccaaggcgcacagaagcagttcaagaattttcagattgaagtccagaaggggcgatattccctgcatggaagtgacaggtccttcccatcattgggggacctgatgagccatctcaaaaagcagatcttaaggacggataacatttcttttatgttgaaacgatgctgtcagccaaagcctagagaaatcagcaatctcttggttgcaactaagaaagcacaggaatggcagccagtatacccaatgtcacagctctcgtttgaccgtatactgaagaaggatctggtacagggcgagcaccttggcagaggcaccagaacccacatttattccggtactctgatggattacaaggacgatgaaggcacgagcgaggagaaaaaaattaaagtcattctgaaagtcctagatcccagccatcgagacatcagtcttgcgttcttcgaggctgcatcaatgatgcggcaggtgtcccacaagcatatagtgtacctctacggcgtctgcgtcagggatgttgagaacattatggttgaggaattcgtggaaggcggccctttggacctgtttatgcaccggaaatccgacgtactgactaccccttggaaatttaaagttgccaagcagctcgcatctgctcttagctaccttgaggacaaggaccttgtccacgggaatgtgtgcaccaaaaacttgcttctggcgagagagggaatcgattctgagtgcggaccattcattaaactctccgacccaggaatccctataactgtcctttcgcgccaggagtgcatcgagcgaattccgtggattgcccctgagtgcgtggaggattccaaaaacttgtccgtcgcagcagacaaatggtcattcgggactacactatgggaaatctgctacaacggagaaattccactgaaggacaaaacgctgatcgagaaagaaaggttctatgagtcgcggtgcagaccggtgacgcccagctgcaaggaattggcagacctcatgactaggtgtatgaattacgatcctaatcaacgtcctttttttagggcgattatgagagatataaataagctggaggagcagaaccctgatattgtgagtgaaaagaaaccagctaccgaggtggacccaactcactttgagaagcgatttctaaagcggattagagacctcggtgaagggcactttggaaaggttgaactgtgccgatacgaccctgaaggagacaatacaggggaacaggtggcggttaaatccctgaaacccgaatccggtggtaaccacatagcggacctaaaaaaggagattgagatcctgagaaacctgtaccatgaaaacatcgttaagtacaaagggatctgtacagaggatggcggcaacgggattaagctgattatggagtttctgccttccggctccttaaaggaatacctgccaaagaacaagaataagataaacttaaagcagcagctgaagtacgccgttcaaatctgcaagggtatggattatctcggtagcaggcagtatgtgcatcgtgacctggccgcccgcaatgtgctggtcgaatctgagcaccaggtgaaaattggcgacttcggactcacaaaggcaatcgaaaccgataaggagtactacacggttaaggacgatcgggactcccctgtcttctggtacgcgcctgagtgcctgatgcagtctaagttctacatagcgagcgatgtatggtcatttggagtaaccttacacgaactgctcacgtactgcgactctgactcttcacctatggcattattccttaagatgatcggccctacccacggacaaatgacggtcaccaggttggtgaatacactgaaggaggggaaaagattgccttgccccccaaattgccctgacgaggtttaccagttaatgcgcaagtgctgggagttccagccctcaaatcgcaccagtttccagaacttaattgaagggtttgaggccctgctgaagtag

SEQ ID NO: 121268 - DNA, 1860 bp, synthetic construct
  misc_feature 1..1860: note = Description of Artificial Sequence: Synthetic coding sequence
  source 1..1860: mol_type = other DNA
atggcaccaccctcagaagaaacacccctgatcccacaacggagctgtagtctgctcagcacggaggccggagccctgcatgtgctgctccccgccagaggacccggccccccccagaggctctctttctcctttggcgaccatcttgccgaggatctgtgtgttcaagctgcaaaagcctcaggtattctgccagtataccattccctatttgctctggccactgaagacctgtcatgctggttccccccgagccatattttctccgtcgaggacgctagtactcaggtactgctctacagaattaggttttattttcctaactggtttgggctggagaagtgccaccggttcggcctccggaaagaccttgcctctgccatattagatctcccagttctagaacatctctttgctcagcatcgctcagatcttgtgtccgggcggttgcctgttggtctgagcttgaaagagcaaggtgagtgccttagcctcgccgttctggatcttgctagaatggcaagggagcaggcccagaggccgggcgagctgctcaaaaccgtttcgtacaaagcgtgcctgcccccctccctccgagatctgattcaaggactttctttcgtgacgcgccgccggattagacggaccgtgcgcagggcacttaggagagtggctgcctgtcaagcagatagacacagcctgatggctaaatacatcatggacctggaaaggctggaccccgctggagcagccgagacatttcatgtggggctccccggggcccttggcgggcacgatggtctgggtctgctgagagtcgccggtgacggtggaattgcttggactcagggagagcaggaggtgctccagccgttctgcgactttcccgagatcgtggatatttccatcaaacaagcaccaagagtagggcccgccggggaacatcgactggtcacagtcaccagaaccgacaaccagatccttgaagccgaattccctgggctcccagaggcccttagtttcgtggcattggttgacgggtacttccggctcactacagactctcaacactttttctgcaaagaggtggctcccccccgactcctagaggaggttgcagagcagtgccacggccccattacactggactttgcaatcaacaagctgaagacgggcggctctagaccaggatcctacgtgctacgaaggagcccgcaggacttcgattctttcctacttaccgtatgcgtgcaaaatcccctgggccccgactacaagggttgcttaatcaggagatctccaaccggcacctttcttctcgtgggcctgagtcgcccgcatagctctctccgggagctccttgccacctgttgggatgggggccttcatgtggacggggtcgccgtcactttgacaagctgctgtataccacggccaaaagagaagtcaaatctgattgtggtccaacgcggccattcccctcccacctcatcgctcgtgcagcctcagagccaataccaactctcacagatgaccttccataagatccctgctgatagtctggagtggcatgagaacctaggacatggatctttcacgaagatttaccgaggatgtagacatgaggttgtggatggggaggcgcgtaagacagaggtcttactgaaggttatggatgccaaacacaaaaactgcatggagagttttctggaggcggcctctctgatgagccaggtgtcctacaggcatttggtcctgctgcatggtgtgtgcatggcgggggactctgagtctcctccacccacacacccaactccagcctctccaaagtctcgactgtttttcccacccctgttctag

SEQ ID NO: 121269 - DNA, 3375 bp, synthetic construct
  misc_feature 1..3375: note = Description of Artificial Sequence: Synthetic coding sequence
  source 1..3375: mol_type = other DNA
atggcccctccatccgaggagacccctcttattccacagcgctcctgttccctgttgtccaccgaggctggtgctctgcacgttcttcttcctgcccgtgggcctggtccccctcagcgcctctcattctccttcggtgaccacctagctgaggatttgtgcgtccaagcagccaaggccagcgggattctacccgtgtatcactccttattcgccctggccaccgaagacttgtcctgttggtttccaccgtctcatatctttagtgtggaggacgccagcactcaagtgttgctctaccggattaggttctattttccaaattggttcggactggaaaagtgtcatcgatttggcttgcgcaaggatctcgcttccgccatccttgacctgccagttctggagcatttatttgctcagcacagatctgatcttgtgagcggacgcctgccagtgggactctccctaaaggagcagggggaatgcctatctcttgcggtactggaccttgctcggatggctagggaacaggctcaacgccccggcgaacttttaaaaacagtatcctacaaggcatgtctgcctccatccctacgcgatcttatccaaggactctctttcgtcactcgccgaagaataagaaggacggtgcgaagagcccttcggcgtgtggccgcttgccaggcagatcggcacagtctgatggctaagtacattatggatctagaacggctggatccagccggcgctgcggagaccttccacgtagggctccctggagcgcttggaggtcatgatggcctcggcctcttacgcgtggcaggcgacggcggcattgcctggacacaaggagagcaagaagtgctgcagcctttttgcgattttcctgagattgtggacatctctattaagcaagctccaagagtaggaccagctggagagcatagattagtgactgtcacccgcacggataatcaaattctggaggcagagtttcccgggctgccagaggctctttcatttgtggcgttggtggatggttactttcggttgacaaccgactcgcagcatttcttctgtaaggaggtggcccctcccaggctgctggaagaagtagccgagcagtgtcacggcccaatcacactagactttgcaatcaataagcttaaaactgggggcagccgaccaggaagttatgtgcttcgaaggtctccccaggattttgattccttcctgctgactgtctgcgtgcaaaacccactggggccagattacaaggggtgtctgatccggcgtagccctacgggcaccttcctgctcgttggactttcccggccccatagctcgttgcgcgagttactggcgacgtgttgggacgggggccttcacgtggacggcgtggccgtgaccctgaccagctgctgcatcccaaggccaaaggagaaatctaacctgatcgtcgtccagagagggcatagcccgcctaccagctccttggtccagcctcagtcacagtaccagctttctcagatgaccttccacaagattcctgcagactcactagagtggcatgagaatttgggccacggttcttttactaagatttatcgcggctgtcgccatgaggttgtcgatggagaggccagaaagacagaagtactgctgaaagtgatggatgcaaaacataaaaattgtatggaaagctttttggaggccgcttccctcatgtcccaggtatcttaccggcatctggtgcttctgcacggcgtttgtatggccggggatagcactatggtgcaggaatttgtgcatctgggggccatcgatatgtacctcagaaagaggggacacctggtaccagctagctggaaactgcaggttgtgaagcagcttgcttatgcccttaattatctcgaagacaaggggctgccacatggaaacgtcagcgcaaggaaagtgttactggccagagaaggtgccgacgggagcccacctttcataaaactgtctgatccaggcgtgtcgcccgcagtcctgagcctcgagatgctcaccgaccgaatcccctgggtggcaccggagtgcctaagagaggctcaaacactctccctggaggcagataagtgggggttcggggcaaccgtttgggaggtgttttccggggttacgatgccgatctcggccctggacccggccaaaaagctccagttttatgaggaccggcaacagctcccggctccaaagtggacggaattggctttgctgattcagcagtgcatggcatatgagccagtccagcgcccttctttccgggccgtgatccgtgaccttaacagcttgattagctcagactacgaattgctgagcgatccaactccgggagcactagcccctcgcgatggtctctggaatggagctcagctttacgcctgccaagatccaaccattttcgaggaaaggcacctgaagtacatttctcagctcggaaaaggcaactttggatcggtcgaactgtgccggtacgaccctctgggggacaacacaggggctcttgttgccgtcaagcagcttcagcattctggtcccgaccaacagcgagacttccagagagagatccagatcctcaaagctctgcactccgattttatcgttaaataccggggcgtgtcatatggtcctggacgccagtctctgcgcctggttatggagtacctgccttccgggtgcctgcgggattttctgcagcgtcaccgcgcgagactggatgcaagccggctccttctatatagcagtcaaatttgcaagggaatggagtaccttggctcacgcagatgtgtgcatagggatctcgctgcccgcaacatcctcgtcgaaagcgaggcccatgtgaagatagctgacttcgggctcgctaaactgctgcccctggacaaggactattacgtggtgcgggaaccaggtcaatctcccatcttctggtatgcgcctgagagcctgtcagataatatttttagtaggcagtcggacgtgtggtcattcggagtcgtactatatgagctctttacttattgcgataaaagttgcagcccttccgcagaatttttgcggatgatgggatgcgaacgggatgttcccgctctgtgcagactgcttgagcttttggaagaggggcagcgcctcccggctcccccagcatgcccagctgaagtacacgagctcatgaagctgtgctgggcaccgagtccacaggatcggccaagctttagcgctttggggccacagcttgatatgctgtggtccggatccaggggctgcgagacccacgcattcacagcacatccagagggaaaacaccacagcttgagcttcagctag

SEQ ID NO: 121270 - DNA, 3375 bp, synthetic construct
  misc_feature 1..3375: note = Description of Artificial Sequence: Synthetic coding sequence
  source 1..3375: mol_type = other DNA
atggctccaccttctgaggagactccactgattcctcagcgcagctgttccctcctcagcactgaggctggtgcattacatgttctacttccggctagaggccccggaccaccccagaggctgtctttcagttttggcgaccatctggccgaggacctgtgtgtccaggcagcaaaggcttctggaatcctgccagtgtaccattcacttttcgctctggcaaccgaggacttgtcttgctggttccctccaagccacatcttttccgtagaggacgcctccacacaggtgctgctatataggattagattttatttccccaactggttcggtctggaaaaatgtcacagattcgggctgcgcaaagatttggcctctgctatactggacctacctgtgctcgaacacctgtttgcgcagcaccgctctgacctggtatcaggacgcttgcctgtgggactgagtcttaaagaacagggagaatgtctgagcctggcggtcttagacctggctagaatggctcgtgaacaggcccagaggcctggagaactgctcaagacagtgtcctataaagcctgtttacctccctcactgagagacttgattcagggactcagctttgttactcgcaggcggatccgacgaacggtgaggagagccttgcggcgtgtggccgcctgtcaagccgaccgtcattcacttatggcgaaatatatcatggatctcgagaggctggaccctgctggcgccgccgagactttccacgtgggcttgcctggggcactggggggccacgacggactgggtctcctccgagtagccggagacggaggcattgcatggacccagggagaacaagaagtgcttcagcctttttgcgacttcccagagatcgttgacatctcaattaagcaggcaccgcgggtgggtcctgccggcgagcacaggctggtgactgtgacaaggaccgacaatcagatcctggaagctgaattccctggtctgcccgaggccttgtcatttgtcgcactcgtggacggctactttaggttgactaccgactcccagcactttttttgtaaggaggtggccccacctcgcttgctagaggaggttgccgaacaatgccacggaccaattactctcgacttcgctattaacaaactgaagaccggaggcagtagacctggcagctacgtcctccggcggtccccacaggacttcgacagttttctgttgacagtctgcgttcagaaccccctcgggcctgattataagggctgcttgattcggagaagcccaaccggaaccttcctgctcgttggtctgtctaggccgcatagtagccttagagagttgctggctacttgttgggatgggggcctgcacgttgacggcgtagcagtgacactcaccagctgttgtattcccaggcctaaggagaaaagtaacctgatcgtggtgcagcggggtcactcgccccccactagctcactggtgcagccacagtcacagtaccagttatcacagatgactttccacaaaatacccgcagactcactggaatggcacgagaacctgggccacggttccttcacaaaaatttacaggggatgtcggcacgaagtcgttgatggcgaagccagaaaaacagaggtactattgaaggtgatggacgctaagcacaaaaattgcatggagtcatttttggaggctgcctcccttatgtcccaggtgtcgtaccgccatctggtgctgctgcatggtgtttgtatggcaggcgactccactatggtccaggagttcgttcatctaggcgccatcgacatgtacctccggaagcggggacacctggtgccagctagctggaaattacaagtggtgaaacagcttgcctacgcactgaattatttggaagataagggactgccacacgggaacgtgagcgcccgcaaggtccttcttgccagagaaggtgcggatgggagcccgccttttatcaagctgtctgatccgggtgtgtctccagctgtcctgagtttggaaatgctgactgacagaataccctgggtggctccagagtgtctgcgcgaggctcagactctgtccctcgaggccgacaagtggggttttggtgccaccgtctgggaggtgttttcaggtgttacgatgcctatctcagcactggaccccgccaaaaagctgcagttctatgaagaccgtcagcagctcccggcccctaaatggaccgagttggccctgctcatacagcagtgcatggcgtacgaacccgttcagagaccttcctttagagccgttataagggatctgaattccctgatttctagtgattacgagctgttgtccgatccgacacccggcgcgttggcgcctagagatggtctttggaatggagcccagctctatgcctgccaggatcctaccatctttgaagaacggcatctgaagtacataagtcagctcggtaaaggcaattttggtagcgttgagctctgcaggtatgatccgttgggggacaacacgggagctctggtagcagtgaaacagcttcaacatagtggtccagatcagcagcgcgatttccagagggaaatccagattctgaaggcactccatagcgactttattgtaaagtacagaggcgtgtcctatgggccaggtcgccagagcctgagactcgtgatggagtacttaccttccggatgtctgcgagatttcctccagaggcatcgcgctcggctcgatgctagcagactactcttgtactcttcccagatttgtaaggggatggagtatctcggcagccggcgctgcgtgcaccgcgaccttgccgcacggaacatcctggtggaatccgaagcacatgtcaagattgccgactttggcttggcaaagttgctacctcttgataaagattattatgtggtgcgtgagcccgggcagagcccaattttttggtatgctccagaaagtctatcagacaacatatttagtcgtcaaagtgatgtgtggtcttttggcgtggtgctttatgaactgttcacctactgcgataaatcctgcagtccctccgcagaattcttgaggatgatgggttgtgaacgtgacgtgccagccctgtgccggctgctcgagctcctggaggaaggtcaacggcttcctgccccacccgcctgccccgccgaggtgcatgaactaatgaaactgtgttgggccccaagcccccaggatagaccatccttttccgctctcggcccccagctggacatgttgtggtccggatctcggggttgcgagacccacgctttcactgcccacccagagggtaaacaccacagtctgtctttcagctag

SEQ ID NO: 121271 - DNA, 3285 bp, synthetic construct
  misc_feature 1..3285: note = Description of Artificial Sequence: Synthetic coding sequence
  source 1..3285: mol_type = other DNA
atggcccctccctccgaagaaactcctctgatccctcagagaagctgcagcctgctctcaactgaggccggagcgctgcacgttttactgccggcccgagggccaggcccacctcaaagactctcattttcatttggcgaccacctggccgaagacttgtgcgtccaggctgccaaggcttccggcatcctgcctgtttatcactccttatttgctctggcaaccgaggatctctcttgttggtttccaccatcccatattttctccgtggaggatgcgtccacacaggtcctgctgtacagaatcagattctattttcccaactggtttggattagagaagtgtcacagatttggtctgaggaaagatctggcctcagccatactagatcttccggtgctggagcacctgttcgcccagcatcgctccgatctcgtgtccggaaggttaccagtgggcctgagtctgaaagagcagggagagtgtctatccctggccgtacttgatctggctagaatggccagagagcaggctcagcgacccggcgagctgctgaagacagtttcatataaagcttgcttacccccatctctaagagatctgatccaggggctttcatttgtaacaagaaggaggatcaggaggaccgtcaggagggccctacggcgagtggctgcgtgccaggctgacagacactccctgatggctaaatacatcatggacctggagcgcctcgatccagctggcgcagcggaaacctttcatgttggtctacctggagcattgggaggacacgatgggcttgggttgcttagagtggccggcgacggcggcattgcctggacacagggagaacaggaggtccttcagccgttctgcgatttccccgaaattgttgatatctcgatcaagcaggccccccgcgtcggcccagctggagagcaccgtctcgtgaccgtcacacggaccgataaccagatcctggaagccgagttccccggactacctgaggcactgagcttcgtcgcactggtcgatggatacttcagactgacgacagattcgcagcatttcttctgcaaagaggtggccccaccgagactacttgaagaggtggcagagcagtgccacggcccaattaccctagatttcgctattaacaaactgaaaactggtggatctcgacctggttcatacgtgctgcgcagatccccgcaggattttgattcatttcttctgacagtctgcgtgcagaacccactcgggccagattataaaggctgcttgatccgaagaagccctaccgggacatttctgttggttggcctctctagacctcatagctctctgcgagagctactggctacctgctgggatggcggcctccatgtggacggggtggccgtgacactaacgagctgttgcattccgcgccctaaagagaaaagtaacctaattgtagtgcagagaggccactcccctccaacttcttccctcgtacagccccaaagccagtatcaactgtctcagatgacgtttcacaagatcccagctgacagcttagagtggcacgagaatctgggtcatggaagtttcacaaagatctatagaggctgcaggcacgaagtggtggacggcgaagccaggaagactgaagttctcttgaaagtgatggatgccaagcacaagaactgcatggagtcttttctcgaagccgctagcttgatgagtcaggtctcttatcggcatctggtgttgctgcatggtgtgtgtatggccggggatagcaccatggtgcaagagtttgtgcatctgggggcaatcgacatgtaccttcggaaacgcggccaccttgtcccagcttcgtggaaactgcaagtcgtcaaacaactcgcctacgcccttaactacctcgaggataagggcctccctcacgggaacgtgtccgcaagaaaagtcctgctggctcgcgagggggcggatggatcacctccattcatcaaactgagcgatccaggagtgagccctgccgtcctttctcttgagatgttgactgaccggatcccatgggttgcgcctgagtgcctacgggaagcacagacactctcgctggaggctgataagtggggttttggtgctactgtgtgggaagtcttctccggtgtgactatgcccatctccgccttagatccagccaaaaaactccagttttacgaggatcggcagcagctgcctgcacccaagtggacagaactagcactgctgatccagcaatgcatggcctatgaaccagtgcagcggccttcttttagggcagtgatccgcgacctcaattcactgatttcgagcgactatgaacttttgtccgaccccacgccaggagccctggcgcccagagacggactttggaatggggcccagctctatgcctgtcaagaccctacaatttttgaagaacgccatctgaagtatatctctcaactcggcaaggggaacttcggctcggtcgagctgtgccgatacgatccactgggcgacaacaccggcgccctggttgcggtgaagcagctgcagcacagcgggcctgaccaacagcgggatttccagcgcgagatccagattctgaaggcactgcatagtgacttcatcgtgaagtatcgaggcgtcagctatggacctggacgtcagtctctgagactggttatggagtatttaccttccggatgcctacgggatttcttacagcggcaccgcgcccgactggacgcctctcgacttctgttgtattccagccagatctgtaaggggatggaataccttggcagccgccgttgtgtgcaccgggacctcgcagcacggaacatcttagttgagtcagaagctcacgtgaagatagctgatttcgggctcgccaagcttcttcctttagataaagactactatgtggtaagagaacccggccagagccctatcttttggtacgcccctgagtctctgagcgacaacatcttctcaagacagtctgacgtatggagctttggagtcgtgttatacgaactgtttacatattgcgacaaatcatgcagtccctctgctgagtttctccggatgatgggatgcgaacgggatgtgccagcattgtgccggttactcgagctgctagaggaagggcagaggctgcctgcgccccccgcctgccctgccgaggtctcagctgctggcctggccagtgtctctcagtcagtcgattgggcaggcgtctctgggaaacccgcgggggcatag

SEQ ID NO: 121272 - DNA, 1575 bp, synthetic construct
  misc_feature 1..1575: note = Description of Artificial Sequence: Synthetic coding sequence
  source 1..1575: mol_type = other DNA
atgtcgggaaaaagaaaacgcgttgttctgaccataaaggataagctagatattattaagaaattggaagacggcgggtccagcaagcaactggcggtgatctacgggataggtgagaccacagttcgggatatacggaagaacaaagagaagatcattacttatgcgagctcaagcgattctaccagcctgctggccaagcggaagtcaatgaagccaagcatgtacgaggagttggaccgggccatgttagaatggtttaaccagcaaagagcaaaggggaaccctataagcggtccaatctgcgctaagagggctgaattctttttttatgccctgggcatggacggtgatttcaacccgtctgcaggatggctgacgcgcttcaagcagcggcattcgattcgggaaatcaatatccgtaatgaacgcttaaacggcgatgaaacagcagttgaggatttctgtaataattttagggactttatagagcgagaaaatctgcagcccgaacagatttacaacgcagatgaaacaggcctgttctggaagtgcctgccttcaaggatttctgtaatcaagggaaagtgtaccgtacctggccacaaatccattgaagagagggtaactataatgtgctgtgccaatgctaccggactccacaaattaaaactctgcgtcgtgggtaaggccaaaaaaccgaggtcctttaagagtacggacaccctgaatctgcccgtctcctactttagtcagaaaggcgcatggatggatctgtcaatattccgccagtggttcgataaaatcttcgttccacaagtaagagaatacctgcggtctaagggcttacaggagaaagccgtgcttctactcgacaatagcccaacccatcctaacgaaaatgtactgaggtctgatgacggacaaattttcgccaaatatcttcctcctaatgtcgcctctctgatacagccctccgaccagggcgtaattgcaacgatgaagcggaattatcgcgcgggactcctgcagaacaatctggaagaaggcaacgacttaaaatccttttggaagaagttgacactgcttgacgccttgtacgagatcgcaatggcctggaacctagttaaaccagtaactatctctcgggcttggaagaagatactacccatggtcgaggaaaaggagtccctggacttcgatgttgaagacatttcagtcgcaacagtagccgcaatattgcagcatacgaagggactggaaaacgtaactaccgagaatcttgagaagtggttagaagtcgacagcaccgagccggggtacgaagtcctgaccgattcagagatcatccggagggctcaggggcaagctgatgaatctagcgagaacgaagaagaggagattgagctcatccccgagaagcacatcaaccacgctgccgcactccagtggacagagaacctactcgactatctcgagcagcagggagacatgattctgcccgataggctcgtgatccgaaagctgcgagcaacaataaggaataagcagaagatgactaagagcagtcagtag

SEQ ID NO: 121273 - DNA, 1575 bp, synthetic construct
  misc_feature 1..1575: note = Description of Artificial Sequence: Synthetic coding sequence
  source 1..1575: mol_type = other DNA
atgagtggtaagcgtaagcgggttgtgctcacaatcaaggacaagctggacattatcaaaaaactcgaggatgggggaagctccaaacagctggcagtcatttacggtatcggagaaaccacagtgcgggatatccgaaaaaacaaagagaagattatcacctatgcaagttcatccgattcgacctccctgctcgccaaaagaaagtcaatgaagccctcgatgtacgaggagttggatagagcaatgctcgagtggtttaatcagcagcgcgccaaagggaatcccatcagtgggcctatttgcgccaaacgggcagaatttttcttctacgccttagggatggacggggactttaacccgtctgctggttggctgaccaggttcaaacagcggcactccatccgcgagatcaacattcgtaacgagcggttgaacggtgacgaaacggctgtcgaggacttttgtaataatttcagggatttcatcgagcgggagaatctccagcctgaacaaatctataacgcagacgaaacgggccttttttggaagtgtttgccatcaaggatcagcgtcatcaaaggcaagtgcaccgtacctggccacaaatccatagaggaaagggtcaccattatgtgctgcgctaacgcaacaggcctccacaaactaaaactatgtgtggttggtaaagcgaagaaacctcgaagctttaagtctactgacaccttaaatctaccagtgagttacttctcccagaaaggtgcctggatggatctctctatatttcgtcaatggttcgacaagatcttcgtacctcaggtgcgggagtacctccgcagcaagggcttgcaagaaaaagctgttctcttactggataacagtccaacccaccctaacgaaaacgttctgcgctcggacgatggacagattttcgcaaagtacctccctcccaatgtggcctcgctcatccagccgtctgaccagggagtgattgctacaatgaaaagaaattatcgggcaggattgttacaaaataatcttgaggagggtaatgaccttaagagtttctggaagaaactgacactgctggacgctctgtacgagatagcgatggcgtggaatctggtcaagcctgtgactatctccagagcctggaaaaagatcctgcccatggtggaagaaaaggaaagtctggactttgatgttgaagacatctccgtggccaccgtggccgctatcttacaacacaccaagggccttgagaatgttactactgagaacctggaaaagtggcttgaagtggacagcacagaaccaggctacgaggtcttgacggatagtgagattattaggagagcccagggtcaggccgatgagagcagcgagaatgaggaagaggaaatagaactgattccagaaaagcacatcaaccatgctgccgcattacagtggactgagaacctgttggattacctggagcagcagggcgatatgattttgccagaccggctcgtcatccgaaaattgagagccactatcagaaataagcagaagatgacaaagagctctcaatag

SEQ ID NO: 121274 - DNA, 1251 bp, synthetic construct
  misc_feature 1..1251: note = Description of Artificial Sequence: Synthetic coding sequence
  source 1..1251: mol_type = other DNA
atggcaggggacacccattgccctgccgagccgctcgctagggaaggcaccttgtgggaggccctgcgcgcgttgctcccccactccaaagaggatctcaaattggatctgggcgaaaaagtcgagaggagcgtagtcacactgctgcagcgagcgactgagctgttctacgaggggcgccgggacgaatgtcttcagtccagcgaagttatcttagactactcttgggaaaaactgaacaccggcacctggcaggacgtagacaaggactggcggagagtttatgcgattgggtgtctgttgaaagcactttgcctctgccaggcccctgaggatgcaaatacagtggctgctgctctgagagtttgtgatatgggtcttttaatgggagccgctatcctgggggacatccttttgaaagtggcggcaattctccaaactcacctgcctggaaaacgtccagcacgaggttccctccctgaacaaccctgcacaaagaaagcacgcgccgaccatgggctcatccccgatgtgaagttagagaaaacagtcccgcgcctgcaccgtccgtctctgcagcattttcgtgagcagtttcttgtacccgggaggccggttatactgaaaggcgtggccgatcactggccctgtatgcagaagtggtctttagagtatattcaggagattgccggctgccgtacggttccagtggaggtaggcagtaggtataccgacgaggagtggtcgcagactctgatgacggtcaatgagtttattagtaaatacatcgtgaacgagccacgtgacgtgggctatttggcccagcaccaactgtttgatcagattccggaattgaaacaagacatctccattcccgattactgcagtctgggcgatggcgaggaagaggagattaccattaacgcttggtttggcccacagggaacaatttcaccccttcatcaggacccccaacagaactttctggttcaagttatgggtaggaagtacatacgtctgtactctccccaggagtccggagctctctacccgcacgatacacatctgctgcataatacatcccaagtcgatgttgaaaaccctgatttggaaaagttccctaagttcgctaaggctccgtttctcagctgcatcttgagtcctggggaaatcttgttcataccggtcaaatattggcattacgtgagggcactggatctgagcttctccgtcagcttctggtggtcatag

SEQ ID NO: 121275 - DNA, 663 bp, synthetic construct
  misc_feature 1..663: note = Description of Artificial Sequence: Synthetic coding sequence
  source 1..663: mol_type = other DNA
atggcaggcgacacccactgtccagccgagccactggcccgcgaaggaacgctgtgggaggccttacgcgctttactgccgcactcaaaggaggacctcaaactggatctcggggagaaggttgagaggtctgttgtgacgctcctgcagcgcgcgacggagcttttttatgagggccgcagggacgaatgcctccagtcctccgaagtcatccttgattatagctgggagaaattaaatactgggacatggcaggacgtggacaaagattggcgccgtgtatacgcaatcggctgccttctaaaggcgctgtgtctgtgccaggctccggaggatgcaaatacagtggccgccgccctccgagtgtgcgacatgggactcctcatgggagcagctatcttgggagacatcttgctgaaggttgcggcaattcttcagacgcatctccctggtaagcgaccagctcgagggtccctgccagagcaaccttgtacaaaagttgatgtggaaaaccctgacctggaaaaatttccaaagttcgctaaagctccctttctgagctgtatcctgagccccggcgaaattctgttcatccctgtcaaatactggcactacgtccgagccctggatttgtcatttagtgtcagcttctggtggagctag

SEQ ID NO: 121276 - DNA, 1365 bp, synthetic construct
  misc_feature 1..1365: note = Description of Artificial Sequence: Synthetic coding sequence
  source 1..1365: mol_type = other DNA
atgtctcgcgagaagtgtagtcctggggaaggggcagaagaagggcgcggaagtgaggcaagcggcctcaaggctagcgcaggtcatggaactgagccagcagggggtggcccgatggccggcgatactcactgcccggctgagccactggcccgggaaggcacgctctgggaggcgctgagagcactgttgccccactctaaagaagacctcaagctcgatttaggtgaaaaagttgaacgcagtgtggtcacacttctacagcgggcaacagagctcttctacgaggggaggcgtgacgagtgcctgcagtcgtccgaggttatcctggactacagttgggaaaaacttaacactggaacatggcaggatgtagataaggattggagaagggtgtacgcaattggatgcctcctgaaagcactgtgcctgtgtcaggctcccgaagatgctaacacggttgccgccgcactgcgagtctgcgatatggggttgctgatgggcgccgccattctgggcgacatcctcctgaaagtggccgcaatcctacagacacaccttcccggtaaacgccctgcacgagggtctctacccgaacagccttgcacaaaaaaggcgagagcagaccacggcctgatccccgacgtgaaactggagaagactgtccctaggctgcacaggcccagtctccaacacttcagagagcagttcctagtgcctggaagacctgttatcctgaaaggcgttgctgaccactggccctgtatgcagaagtggagtctggaatacatccaggagattgccgggtgcaggacagtgccagtcgaagtgggctcccggtacaccgatgaagagtggtcacagaccctgatgacagtcaacgagttcattagcaaatacattgtgaatgaaccccgcgatgtcggctatctggctcagcaccagttattcgaccagatcccggagctcaagcaagacattagtattcccgattactgcagtctgggagatggtgaagaagaagaaatcacaattaatgcttggtttggaccccaaggcacaatttccccactccaccaagacccacagcaaaactttttggtacaggtgatgggacgcaaatacattagactttattctccacaggaaagtggagccctctacccacacgacacccatctcttacataatacaagtcaagtcgacgtggagaaccccgacctcgaaaagttccccaagttcgccaaggcgccgtttctctcatgtattttaagccccggtgagattttgtttatccccgtgaaatactggcactatgtgagagctctggatttaagcttctccgttagcttctggtggagctag

SEQ ID NO: 121277 - DNA, 441 bp, synthetic construct
  misc_feature 1..441: note = Description of Artificial Sequence: Synthetic coding sequence
  source 1..441: mol_type = other DNA
atgaccgttaacgaatttatcagtaagtacattgtgaatgagccgagggatgttggctaccttgcacagcatcaactgttcgaccaaatccccgagcttaagcaagatatcagcatacctgactattgttcgctgggcgatggagaggaggaggagatcacaatcaatgcctggttcggccctcagggcacaatatcaccactccaccaggatccacaacagaatttcctggtgcaggtcatgggacgcaagtacatccgcctctatagccctcaggaatccggagccttatatcctcacgacacccaccttctgcataatactagtcaggtagacgtggaaaacccagatttggagaagttccctaagttcgccaaagctccattcttaagctgcatcctgtcacctggggaaattctgtttatacccgtgaagtactag

SEQ ID NO: 121278 - DNA, 1119 bp, synthetic construct
  misc_feature 1..1119: note = Description of Artificial Sequence: Synthetic coding sequence
  source 1..1119: mol_type = other DNA
atgaatcataagagcaagaaacggatcagagaggccaagagatccgctcgccccgaacttaaggacagtctggattggacccggcataactactatgagagcttttcgttgagtccagcagctgtggccgacaacgtggaaagggctgatgccctgcagcttagcgtggaggaatttgtggagcggtacgagagaccatataaaccagtggtactactgaatgcccaggagggctggtcagcccaggagaaatggaccctggagaggctgaagcgcaaatatcggaatcagaagttcaagtgcggagaggataacgacggctatagcgtgaaaatgaaaatgaagtactacatcgaatatatggaatctacgcgggatgattcaccactgtacattttcgacagcagctacggcgagcatccgaagcggcgcaagctgctagaggactacaaggtgcctaaattctttacagacgatctctttcagtatgctggggaaaagcgcagaccaccctacaggtggtttgtaatgggccctccgcgctcgggtacaggcatccacatcgatcccttgggtaccagtgcttggaacgctctggtccagggtcataaaagatggtgcttgtttcctaccagcacacccagagagctcattaaagtgaccagggatgaaggtggtaatcagcaggatgaggccattacttggttcaatgtgatctaccctcggacccagctgcctacatggccacctgaattcaaacctctcgagattcttcaaaaacccggcgaaacagtgttcgtgccaggcgggtggtggcatgtagtactcaacttagataccacgattgctattacacaaaacttcgctagcagcaccaatttcccagtggtctggcataaaactgttcgagggcgccctaagctgagccggaagtggtaccggatactgaagcaagagcatccagaattggccgtattagcggactcagtcgatctgcaggaaagcaccggtatcgcctccgactcttccagcgatagcagctcatcttcgagcagctcttcatctgatagtgactcagagcgtatccgcgatacatgtggcggccgcgcacacccttag

SEQ ID NO: 121279 - DNA, 1212 bp, synthetic construct
  misc_feature 1..1212: note = Description of Artificial Sequence: Synthetic coding sequence
  source 1..1212: mol_type = other DNA
atgaaccacaaatccaaaaaacggatcagggaggcaaaaaggtcagccagacctgaattgaaggattcactggattggactaggcataactactacgaatctttttccctctcgcctgcagctgtggctgacaacgtcgagcgtgctgatgccttgcagctgagtgtcgaagagtttgtcgagcgatacgaacggccttacaagcccgtggttctcctgaacgcacaggagggctggtcagctcaggagaaatggacactggagagactgaagcgtaaataccggaatcaaaaattcaagtgcggcgaggataacgatgggtactccgtcaagatgaagatgaagtattacatcgagtacatggagtccacccgcgacgactccccactttatatctttgatagctcctacggcgagcatcccaagagacgcaagttattagaagattataaggtccctaagttctttaccgatgacttgtttcagtatgccggtgagaagagaaggccaccataccgctggttcgtgatggggcctccacgttccggcacaggcatacacatcgacccactcggtaccagtgcgtggaacgctctcgttcaaggacacaaacgctggtgcctatttcccacttctaccccaagagagctgatcaaagtgacccgtgatgagggcggcaatcagcaagatgaagccattacatggttcaatgtcatatacccacgtacccagctccctacatggcccccggaattcaaaccactggaaattctgcaaaaaccgggtgagacagtgtttgtgcccggcggctggtggcatgttgtactaaacctggacacaacaatcgcaataacgcaaaactttgcatcctctaccaatttccctgtggtgtggcacaagaccgttcggggacgtccaaagctctcccgtaagtggtaccgcattctgaaacaggagcaccctgagcttgcagttctcgccgactccgtggatctgcaagaatccaccggcattgcctcagactcttcctctgacagcagtagtagctcgagtagtagctcaagcgacagtgacagcgagtgtgaatctggaagcgagggtgatggcaccgtgcaccgacgaaagaaaaggaggacatgctcaatggtggggaatggggacactaccagccaggatgattgtgtgtcaaaggaaagatcctccagccggtag

SEQ ID NO: 121280 - DNA, 1245 bp, synthetic construct
  misc_feature 1..1245: note = Description of Artificial Sequence: Synthetic coding sequence
  source 1..1245: mol_type = other DNA
atgaatcataaaagtaaaaagaggatccgtgaggcaaaacgatcagcccggccagaactaaaagacagcctggattggaccaggcacaactactatgaaagcttttcactgagccctgcggccgtggcagataatgtggagagagcagacgctcttcagttgagcgtggaggagttcgtcgagagatatgagagaccatacaaaccagtcgttttgcttaacgcccaagaggggtggtccgcccaagaaaagtggaccctcgagaggttgaagcgaaaatataggaaccagaagttcaaatgtggagaggacaatgacggatacagcgtgaaaatgaaaatgaagtactacatagagtacatggaatctacgcgggacgactcccctctgtatatttttgacagctcatatggggaacatcccaaacgacggaaactgctcgaagactataaagtccctaagttctttactgatgatttgtttcagtacgccggagaaaagaggaggcctccgtatcgctggtttgtgatgggtccccctagatccggtactggcattcacatcgatcctcttggtacaagcgcatggaacgctctggtgcagggacataagcgctggtgtctgttcccaaccagcacaccgcgcgagctgattaaagtcacacgtgacgagggaggcaatcagcaggatgaggctatcacttggttcaatgtgatttatccccgaacacagctacctacttggcctcccgagtttaagcccctcgaaattctccagaaacctggtgaaacagtgtttgtgcctggcgggtggtggcacgttgtgctcaatctggacacaactatcgcaatcacgcagaatttcgcttcttctaccaatttccctgtcgtgtggcacaaaacagtgcgagggcgaccaaagttgagtcgtaagtggtatcgaatactgaagcaggagcatccagagctggccgtgctggcagatagtgtggacttgcaggaatctaccggaattgcatccgacagctcttcggactcctcctcgtcttcgtccagcagttcttccgacagcgattcggagtgtgagtccggatccgagggagacggtaccgtgcacagaaggaaaaagagacgcacttgctcaatggtgggaaacggtgacacaacttcacaggacgactgcgtatctaaggagcgcagtagtagccggatccgggatacatgtggcggaagggcccatccttag

SEQ ID NO: 121281 - DNA, 441 bp, synthetic construct
  misc_feature 1..441: note = Description of Artificial Sequence: Synthetic coding sequence
  source 1..441: mol_type = other DNA
atgctcgctggcgccggacgtccgggacttccacagggccgccacctgtgttggctgctttgtgcatttacattgaagctctgtcaggccgaggcacccgtccaggaagaaaaactgtctgccagcaccagcaacctcccatgctggctcgtcgaagagtttgtggtggccgaggagtgttccccctgttctaatttccgcgcaaagactactccagagtgtggcccaactggctatgttgagaagataacgtgctcttcttctaagaggaacgagtttaaatcctgtcgaagtgcgttgatggaacagagactgttctggaagttcgagggggccgtggtctgcgtggctcttatatttgcctgcctcgtgataatcagacagcgacagctcgaccgaaaagctctcgaaaaagtgcggaaacagatcgagtccatctag

SEQ ID NO: 121282 - DNA, 354 bp, synthetic construct
  misc_feature 1..354: note = Description of Artificial Sequence: Synthetic coding sequence
  source 1..354: mol_type = other DNA
atggcctgggggtggcatttgtcatttctgagcgcgtcaaccagcaacctgccctgttggctggtggaagaatttgttgtggcagaggagtgctccccttgctcaaatttccgggctaagaccacacccgaatgtggacctaccggctatgtggaaaagattacctgtagttcatctaagaggaacgagttcaagagctgccggtccgctctaatggaacagcggctgttctggaaattcgagggcgctgtcgtatgtgtcgcccttattttcgcctgcctggtaataattcggcagcgccaactggaccgaaaggctctggaaaaggtccggaaacagatcgaaagtatatag

SEQ ID NO: 121283 - DNA, 354 bp, synthetic construct
  misc_feature 1..354: note = Description of Artificial Sequence: Synthetic coding sequence
  source 1..354: mol_type = other DNA
atggcctggggttggcatttgagctttttgtctgccagcacgtcgaatctgccctgttggctcgtcgaggagttcgtggtggcagaagagtgctcaccatgttccaactttcgtgccaaaacgacccctgagtgcggaccgacaggttatgtggagaaaatcacatgctctagttctaaacggaacgagttcaagtcatgcagaagtgcgctgatggagcagcggctcttttggaaatttgaaggggccgtggtgtgcgtggccctgattttcgcttgcttggtaataattcgtcagcgacagctggacaggaaagcactcgagaaggtgaggaaacagatagagagtatctag

SEQ ID NO: 121284 - DNA, 354 bp, synthetic construct
  misc_feature 1..354: note = Description of Artificial Sequence: Synthetic coding sequence
  source 1..354: mol_type = other DNA
atggcttggggatggcacctgtctttcttgtccgcaagcacgtcaaacctgccttgctggttggtcgaagaatttgtggtagccgaggaatgttcgccctgctcgaattttcgggccaaaaccactccagagtgtgggccgactggctacgtggaaaaaatcacgtgttctagcagcaagcggaatgagttcaagagttgcaggtctgctctgatggaacaacgccttttttggaagttcgaaggcgctgttgtgtgcgtggctctcattttcgcttgcttagtgatcataagacagcgccagctcgatcggaaggccttggaaaaagttcgcaagcagatcgagtcaatctag

SEQ ID NO: 121285 - DNA, 1044 bp, synthetic construct
  misc_feature 1..1044: note = Description of Artificial Sequence: Synthetic coding sequence
  source 1..1044: mol_type = other DNA
atggaaacacccttttacggggatgaggctttgagcgggctgggaggcggagcctcaggaagcgggggatcgttcgccagccccggcaggctgtttccaggcgcgcctccgacagcagcagcaggctcaatgatgaagaaggatgcgttaaccctctcactgtcagagcaagtggcggcggcccttaagcctgccgctgcccctccacccaccccccttcgggccgatggcgctccaagcgcagccccccccgatggactgctggccagcccagatctgggtctattgaagttagcctctcccgagctggagagattaatcattcagtcaaacggactggtgacaactacaccgacatcatcgcagtttttgtatccgaaagttgctgcgtcagaagaacaggagttcgctgaaggatttgtgaaggctctggaagatttacacaagcagaaccaactcggtgccggggccgcggccgcagctgccgcagccgccgccggaggtccatccggcacggcaaccggtagcgcaccgcctggcgagttagcaccagctgccgccgccccagaggccccagtctacgcaaatctgtcttcatatgccgggggggcaggtggtgcagggggagcggctaccgttgcgtttgcggcagagccggtccccttccctccccctcccccaccaggggccttgggaccaccaaggctggccgcactgaaagacgagccacagactgtgcccgacgtgcccagctttggcgagtcccctcctctcagtcctatcgacatggacacacaggagcggattaaggctgaacggaagcggcttagaaatcgtatcgctgcaagcaagtgtagaaaaagaaaacttgaacgcatatcacgccttgaggagaaggtcaaaactctaaagagccagaatactgagctcgcgagcacagcaagtctgttgcgcgagcaggtcgcccagctgaagcagaaggtgctgtcccatgtgaactccggctgccaactcctgcctcagcatcaggtgcccgcctattag

SEQ ID NO: 121286 - DNA, 2934 bp, synthetic construct
  misc_feature 1..2934: note = Description of Artificial Sequence: Synthetic coding sequence
  source 1..2934: mol_type = other DNA
atgagctttgccctcgaggaaacgctggaatcagactgggtggcggttaggccacatgtattcgatgagcgtgagaagcacaagttcgtgttcatcgtggcctggaatgaaatcgaaggcaagttcgctataacttgtcataacagaaccgcccagcggcaacgctctggcagtcgcgagcaagccggcgcccggggcggcgctgaggccggtggggcagcctccgatggcagccggggcccggggagtcctgcggggcgaggtcgcccagaggcaacagcatctgcgacactagttcgatctcccggacccagacgtagcagcgcgtgggctgaaggtggtagcccacgcagcactcgaagcctgctgggcgacccccgcctccggagccctgggtcgaaaggggctgagtcaagactgaggtctcccgtcagagccaaacctatccccgggcagaaaacatctgaggcagacgatgccgctggcgctgcagcggctgcagccaggccggcacctcgcgaagcgcaagtgagcagtgtgcggatcgtctccgcctctggcaccgtgagcgaggagatcgaggtgctggaaatggtcaaagaagatgaggcccccctggccctaagtgatgccgagcaaccacctccagcgacagagctcgaaagtcctgcagaagaatgctcctgggctggcctgttttcattccaggatctgcgggctgtccaccaacaactctgttccgtaaattcacagttggagccttgcctgccagttttccctgaagaaccatccggtatgtggactgtcctattcgggggagctccggagatgaccgagcaggagatagacaccctgtgttatcaactgcaggtatatttgggacatgggttggatacatgtggatggaaaatcctgagccaggtactgttcacagaaaccgacgacccagaggagtactacgagagcctgtcagaacttaggcagaagggatatgaggaagtgcttcagagagccagaaagcgtattcaggagctgctggacaagcacaaaaacacagagagtatggttgagttgctggacctgtatcagatggaagacgaagcttatagtagcctggcagaggcaacaactgagctctaccagtacctgctccaaccttttagggacatgagggaactcgctatgcttcgtcgccagcagattaaaattagtatggaaaatgactacctggggccaagacggatagagtcgctccagaaggaagacgcagattggcagaggaaagcacacatggcagtgctgtctatccaagacttgaccgtgaagtacttcgaaatcacagcaaaggcacagaaagcagtttacgacagaatgcgggcagaccagaaaaagttcgggaaggccagctgggctgccgccgccgagcgtatggaaaagctgcagtacgctgtgagcaaagagacacttcagatgatgcgcgctaaagagatctgcctcgaacagcgtaagcatgctttgaaggaggaaatgcagtctctccgcggggggactgaggccattgcaagactcgatcaactagaagccgactactatgacctgcaattgcagctgtatgaggtacagttcgaaatcctgaagtgcgaggagctgttactgacggcacagctggagagcatcaagcggctgatctccgagaaacgggacgaagtggtttattatgacacctacgaatctatggaggccatgctggaaaaggaggaaatggcagcctccgcctacctgcaacgggaagagctccagaaactgcagcagaaggcaagacagctggaggctcgtcggggcagagtctcagctaaaaaaagctacctgagaaataaaaaggagatttgcatcgctaagcataatgagaagatccaacaaaggactcggatagaagatgagtaccgtacccatcacactgtgcagctcaaacgagaaaagctgcatgatgaagaagagcgcaagtccgcctgggtgtcccaggaaaggcagcgtacccttgaccgactcaggactttcaaacagaggtacccaggtcaggtgattctgaagtccactcgcctgcgactggctcacgcgcgtaggaaaggggcagcatctccagtgttacaggaagatcattgtgactccctcccctcggtgcttcaggtcgaggaaaaaactgaggaagtgggtgaggggcgggtgaagcgaggcccttcccagacaacggagcctcagagtctcgtccagttagaggatacttcactgacccaactggaggctacaagcctccccctgagcggcgtgaccagcgaactgcctcctaccatttctcttccacttctcaataataacctggagccctgtagtgttacaattaatccattgccttccccgctccctcctactccaccccctccactcccagtggccaaggactctgggccagaaacactggaaaaggacctgccaaggaaagagggcaatgagaagagaattcctaaatccgcgagcgcccctagtgcacacttgtttgacagtagccaactcgtcagcgccaggaaaaaattgcggaagacggctgaaggcttgcagaggaggagagtctcatctcccatggacgaggtgctcgctagcctcaagcggggcagttttcacctaaagaaggtggagcaacgaacacttccaccatttccagacgaggacgacagcaataatattcttgctcagattagaaagggggtgaaacttaaaaaggtgcagaaagatgttctgcgtgagtcattcacactgctgccagacaccgatccccttacgagatctatccacgaggcgctacgcaggatcaaagaggcatcacccgagagcgaggatgaagaggaggcgctgccttgtactgattgggagaactag

SEQ ID NO: 121287 - DNA, 2967 bp, synthetic construct
  misc_feature 1..2967: note = Description of Artificial Sequence: Synthetic coding sequence
  source 1..2967: mol_type = other DNA
atgagcttcgccctcgaggaaacactcgaaagcgattgggtggctgtccgaccacatgttttcgatgagcgcgagaagcataaattcgtattcatagtggcctggaatgagattgagggaaaatttgcaatcacatgtcacaaccgaaccgcacagaggcagaggtccggatctcgtgaacaggccggagcccggggaggcgcagaagctggcggggcggcctccgatggttcacgtggacccggctcacccgccgggagaggccggcccgaggctactgctagtgccaccttagttcggagcccgggaccccggaggtcaagcgcctgggccgagggcgggtcccctcgatctactcgatccctgcttggagatccccgcctcaggtcacccggctccaaaggagctgaaagccgactgcggtcacccgtcagggccaaacctattccggggcagaagacttccgaagccgacgatgcggctggcgccgcagctgccgcagcccgcccagctcctagagaagcccaagtgtcgagcgtcaggattgttagtgccagcggaactgtctctgaggagattgaagtgctggagatggttaaggaggatgaggctccattagcgctgagtgacgcagaacagcctccaccggccacggaactcgagtcacctgctgaggagtgcagctgggccggcttgttctccttccaggacttgagagccgttcaccagcagctgtgcagtgtgaactcacagcttgaaccttgcctgccagtctttcctgaagagccctcaggaatgtggacggttttgtttggcggcgcgcctgagatgaccgagcaggagatcgacacactctgctaccaacttcaagtgtacttagggcatggtcttgatacgtgtggatggaagatactgagtcaggtgctcttcaccgagaccgacgaccctgaggaatactatgagtctctttctgagctcagacaaaaaggatatgaggaggtactgcagagagcccggaaacgtatccaggagctgcttgacaaacataagaatacagagagtatggttgagctgctggacctgtatcagatggaggatgaagcttactcaagcctagctgaggccactacggaactttaccagtacctgctccaaccatttcgcgatatgcgcgagcttgcaatgctgcggaggcaacagatcaagatcagtatggagaatgactatctgggtccacgcaggatagaaagtcttcagaaggaggacgcagattggcagagaaaagctcatatggccgtgctcagtatccaggatctcaccgttaagtatttcgagattacggccaaggctcaaaaggccgtctacgatcgaatgcgggccgaccagaaaaagttcggcaaggcctcctgggccgcagcagcggaacgcatggagaaactgcagtacgctgtgagtaaggaaaccctgcagatgatgcgggctaaggagatttgcctggagcagcggaagcatgcccttaaggaggaaatgcagtccctgcgaggcggaacagaagctattgctagacttgaccaattggaggctgactactacgatctgcagttgcagttgtatgaagtgcaatttgaaattctgaaatgtgaggagctcctactgaccgcccaacttgaatctattaagaggctcatatccgaaaaacgcgacgaagtagtgtactacgatacctacgagtctatggaagccatgttagagaaagaggagatggctgctagtgcttacttacaaagggaagagctgcaaaagcttcagcagaaggctcgccagcttgaagcacgccgggggagagtgagcgccaagaagagctatcttcgtaataaaaaggagatatgtattgccaaacacaatgagaaaatccagcaacgaactagaattgaagacgagtaccgcactcatcataccgtgcagctgaaacgcgaaaaactgcatgatgaggaggaaaggaaatcagcctgggtgtctcaggagcgtcagcgtacgctggatcggctgcggacgtttaagcagagatacccgggacaggtgattcttaaaagcacgcgactcaggctggctcacgcccgaagaaaaggcgcagcatctcccgttcttcaggaggaccactgtgacagcctcccttcagtgttacaggtagaggagaagactgaagaagtcggcgagggccgcgtcaagaggggaccgagccagactactgaaccccagtccctggtccaactggaggatacttccttgacccagctggaggccacctccttgccactgtctggggtgacatctgagcttcctcctacaatctcactccctctgttgaacaacaatttagaaccctgcagtgtgacaattaatcctctcccgtcccctctccccccaacccccccacccccaccccctcccccgccaccgcccccacctccccccctgccagtagccaaagactctggtcctgaaacactggagaaagatctcccccgaaaagaaggcaacgaaaagaggatcccaaagtcagcatcagctcccagtgcccacctatttgactcttcacagctggtcagcgccaggaaaaagctaaggaaaacagctgagggactgcaacgccgcagggtttcatcgccaatggatgaggtcctagctagcctcaagcggggttcttttcacctcaaaaaggttgagcagagaacactccctccctttcccgacgaagacgactcaaataacatactagctcaaatcagaaagggcgtgaagttgaagaaggtgcagaaggatgtcctgcgcgagtcatttactctgctgccagatactgacccactgaccaggagtatccatgaagcactacggcgcattaaggaggcgtcacccgagtccgaggacgaggaggaagctctgccatgcacagactgggaaaactag

SEQ ID NO: 121288 - DNA, 2238 bp, synthetic construct
  misc_feature 1..2238: note = Description of Artificial Sequence: Synthetic coding sequence
  source 1..2238: mol_type = other DNA
atggaggtgatgaacctgatggagcagcctatcaaagtgaccgaatggcagcagacttatacctatgacagtggcatccatagtggtgctaatacttgtgtgccttctgtttctagcaagggtatcatggaggaggacgaagcatgcgggcgccaatatactcttaagaaaacaaccacctacacccagggggtccccccctcccaaggggatcttgaatatcagatgtctaccaccgctcgcgctaaaagagtcagagaggcaatgtgtcccggagtgtccggtgaagatagttctctgctgctggcgactcaggttgagggccaggctaccaaccttcagaggttggccgagcccagccagctgctcaagagcgcgattgtgcatttgattaattatcaggatgatgccgagctggccacgcgagctcttcccgaacttactaaactcttgaacgacgaagaccctgtagtggtaacaaaggcggcgatgatagtgaaccagctttcgaagaaggaagcctctcgacgagctctgatggggtcccctcagctggtggcagcggtggttcgcacaatgcagaatacgagcgacttagatacagcaagatgtaccacaagcatactgcataatctgtcacaccacagggaagggctgttggccatttttaagtctggggggatcccagccttagttaggatgttaagttcacctgtcgagtccgtcctcttttacgccatcaccacccttcacaatcttctgctgtatcaggaaggcgccaagatggcagtccgactcgccgacgggctccaaaaaatggtgcccttactgaacaagaacaaccccaaatttttggctatcaccacagactgcctgcagctcctggcttacggcaaccaggagtctaaactgatcatcctggcaaatggcgggccgcaggcactggtccaaatcatgcgaaactacagttatgaaaaactgctgtggacaacatctagagtattgaaggtcctgtccgtctgcccgtccaacaaacccgctatcgttgaggccggcggaatgcaggctctaggcaagcatctcacatcgaactcaccccgactggtgcagaactgcttatggacgcttagaaacctgtccgatgtggcgacaaaacaagaagggcttgagtctgtgctcaagattctggttaaccagctgagcgtagacgacgttaatgttctcacatgtgctaccggtacattgtccaatctgacatgcaataacagcaagaataagacacttgttacacagaacagcggagttgaggccctcattcatgctatattgagagccggtgataaggacgacattacagagccagctgtctgcgcgctgcgtcatcttacatctcgtcatcccgaagcagaaatggcacaaaattctgttcgcctgaactatggcatccccgcaatcgtaaagctgttgaaccagcccaaccagtggcctctggtgaaggccacgattggacttatccggaacctcgccctgtgtcccgccaaccacgcccctctacaggaagctgccgtgatcccccggctggttcagttactcgtcaaggcacaccaggacgcacagcgccacgtcgctgcaggaacgcaacaaccatacactgacggggtcagaatggaggaaatagtagaaggctgtacgggcgctctgcacatcctggctcgcgaccctatgaaccgcatggaaattttcagacttaacactatccccctgttcgtgcagctgctctattccagcgtggagaatattcaacgggtcgccgcaggcgtgctctgtgaactagcccaagacaaagaggctgccgatgcaatcgacgcggaaggggcctcagccccgctcatggaattgctacatagccgcaacgaagggactgctacctacgccgccgctgtcctgtttcgaatttccgaagacaagaatcctgactaccggaagagagttagtgtcgagctgacaaatagcctgttcaagcacgaccccgcggcctgggaggctgctcagtcgatgattccgattaatgagccatatggagatgacatggacgctacatatcgccccatgtacagctcagacgtcccactcgacccactggagatgcacatggacatggatggcgattatcctatcgatacatattccgatggcctgcgccccccatatcctacagctgatcatatgctcgcctag

SEQ ID NO: 121289 - DNA, 2238 bp, synthetic construct
  misc_feature 1..2238: note = Description of Artificial Sequence: Synthetic coding sequence
  source 1..2238: mol_type = other DNA
atggaagttatgaatctcatggaacagcctatcaaagtgacagagtggcagcagacatacacgtacgattcgggcattcatagcggcgctaatacctgtgttccatctgtctcgtcgaaaggtatcatggaggaagatgaggcctgtggtaggcaatacaccctgaagaagaccacaacatatacacaaggagtccctcctagccagggtgacctcgagtatcagatgtccaccacagcccgcgcaaagcgcgtgcgggaagctatgtgtcctggtgtgagtggcgaggattctagcttactgctagcaacgcaggttgaaggccaggctacgaacctccaaagactggctgagccttcccagctgctgaagtcagctatcgtccatctgatcaactaccaggacgatgccgagctggctactcgggctctgccggaactgacgaaactgctaaacgacgaagacccagtggtggtgacaaaagctgctatgatcgttaatcagctgtctaagaaggaggcaagtaggagagcactaatgggttcccctcaacttgtggccgccgtggtccggaccatgcagaatacctcagatttggataccgccaggtgcacaaccagtatcttacacaacctgtcccatcaccgcgaaggtctcctagcgatattcaagagtggaggaattccagccttggtacgcatgctttcttcaccagtggaaagtgtgctgttttatgcgattactacattacataatcttctcctataccaggagggcgctaaaatggccgtgcgcttagccgatggattacagaagatggtgcccttactaaataagaataaccccaagttcctagcgatcaccacggactgcctgcagctgctcgcttacggaaatcaagaatctaagctgattatcctggccaacggcggccctcaggcactggttcagatcatgcgtaactactcatacgagaagcttctctggacgacaagcagagtgctgaaggtgctaagtgtgtgccccagcaataaacccgctatagtggaggctggcggaatgcaggccctagggaagcatctgacctctaactcaccacgtctggttcagaattgcctgtggaccctgcggaatctgtcagatgtcgctactaagcaggaaggccttgagtctgttctaaagatcttggttaaccagctgtccgtcgatgatgtgaacgtattgacctgcgcaaccggaacattgagcaacctgacctgtaataattccaaaaataaaaccctagtgacacagaactctggggtcgaggctctgattcatgccatcctgcgcgcaggcgataaggacgacatcacggaacctgctgtctgtgcacttcgtcatttgacttcccgccatccagaggcagaaatggctcagaactccgtccggctcaactatgggatccccgccattgttaagctactcaatcaaccaaatcagtggccactcgtgaaggcaacaatagggctgatccgtaatctcgctttgtgtccggctaaccatgcacccttgcaggaggcagccgtcatccctaggctggtgcagctgctggtcaaggcccatcaagacgcccaacgtcatgtggcggccggcacacagcagccatatactgatggagtgaggatggaagaaattgtcgagggctgcacgggagccctccacattctagctagggaccctatgaaccggatggagatctttcgattgaatactatccccttatttgtccagctgctctattcgtccgtggaaaacatccagagagtagcagccggagtactgtgcgaactcgcgcaggacaaagaagccgctgacgccatagatgccgagggagccagtgcccccctcatggagctcctgcactctcgaaatgagggcacagctacatacgctgccgcagtgctgttcaggataagcgaggacaagaacccagattaccggaaacgggtctctgtcgaattaaccaactccttattcaagcacgaccctgctgcctgggaggccgcccagagcatgattcccattaacgaaccatacggggacgatatggacgcaacttatcgtcccatgtatagttctgacgtgcccctcgatccacttgagatgcacatggacatggacggcgactacccgatcgatacatatagcgacggtctgcgtcctccctacccaaccgccgaccacatgttagcctag

SEQ ID NO: 121290 - DNA, 2238 bp, synthetic construct
  misc_feature 1..2238: note = Description of Artificial Sequence: Synthetic coding sequence
  source 1..2238: mol_type = other DNA
atggaggtgatgaacctcatggaacagcctatcaaggtgacggaatggcagcagacctacacttatgatagtgggatccactcaggtgcaaatacgtgtgtgccttcagtgtcaagtaaagggattatggaagaagacgaagcctgcggcaggcagtacactttgaagaagacgactacatatactcagggagtcccaccatcccagggggaccttgagtatcaaatgtccaccacagcccgcgcgaagagggttagagaagcaatgtgccccggcgtgtctggagaagactcctctctcctgctcgccacacaggtggagggacaggcaacaaacctgcagagactggctgagccctcacagctgctaaaaagcgcaatcgtgcacctaataaactatcaagatgacgctgaactcgcaaccagggctttgccggagcttaccaaacttcttaatgatgaagaccccgtcgtggtcactaaggctgcaatgatagtcaatcagcttagtaagaaagaagcgtcgaggagagccttaatggggagcccccagcttgtggcagccgtggtccgaactatgcagaatacctccgatctggacaccgcccggtgtaccacttccattctccacaatctgtctcaccaccgggaaggactcttggccatcttcaagagcggtgggatccctgccctggtgcgcatgttgagctcacccgtggaatcggttctattctatgcgatcactacgctccacaatcttctgttgtaccaggagggtgctaagatggcagtgcgattggccgatggactccagaagatggtacccctcctgaataagaacaaccccaagttcttggcaatcacaacggactgtttacagcttttggcctatggaaatcaagagtcaaaactgatcatcctggcaaacggaggtccccaagcattagttcagatcatgcgaaactacagctatgagaagctgctctggaccacaagtagagtactgaaagtactgtcggtatgtccctcaaataaacccgcaatagtagaggctggtggcatgcaagccctaggaaaacatctcaccagcaatagcccccgacttgtgcagaactgtctctggaccttacggaacttgagcgacgtggctaccaagcaggaaggccttgaaagcgttctcaagatcctcgtcaatcagttgtccgtggacgacgtgaatgttctgacctgtgctacaggtactttgtcaaacctcacttgcaataatagtaagaacaaaacccttgtgacccagaatagcggcgtggaagcgctgatccatgctatcctccgggcaggcgataaggatgacatcaccgagccagcagtgtgtgccctgcgccatctcacgtcccgccatcctgaggccgagatggctcagaacagtgttcgactcaactacggcatacccgctatcgtcaaattactaaaccagccaaatcagtggccccttgtcaaggcaactattggcctgatcaggaacctcgccctctgtcccgcaaatcacgctccactgcaggaagcagcagtaataccacgtctggtccagttgcttgttaaagctcatcaagatgcccagaggcacgtggccgcaggaacccagcagccctatactgacggcgtgcgaatggaggagattgtggagggttgcacgggcgctctccatatcttggctcgggaccccatgaatcgcatggagatcttccgcctcaataccattcccctgttcgtgcagctgctttattcaagcgtggagaacattcaacgcgtggctgctggtgtgctgtgcgaactagctcaggacaaagaggcagcggacgccatcgacgccgagggtgcttccgctcctctcatggagctgctgcactcaagaaacgagggaaccgccacgtatgcggccgccgtcctctttcgcatatccgaggataaaaaccccgactaccgaaagcgggtttccgtggaactcaccaattctcttttcaagcacgatccagcagcgtgggaggccgcacagagcatgatcccaattaatgagccctacggggacgatatggatgccacttatcgcccaatgtactccagcgatgtgccactcgatcctttggagatgcacatggacatggacggagactatcccatcgacacttattccgacggcttacgccctccgtatccaaccgccgatcacatgctggcgtag

SEQ ID NO: 121291 - DNA, 834 bp, synthetic construct
  misc_feature 1..834: note = Description of Artificial Sequence: Synthetic coding sequence
  source 1..834: mol_type = other DNA
atggaagtgatgaatttaatggagcagcccatcaaggtcactgaatggcagcaaacgtatacatatgactcggggattcactcaggcgccaatacatgtgtccccagtgtgagctcaaagggaatcatggaagaagatgaagcttgtggacgtcagtatacgctcaagaagaccaccacgtatacccagggcgtgcccccatctcaaggtgatctcgaataccagatgagtaccaccgccagggctaaaagggtcagggaggccatgtgccctggggtgagcggtgaggactccagtctgcttctggcaacacaggttgaaggccaggccaccaatctgcagcgtctggccgagcccagtcaacttctgaaatccgctattgtgcacctcatcaactaccaggatgacgccgaactggcaactcgcgccttgccagaattaacaaaattgttgaacgacgaggaccccgtagtcgtgacaaaggctgcaatgattgtgaaccagctgagtaaaaaggaagctagccgccgggcactcatgggcagtccccaacttgtggctgccgttgtcaggacgatgcaaaacacctcggatttggacaccgcccggtgtactacgtctatccttcacaatttgagtcatcacagagaagggctcctggccattttcaaatcggggggcatccctgccctcgtgcgcatgctgtctagccctgtcgagtctgtgctcttctacgcaattacaaccctccataaccttctgctttatcaggagggagctaaaatggcagtgaggctcgcagatgggctccagaagatggtcccgcttttgtag

SEQ ID NO: 121292 - DNA, 708 bp, synthetic construct
  misc_feature 1..708: note = Description of Artificial Sequence: Synthetic coding sequence
  source 1..708: mol_type = other DNA
atggaagttatgaacctgatggagcaacctatcaaggtgaccgaatggcaacagacctacacctacgatagcgggatccactcaggtgctaatacgtgtgtcccctccgtgtcgtcgaagggcataatggaggaggatgaggcttgtggacgccagtatacactgaagaagactaccacctatactcagggggtgcccccctctcagggcgacctggaataccaaatgagcacgactgctagagctaagagggtgagggaggcaatgtgcccgggggtgtcaggagaagattcgtcactcctgctggcaacccaggtagagggtcaggccacaaacttgcagcgccttgccgagccatctcagctcctgaaatcagcgatcgtacacctgattaactaccaggacgacgcagaactggccactcgggccctgcctgaactcacaaagctgctaaacgatgaggatccggttgttgtcactaaagccgccatgatcgttaaccaactctcaaagaaagaagcaagcagacgagcattaatgggatctcctcaactggttgcagccgtcgttaggacaatgcaaaacaccagcgacttggataccgcccggtgcaccacatctattttacataacttgagtcaccaccgcgagggactgttagccatattcaaatccggcggaatccctgccctggtgagaatgctgtag

SEQ ID NO: 121293 - DNA, 891 bp, synthetic construct
  misc_feature 1..891: note = Description of Artificial Sequence: Synthetic coding sequence
  source 1..891: mol_type = other DNA
atggaagttatgaacctgatggagcagcccatcaaagtgaccgaatggcaacaaacttacacctacgatagcggcatccactctggggccaacacttgtgtgccttctgtgtcctccaagggcattatggaggaggatgaagcctgcggcaggcaatatactctgaaaaaaactactacctacactcaaggggtgccaccaagccagggcgatttggagtatcaaatgagcaccacagcccgagccaagagggtgcgcgaggccatgtgccctggcgtgtccggcgaagacagcagtctcctgctagccacacaggtagaaggacaggccacgaaccttcagcgtctcgccgaaccttcccaactgttaaaatccgccatcgtgcacctgatcaactaccaggatgacgcagaactggcgactcgagccttaccagaactgactaaactgctgaacgacgaagacccggtggttgtcactaaggcagccatgatcgtcaatcagctgtcaaaaaaggaggcctctcgccgggcccttatggggtctccacagctggtggctgctgtggtcagaaccatgcagaacacctcagacctagatacagcaagatgtaccactagtatactgcataatcttagccaccacagagaggggctgctggcaatcttcaagtcaggaggaatcccggctttggttaggatgcttagcagcccagtggaatccgtcctcttttatgccattactacactccacaatctgctcctctaccaggagggcgctaagatggctgtgcgtctggccgacgggttacaaaagatggttccactgctgaataagaacaaccccaaattcctggcgataacaactgattgtctccagttgttagcttag

SEQ ID NO: 121294 - DNA, 261 bp, synthetic construct
  misc_feature 1..261: note = Description of Artificial Sequence: Synthetic coding sequence
  source 1..261: mol_type = other DNA
atggaggtcatgaatcttatggaacagcctataaaagtgaccgagtggcaacaaacttacacctatgacagtggtatccattcgggcgccaatacttgcgtcccatcagtcagctccaagggcataatggaggaagatgaagcttgtgggcgccagtacaccctaaaaaagacaactacttacacacagggtgtgcctccctcccagggagacttggaataccaaatgtcaacaacggctagagccaaacgggtgagatag

SEQ ID NO: 121295 - DNA, 897 bp, synthetic construct
  misc_feature 1..897: note = Description of Artificial Sequence: Synthetic coding sequence
  source 1..897: mol_type = other DNA
atggaagttatgaatctcatggagcaacctatcaaggtcacagaatggcaacagacttacacttatgattccggtatccactctggagcaaatacctgtgtgccctcggtgtctagcaagggcatcatggaggaagatgaagcttgtgggcggcagtacacgctaaaaaagaccacgacttacacgcagggcgtgcctccttcacagggcgacctcgagtaccaaatgtccacgacagcccgcgctaagcgagtccgtgaggcgatgtgccctggtgtctcaggagaggacagctcactcctgctcgctacacaggtggagggacaggcgaccaatctgcagaggttagccgagccgtctcagcttcttaagtccgcgatcgtccatctgatcaactaccaggacgatgcggaacttgcgactcgggctcttcccgagctaaccaagctccttaacgacgaagaccccgtagtggtgacaaaagcagcaatgatcgtcaatcagctgagtaagaaggaggcctccagacgcgccttgatgggatcacctcagctggtggccgccgtcgtgaggactatgcagaacacttccgacttagatactgcgaggtgtaccacaagcatccttcacaacctgagtcaccatagggaaggactgctggccatattcaaaagtggcgggatcccggctctggtgaggatgctctccagccctgttgagtctgtgctgttctacgcaatcacgacattgcataacctcctgctttatcaggagggggctaaaatggctgttcgcttggccgatgggttacagaagatggtcccactacttaataagaacaacccaaaattccttgcaattacgaccgattgcctccaattactggcttatgggtag

SEQ ID NO: 121296 - DNA, 1776 bp, synthetic construct
  misc_feature 1..1776: note = Description of Artificial Sequence: Synthetic coding sequence
  source 1..1776: mol_type = other DNA
atggaagttatgaatcttatggagcaaccgattaaggttacagagtggcagcagacatacacatatgacagcggaatccactctggcgcaaacacgtgcgtacccagtgtgtccagtaagggcattatggaggaagatgaagcctgcggacggcagtacactctcaagaaaaccacaacctacacccagggagttcccccctcccaaggtgaccttgaatatcagatgtccactacggccagagctaaacgcgtgagggaggccatgtgtcccggagtgagcggagaggatagtagtctgctgctggccacgcaagtagagggacaagcaacaaatctacagcgtctggccgagcccagtcaactactgaagagcgcaatcgtgcacttaataaactaccaggatgacgccgagctggcaacaagggctctccctgagctgaccaagctactcaatgatgaggatccagtggtcgtaacgaaggccgcaatgatagtgaaccagcttagcaagaaagaagcctccagacgggcactaatgggaagtcctcagctggtggccgccgtggtgcggaccatgcagaacacaagcgatctagacaccgctcggtgcaccacatctattctgcataatctgtcccatcacagggaagggctgctggccatcttcaagtcgggtggcataccggctttggttcgcatgctcagttccccagtcgaaagcgtgctgttttatgcaatcactactcttcataatcttctgctctatcaggagggcgcaaagatggctgtgcggctggcagatggcctccagaagatggttccactgctgaataagaataatccaaaatttctggctattactaccgactgcctccagctcttggcctacggaaatcaggaatccaaaattttgaccgctacagtggacaatgcaaacattcttcttcagatcgataacgcgcgccttgccgcagacgatttcagaaccaagtttgaaaccgagcaggccctgcgactgtccgttgaggcggacattaatggcctgcggcgagtcctggacgagctcacactagccagagccgatctggagatgcaaattgagaacttaaaggaggaactggcttacctgaaaaagaatcatgaggaagaaatgaacgctttgagagggcaggtcggcggggagatcaacgtagagatggatgcagcaccaggggtggatctgtccagaatcctcaacgagatgcgggatcagtacgaaaaaatggcggagaagaatagaaaggatgcggaggattggttcttctcgaagaccgaagagctgaacagggaggttgctactaattcagaactggttcagtcggggaaatcagagatttcagaactccggagaacaatgcaggcgttggaaattgaactccagtcccaactgtcaatgaaggcttcattagagggcaacctggcggaaaccgagaataggtactgcgttcagctgtcccagatccaagggctgattggatctgtggaggagcagctcgcccaactgcggtgtgagatggagcaacaaaaccaggaatataagatcctgttggacgtcaagaccaggctcgagcaggagattgcaacctatagaaggctcctggaaggcgaggatgctcacctcacacaatataaaaaagagcccgttaccacacgccaggttagaacgattgtggaggaagtgcaggacgggaaggttatatcctcccgagagcaggtacaccaaaccacccgctag

SEQ ID NO: 121297 - DNA, 897 bp, synthetic construct
  misc_feature 1..897: note = Description of Artificial Sequence: Synthetic coding sequence
  source 1..897: mol_type = other DNA
atggcgaggagatctcgacatcgacttctgctgctcctattgcggtacctggtagtggctctggggtatcacaaggcctatgggttctctgccccaaaggaccagcaggtggtcactgccgtggaataccaggaagccatcttagcctgtaagactcccaagaagacagtctcctctcgacttgagtggaaaaagctcggtcggtcagtctcctttgtctactatcagcagaccctgcagggggactttaagaatagagcggagatgatcgatttcaacattcggattaaaaacgtgactcggagtgatgcaggaaagtatcgatgcgaagttagtgccccttctgagcaggggcagaatctagaggaggatacagtgacactggaagtcctcgtggccccagcagtccctagctgtgaggtcccctctagtgcattgagtggaacagtggtagaactgagatgccaggataaagagggtaaccccgctcccgaatatacttggtttaaggatggcattagactgctggagaacccacggctaggtagtcagtccaccaatagcagttataccatgaacaccaagactggcacactgcaatttaacacggtgagtaagctcgacaccggagaatattcctgcgaggcccggaactccgtgggatacaggcggtgtcctggaaaaaggatgcaggtggacgatctcaacatctctgggataatcgccgccgttgttgtggtcgctcttgtaatctccgtttgtggactgggagtgtgttatgcccaacggaagggttactttagctccaagtacatgtttatgaagtcaaatagttctagcaaagccaccaccatgagcgagaacgatttcaagcacacaaaatctttcatcatatag

SEQ ID NO: 121298 - DNA, 789 bp, synthetic construct
  misc_feature 1..789: note = Description of Artificial Sequence: Synthetic coding sequence
  source 1..789: mol_type = other DNA
atggcccgacgtagcaggcacagattgctgttgctgcttctgcggtacctggtcgtggccctgggttatcacaaggcttacggcttctccgcacccaaagaccagcaggttgtaacagcagtggaataccagggcgatttcaaaaacagggcggagatgatagactttaatatccgcatcaagaatgtcactagatctgatgcgggaaaatataggtgtgaggtgagtgccccgtccgaacaaggacagaatctggaggaggatactgttacgttggaggtattggtcgctccggctgtaccgagctgtgaagtaccttcatccgcgttgtcaggtactgttgtggaactcagatgccaggacaaagagggcaaccctgcccccgagtacacttggttcaaagatgggattcgtctgctggaaaatccaaggctgggaagccagagcactaactcctcatataccatgaatactaagaccggcacactgcagttcaatactgtgtccaaactggacacaggtgaatactcctgtgaagctagaaacagtgttggttatagacgctgcccaggcaagcggatgcaggtggacgacttgaatatcagtggcatcatagctgccgtggtggttgttgccctcgtgattagtgtctgtgggttaggcgtttgttatgcccaacggaagggctacttcagcaaggagacctccttccagaagtccaactcaagcagcaaggccacaacgatgagcgaaaatgacttcaaacataccaagtcctttatcatttag

SEQ ID NO: 121299 - DNA, 897 bp, synthetic construct
  misc_feature 1..897: note = Description of Artificial Sequence: Synthetic coding sequence
  source 1..897: mol_type = other DNA
atggcgaggagatctcgtcaccgtctgctgttgctcctgctgcgctacctggttgtggccctgggctaccacaaggcctatgggtttagcgcccccaaagatcagcaggttgtcaccgccgtggagtatcaagaggcgattcttgcctgcaagacccctaagaagacagtgagctctcgcctggaatggaaaaaactgggccggagtgttagcttcgtctactatcagcagactctccagggtgacttcaagaacagggccgaaatgatcgatttcaacatccgcattaaaaacgtgacaaggagcgacgccggcaaataccgctgcgaagtttccgcaccctctgagcagggccagaatctggaggaagataccgtcactctggaggtccttgtggccccagcggtgcccagctgcgaggtgccatcttctgctctgtccggcaccgtcgttgagcttcgctgccaggataaggaaggcaatcctgcccctgaatacacatggtttaaggacggaattcgactgcttgaaaacccgcgcctggggtcacaatccaccaacagctcttacacgatgaacaccaaaacaggtacgctgcagtttaacaccgtctccaagcttgacaccggggaatattcatgcgaggcgagaaacagcgtggggtaccgacggtgccccggcaagcgcatgcaggttgacgatcttaacatctctggtatcatcgccgcggtggtcgtggttgccttggtcatctccgtgtgcggcctgggtgtatgctatgcccagagaaagggctatttcagtaaggagacttcctttcagaaatctaattccagttctaaagccaccactatgagcgagaacgactttaagcacaccaagagctttattatctag

SEQ ID NO: 121300 - DNA, 939 bp, synthetic construct
  misc_feature 1..939: note = Description of Artificial Sequence: Synthetic coding sequence
  source 1..939: mol_type = other DNA
atggcgagaaggtctcggcacaggttgcttttactcctgctgaggtatctggtggtcgccctcggctatcacaaagcctatggcttcagtgctccgaaggatcagcaggttgtgaccgcggtcgagtaccaggaggccatcctcgcatgtaagactccaaaaaagactgtgagcagtcggcttgaatggaagaagctgggcaggtctgtctccttcgtgtattaccagcagacattgcagggggatttcaaaaatcgggcagaaatgattgatttcaacattagaatcaagaacgtaacccgctcagatgctggaaaatatagatgtgaggtctcagcacccagtgagcaaggccagaatctggaggaagatacagtaacactcgaagtcctcgtcgcccctgctgtgccatcctgtgaggtgccctccagtgcactgagtggcaccgtcgtggagctaaggtgccaggacaaggagggcaatccggctccagagtatacgtggtttaaggacggaattagactcctagagaacccccggctcgggtctcagagcacaaactcgagctatacaatgaatactaaaaccgggacacttcagttcaacactgtgtccaagctggatacgggagagtactcatgcgaggcaaggaactccgtggggtatagacgctgtcccggcaaacgcatgcaggttgatgatttgaatatttctggtattattgcagccgtggtggtcgtagcactggtgatttccgtgtgcggactaggagtgtgctacgcccagagaaagggatattttagtaaagagaccagttttcaaaaatccaattcttccagcaaagccaccactatgagcgaaaatgttcagtggctaaccccggtgatcccagctttgtggaaagctgccgccggaggctcaaggggccaggaattttag

SEQ ID NO: 121301 - DNA, 933 bp, synthetic construct
  misc_feature 1..933: note = Description of Artificial Sequence: Synthetic coding sequence
  source 1..933: mol_type = other DNA
atggccctgcgtcggccccccaggctgcggttgtgcgcgaggctccctgacttctttctcctgctgctctttaggggctgcctgattggggcggtaaatttgaaatcctctaatagaactccggtggtgcaggagtttgagtctgtagagctgtcatgcattatcacagacagccagacctccgacccccgaatagagtggaaaaagatccaggatgagcagactacatacgtcttcttcgacaacaagatccagggtgatctggccggccgggctgagatcctaggtaagaccagcctgaaaatttggaacgtgacgcgccgcgattccgccctttacagatgtgaagttgtggcgcggaatgatcgcaaggagatcgacgagattgtcattgagttgactgtgcaagttaagccagtgaccccggtgtgtcgggtccccaaggccgtgccagtcggaaagatggcaaccttacattgtcaggagtctgagggtcacccgagaccgcattacagctggtatcgcaacgacgtgccactaccaaccgacagcagggccaatccacgtttccggaatagcagcttccacttgaactctgagactggtactctggtgtttaccgcagttcataaggacgactctggtcaatactattgcatcgcgtccaatgatgcagggtctgcccggtgtgaggagcaggagatggaggtatacgacttaaacataggggggatcataggtggcgtgctcgtcgtgctggctgttcttgcccttattacactcggcatctgttgtgcctacagaagaggttactttatcaataataaacaagacggcgaatcctacaagaacccagggaagccggatggcgtaaactatatcagaactgacgaagagggcgattttcgccacaaatcctcatttgtcatatag

SEQ ID NO: 121302 - DNA, 780 bp, synthetic construct
  misc_feature 1..780: note = Description of Artificial Sequence: Synthetic coding sequence
  source 1..780: mol_type = other DNA
atggcgctaagacgcccgccgcgccttcggctgtgtgctcgccttcccgacttcttcttacttctattatttagagggtgcctcataggggccgtgaatctgaaaagttccaatcgcacacccgtggtccaagaatttgaatccgtcgagctgtcctgtattatcaccgattcccagaccagcgaccctcggattgagtggaaaaagatccaagacgagcagaccacctatgtttttttcgataacaagatacaggtcaagccagttacacccgtttgtcgcgtgcccaaagcggtaccggtgggcaaaatggccaccctgcactgccaggaaagtgaagggcatccccggcctcactattcttggtaccgaaatgatgtccctcttccaactgatagcagagctaatcctaggtttaggaacagcagtttccacctgaattcagaaaccggcaccctggttttcactgcggtgcataaagacgactccggccagtactattgcattgcaagtaatgacgcaggcagcgctagatgcgaggaacaagaaatggaagtctatgacctgaacattggtggaatcattggtggcgttctagtcgtgctggctgtacttgcgttaataacactgggaatctgctgcgcctaccgtaggggctactttatcaataacaaacaggacggcgagagctataaaaatccagggaagcccgacggtgtgaattatatcagaaccgatgaggagggtgattttaggcataagagtagttttgtcatctag

SEQ ID NO: 121303 - DNA, 1068 bp, synthetic construct
  misc_feature 1..1068: note = Description of Artificial Sequence: Synthetic coding sequence
  source 1..1068: mol_type = other DNA
atggtaccagcccgactggggcctgcggtggccatggtaaccggggcaggaaggcgtgttctggccgggtgggcccacgcccgtggcgactacaaaccccggagggcggctgcaggcccttctgccactctggacatggcactgaggcggcctccccgacttagactgtgcgccagactgcctgacttctttctgctgttgctgttcagggggtgtttaatcggcgccgtcaacctgaaatcttctaacaggactcctgtcgtccaggagttcgagtctgtcgagctgtcctgtattattactgatagtcaaacctcagatccccgcatcgaatggaagaagatccaggacgagcagacaacatatgtattctttgataacaaaattcagggggacttggccggacgggccgagattctcgggaaaacaagtctgaaaatttggaacgtcacacgaagagacagcgctctgtaccgatgtgaagttgtggctcgcaatgacaggaaggaaattgacgagattgtcatcgagctgaccgtacaggtgaaaccggttactccggtgtgtcgcgtgccaaaagcagttcccgttggaaagatggccaccctgcactgccaagagagcgaggggcatcctaggcctcattacagttggtatcgtaatgacgtcccgctccccaccgacagcagggccaacccccgatttaggaacagctctttccacttaaactctgaaactgggacgctggtctttacggccgtgcacaaggacgattctggccagtattactgcattgccagtaatgacgccgggagtgctcgatgtgaagagcaggagatggaagtgtacgatctgaacattgggggtatcatcggcggagtcctcgtggtcttggccgtattggccctgatcacacttgggatctgctgtgcctatcgtcgaggatactttattaacaacaagcaagacggcgaaagttacaaaaatcccggcaaacccgacggagtgaactatatcaggaccgatgaagagggcgatttccggcacaaaagtagttttgtgatctag

SEQ ID NO: 121304 - DNA, 1986 bp, synthetic construct
  misc_feature 1..1986: note = Description of Artificial Sequence: Synthetic coding sequence
  source 1..1986: mol_type = other DNA
atgaccggcgggcggtttgactttgacgacggaggcacctattgtgggggctgggaggagggtaaggcgcacggacatggcatttgcacagggcccaagggacagggagagtattctggatcatggtcccacggttttgaggttgttggaggctacacatggcctagtgggaatacctaccaaggctactgggctcagggaaagcgccatggcctcggtgtggaaaccaagggaaagtggatgtatcgcggcgaatggtcacacggcttcaaagggaggtacggcgtccggcagagcttatgtactccagcccgttatgaagggacctggagcaatggcctgcaggatgggtacggagttgagacctatggcgacgggggcacctatcaagggcaatgggccggaggcatgcggcatggctatggggtgcgacagtctgtcccctacggcatggcaaccgtcataaggtcaccactccgtacctccctggcctccctccgttcggagcaatccaacggctctgtgttgcatgacgctgcagctgcagccgactctcctgccggaacgcggggcggattcgtgctgaattttcacgctgatgccgagctggccggcaaaaagaaggggggccttttcagacgaggctcactcctcggttcaatgaagctcagaaagagtgaatctaaatcctcaatctcttcaaagagatcatcggttcgttctgacgccgcaatgagccgcatttcttcttctgacgccaatagcaccatttccttcggagacgtggactgtgatttctgtcccgtcgaggatcatgttgacgccaccacaacagaaacgtacatgggtgaatggaaaaatgataagcggaacggattcggcgtctccgagaggagcaacgggatgaaatatgagggagagtgggctaacaataaacgccacgggtacggatgcacggtgttccctgacggaagcaaggaggagggtaagtataagaacaacattttggtgaggggaattcggaaacaattgattcctatacggcacaccaaaaccagagagaaggtggaccgagccatcgaaggggctcagagggcagccgcaatggcacgcactaaggtggaaatcgccaactcccgcactgctcacgcacgcgccaaagctgatgcagctgaccaggccgctctcgcagctaggcaagaatgtgatatcgctcgcgcggttgcacgcgagctgagtccagatttttatcaacccggaccagattacgtgaaacagcggtttcaggagggagtagatgccaaagagaatcctgaggagaaggtgccagagaagcccccaactcctaaggaatcccctcacttctaccggaaaggaactacacccccccggagtccggaagccagcccaaagcactctcactctcccgctagtagcccgaagcctctgaagaagcaaaacccaagcagcggtgcacgactcaatcaggataagaggagcgtggccgacgagcaggtaaccgcaatcgtcaacaagcccctgatgtccaaggcacccaccaaagaggccggtgctgtcgtgccgcagtctaagtacagcggacggcatcacataccgaacccttcaaacggcgagctgcattcccaatatcacggctactacgtgaaactaaatgccccccaacatccacccgttgacgtggaggacggcgacgggagctcccaatcttcgtcagccctggtgcataagccaagcgctaacaagtggtcccccagtaagtctgtaactaaaccagtggccaaagagtctaaggccgagccgaaagcaaagaaatctgagcttgcaatcccaaagaatccagctagcaacgattcctgccctgctctagaaaaggaagctaactctggccccaatagcattatgatcgttctggtgatgttgctgaatattgggttggcaatccttttcgtgcactttctgacttag

SEQ ID NO: 121305 - DNA, 390 bp, synthetic construct
  misc_feature 1..390: note = Description of Artificial Sequence: Synthetic coding sequence
  source 1..390: mol_type = other DNA
atgagcggcggccgattcgatttcgacgatggaggggcttattgcggcgggtgggagggcgggaaagctcatggccacggcctctgcaccgggcctaagggacagggggagtactctggatcctggaattttggattcgaggttgcaggagtgtacacatggccaagcggaaatacctttgagggttattggagccagggcaagagacacgggctgggcatcgaaacaaaaggacggtggctctataagggcgagtggacccacggcttcaaaggcagatacgggatccggcagtcatctagctcaggggctaagtacgaaggcacctggaacaacggccttcaagacggatatggtaccgaaacttatgccgacggaggcatgtgttag

SEQ ID NO: 121306 - DNA, 2091 bp, synthetic construct
  misc_feature 1..2091: note = Description of Artificial Sequence: Synthetic coding sequence
  source 1..2091: mol_type = other DNA
atgtcaggaggccgattcgactttgacgacgggggcgcatactgcgggggttgggaggggggcaaagctcacggacatggcctctgcacggggcctaagggtcagggggaatactccggaagttggaacttcggcttcgaggtagccggcgtgtacacctggccctcaggtaatacatttgagggttactggtcacagggtaagcgtcacggcttggggattgagactaaaggaaggtggctctacaagggcgagtggactcacgggtttaagggacgatatgggatcagacagtcttcttcctctggggcaaagtatgaagggacttggaataatgggctccaggacgggtatgggacagaaacatacgccgacggaggtacttaccaggggcagttcaccaacggaatgaggcatggttacggggtcaggcagagcgtaccgtacgggatggccgttgtagtgcggagtccactgcgaacctcactgagctccttgcggtctgagcattctaacgggaccgtggctcccgactcccccgcctctccagcgagcgatggccccgctctgccgtctcctgcgatcccccgcggtggtttcgcactctccctgctcgcaaacgcagaggctgccgccagggcccctaaaggtggcgggctttttcagcgaggggcactactgggaaaattaaggagagcagaatcgcgcacgtcagtaggtagccagagatctagagtttcttttctcaagagtgatctgtctagtggggccagcgacgcagctagtaccgcttccctgggggaggctgccgagggcgccgacgaggctgccccatttgaggccgatatcgatgccacaactacagagacctacatgggggagtggaagaacgacaagcgctccggcttcggtgtcagcgaaagatccagtggtctgaggtatgaaggagagtggttggacaatcttaggcatggttatggttgcaccactctcccagatggtcatcgggaggaagggaaataccgccacaacgtattggtgaaagatactaagcggagaatgctccaactcaagagcaacaaggtgaggcagaaggttgaacacagtgtggaaggcgcacaaagggccgcggcaattgcacggcagaaggcggaaattgccgcctcaaggacaagccacgctaaggcaaaagcagaagcggcagagcaagccgctctggccgccaatcaagagtccaatattgctcgcaccctggcaagagagttggcccccgatttttatcagccaggcccagagtatcagaaaaggcgtttgttgcaagagattttggagaactccgagagcttacttgagccgccggatagaggcgctggcgccgccggactacctcagccccccagagagtcacctcaactccatgaacgtgagacgccgaggcctgaggggggctccccatcgcccgcaggcacgcctcctcagcccaaacgcccacgacctggagtgtcgaaggacggactgcttagccccggtgcttggaacggggaacccagtggagagggcagcaggagcgtgactccctctgaaggcgcaggaaggagaagcccagcccgccctgccacagaacggatggccatcgaggcgttgcaggcgcctcccgcacccagccgcgagccggaggttgccctttaccagggttaccactcttatgctgtgcgtacgacccccccggagcccccccctttcgaggatcagcccgagcccgaggttagcggtagtgagtccgccccatcgtctcctgcaactgccccccttcaggctcccactttgcgcgggcccgaaccagccagagaaacacccgccaaactggaacctaaacccataattccgaaggccgagccgagagcgaaggctaggaaaaccgaggcaagggggctgaccaaagccggggcgaagaagaaagcaaggaaagaagcagcactagctgcggaggccgaggtggaggtggaggaagtgccgaatacaatcttaatttgcatggtgattctgctcaatattggactggctatcttgttcgtccacctgctgacttag

SEQ ID NO: 121307 - DNA, 2247 bp, synthetic construct
  misc_feature 1..2247: note = Description of Artificial Sequence: Synthetic coding sequence
  source 1..2247: mol_type = other DNA
atgtcctcaggaggaagattcaacttcgacgacggagggtcttattgcgggggctgggaggacggcaaggcgcatggacacggtgtttgcactggtcccaagggccagggtgagtatactgggtcctggagccatggttttgaggtgctcggggtctacacatggccatctgggaacacctaccagggcacctgggcccagggcaagaggcatggtatcggcctggaatcaaagggcaaatgggtgtataaaggcgaatggactcatggcttcaaaggtcgctacggagtgcgtgagtgtgccggaaacggggccaagtatgagggcacatggtctaacggtctccaagacggatacgggaccgaaacctactccgatggcggtacttaccaaggacagtgggtaggaggcatgagacaaggctatggcgtccgccagtctgtgccatacggcatggcagccgtgatccgctcacctctgaggaccagtataaatagtctgcgatccgagcatactaacggcaccgctctgcatcccgatgcctccccggcggtcgcagggagcccagccgttagcagaggcgggtttgtgctagttgcacatagcgacagcgaaatcctaaagagtaaaaaaaagggcctttttagacgaagcttgctgagcgggttgaagctgcggaaaagtgaatccaaatccagcttggcctcccaaagaagcaagcagtcctcatttcgcagcgaggcaggcatgtctaccgtgagttcaaccgcaagtgatatccacagtaccatctctctgggcgaagccgaggcggagctggccgtgatagaggacgatatagatgcgacaactacagaaacctatgtcggtgagtggaagaatgacaagcggagcgggtttggggttagtcagaggagcgacggattgaagtacgagggagagtgggcttcaaaccgacggcatggctacggatgtatgacattccccgacggaacaaaagaggagggaaagtacaaacagaacatcttggtgggcggaaaacgaaagaatctgatacctctacgcgccagtaagatacgcgagaaagtggatagagccgtggaagccgccgaacgggccgcgactatagctaagcaaaaagctgagatcgctgcatcacggaccagccactcaagggccaaagccgaagccgcccttaccgcagcgcagaaagcccaggaagaagcgcgcattgcgcggattacagccaaagagttctccccatccttccagcatcgtgagaacggcctcgagtaccaaaggcctaagaggcagacaagctgcgatgacattgaggttctatccaccggcacaccactgcagcaggagagtcccgagttgtacaggaaaggcacgaccccttccgacctcaccccggatgattcgccccttcaatcatttccgactagccccgcagccactcctccgcctgctccagccgcacgcaacaaagtcgcacacttctcccgccaggtgagcgtggacgaagagagagggggagatatacaaatgctactcgaaggtagagccggggattgcgcccggtcaagctggggagaggaacaggccggagggagtagaggtgtcaggtccggcgccctgcgcggtggcttactggtggacgactttcgaactcgggggtccgggaggaaacagccgggcaacccgaagccgcgcgaaagacgcactgagtctccccctgttttcacttggaccagccatcacagagcgagcaaccactcccccggcggttcaagactgctcgagctgcaggaggagaaactgtccaactaccgtatggaaatgaaaccactattgagaatggagactcatcctcagaagaggcgatatagtaaaggaggagcctgcaggggcctcggagacgaccacagacccgaggatagggggtttggcgtgcagagactccggtcaaaggctcaaaacaaagagaatttccgtccggcctcaagcgcagaacccgcagtgcagaagctggcatctctgcgactgggcggggccgaaccccggttattgcggtgggatttgacattttctccacctcagaaatcacttccagtggccttggagagcgatgaggagaacggggatgaactgaaatcctcaactggtagcgccccgatactggtggtgatggtgatactcctgaacattggcgtcgccatcctctttatcaattttttcatttag

SEQ ID NO: 121308 - DNA, 561 bp, synthetic construct
  misc_feature 1..561: note = Description of Artificial Sequence: Synthetic coding sequence
  source 1..561: mol_type = other DNA
atgagctcagggggcaggtttaactttgatgatggcggtagctactgtggtggatgggaggacggtaaggcccatggccacggcgtctgtacaggcccaaaaggccaaggcgaatacacgggttcctggtctcacggcttcgaggtgcttggcgtttatacttggcccagcggaaatacctaccaaggcacgtgggcccagggcaaacggcatggtattggactggaaagtaaaggaaaatgggtctacaaaggcgaatggactcatggttttaagggaaggtacggcgtcagagaatgtgctggcaacggagcaaagtatgagggcacatggagcaatggactgcaggatggatacggaacagagacctacagcgatggcgacgctaccgcttttggtgctgaacctggcccagaggctagagagctgcccgcagccgccgctgccgccgccgcagccgccgccgccgcagtgcgctggttcttgtgcagggagccctggcccgctctccagctgccggcatgccttgactctccaataagcacccctcaatgcacatag

SEQ ID NO: 121309 - DNA, 96 bp, synthetic construct
  misc_feature 1..96: note = Description of Artificial Sequence: Synthetic coding sequence
  source 1..96: mol_type = other DNA
atgccaccccattccggccagtcgcgggggcgcaagcctggctcttgcctgctgctgttgctgctgctgctccttctacttcttctcctgctctag

SEQ ID NO: 121310 - DNA, 1836 bp, synthetic construct
  misc_feature 1..1836: note = Description of Artificial Sequence: Synthetic coding sequence
  source 1..1836: mol_type = other DNA
atgaggcaagggtatggggtgcggcagagtgtcccatacgggatggcggccgtcataaggtcacctctcaggacctccatcaactctcttcgatccgagcacactaatggcactgccttgcacccagacgcatccccagccgttgccggttctcctgcagtaagcaggggaggatttgtgctcgtcgctcacagcgactctgaaatactcaagagcaagaagaaaggtcttttccggaggtctttactgtctggacttaagctgcggaagtctgaatctaagagcagcctggcatcccaacgtagcaaacagtcttctttccggtccgaggcgggaatgtcgactgtgtccagtaccgcctctgatatacattcaactatttcccttggggaagcagaggccgaacttgcggtcatagaggatgacatagacgccacgacaacagagacgtatgtcggggaatggaagaacgacaaacggtcaggtttcggtgtcagtcagagaagtgatgggctgaaatatgaaggcgaatgggcttctaaccgcagacacggctatggctgcatgacttttccagacggaacaaaggaggaaggcaaatataagcaaaatattctcgtaggggggaaaaggaagaatctaattccactacgggccagtaaaattcgagagaaggtcgaccgggctgtcgaggcagctgagcgggcagctacaattgctaagcagaaggccgagattgccgcgtctcgaacatcacatagcagagctaaagccgaagccgcacttaccgctgcccagaaggctcaagaagaggctagaattgcgcgaattacagccaaggagttttcaccaagttttcagcaccgggagaatggtctggaataccaacggccaaagagacagacctcatgcgatgacattgaggttctctccactggcactccactgcagcaggaaagccccgagctgtaccgcaagggcaccaccccctccgaccttaccccagatgactccccactacaaagcttccctacatctcccgccgccacccctcccccagcacctgcggctcggaataaggtcgcccacttctcgagacaagtatctgtggacgaagagcgcggaggggatatccagatgctgctggaggggcgcgcgggcgattgtgccaggagttcatggggagaggaacaggccggcgggtcacgcggagtgagaagtggagcgttacgcggaggactgctcgtggatgactttcgcactagagggtccgggaggaagcagcctgggaatcctaaacctcgggaaagacgcacagagagtccaccggtgtttacatggacttctcatcacagggccagtaaccattcacccgggggctctcgcctgctggaactgcaagaagagaaactgagcaattataggatggaaatgaagcctctccttcggatggaaacccatccacaaaaacgtcggtactcaaaaggcggtgcatgtcgaggtttgggcgacgaccatcgcccagaagaccgtggcttcggagtacagaggctgagatcaaaggctcagaataaagaaaactttagaccagcttcttcagctgagccagccgtgcaaaaactcgccagtcttcgcctgggcggtgcagagccaaggctactgagatgggatctgactttttctccccctcagaagtcactgcctgttgccctcgaatctgacgaggagaatggagatgagctgaagtcttcaaccggctcagcacctattttagtcgttatggtaatattgttgaacattggcgtcgctatcctctttatcaactttttcatttag

SEQ ID NO: 121311 - DNA, 1347 bp, synthetic construct
  misc_feature 1..1347: note = Description of Artificial Sequence: Synthetic coding sequence
  source 1..1347: mol_type = other DNA
atgacgtcgtcttgttgtgtgactaacaacttgcaagcctctctgaaatcttgtccacgccccgcgtcagtgtgcagttctggcgtgaattgcaggccagagttgtgcctgggctacgtgtgtcaacctatggcctgcttgccttccgtctgccttccaacaacattccggccagcatcgtgcctttccaagacttacctttcctcttcttgccaggccgcatctggcattagtgggagtatgggaccaggatcctggtattcagaaggcgcattcaacggtaacgagaaggaaacaatgcagttccttaatgacagattggcctcttacttgactcgggtgaggcaactcgagcaggagaacgccgaactggaaagtagaatccaggaagctagccactcgcaggtactgactatgacacccgattatcagtcacactttcgtaccattgaggagctgcagcagaaaatcctgtgcaccaaggcagagaacgctcgcatggtggtcaatatcgataatgcgaaattagccgcagacgacttccgcgctaagtatgaggcggagctcgccatgcgtcagctcgtggaagccgacataaatgggctgcgaaggatcttagacgatttgactttatgcaaggctgacctggaagcccaggtcgaatctctaaaggaggagttgatgtgccttaagaagaaccatgaggaggaagttggcagcctcagatgccagttgggcgacaggctgaatatcgaagtcgacgctgccccacccgtggatttaacacgggtgctagaggagatgagatgccaatacgaggcaatggttgaggctaatcggcgtgacgtcgaggaatggtttaacatgcagatggaagaactgaatcaacaggtggccacatcctccgaacagctacaaaattaccagtccgacatcatcgacttgagacgaactgtaaacactctggagattgaactgcaggcgcaacattccctcagagatagcctagagaatactttaacagagtccgaggctagatactcctctcagctggcccaaatgcagtgcatgatcacaaacgtcgaggcccagttggctgagatacgagcagacctggagagacagaatcaagaataccaagtgcttttagacgtgcgcgccaggttggagggcgagatcaacacatacagaagcttgttagaaaacgaggattgtaagttgccatgcaatccctgcagcacccccagctgcactacctgcgtgccttcaccttgcgtacctcgaaccgtctgcgtgcctaggaccgtgggtatgccttgctccccctgtccacaggggcggtactag

SEQ ID NO: 121312 - DNA, 1641 bp, synthetic construct
  misc_feature 1..1641: note = Description of Artificial Sequence: Synthetic coding sequence
  source 1..1641: mol_type = other DNA
atggccgaagtcgtgagccccgtgcccggtgctggcaggcgcgagcccggcgaggtgggtagggcccgaggtccaccagtcgctgatcctggcgtggctttgtccccacaaggcgaaatcattgaagggtgtagactgccagtcctgcgccgaaaccaagacaatgaggatgaatggcccctcgccgaaatactgtccgtcaaggacattagcggcagaaaactgttttacgtacattacattgacttcaacaaacgacttgatgagtgggttacacatgaaaggttagatcttaaaaagattcagttccctaagaaggaagccaaaacacctaccaagaacgggttgcctggttctaggccaggatcgccagagcgagaggtcccagcctctgcccaggccagcggcaaaacactgccaattcctgtacagatcactctcagattcaacctccctaaagaacgagaagcaatccctggcggagagccagaccagccgctctcaagcagttcttgtcttcaaccaaatcataggagtactaaacggaaggtggaggtggtatcacccgctaccccggtgccctccgaaaccgcaccagcttctgtcttccctcagaatggtgccgcccggagagctgtcgccgctcagcctgggcggaaaaggaagtccaattgtctagggactgacgaagactctcaggactcctccgacgggattccttccgcgccacgtatgactgggtccctggtgagcgatcggtctcacgatgacatagttacccgaatgaagaacattgaatgtattgagcttggacgccaccgcctgaagccctggtacttcagtccatacccacaggaactgacgactctgcctgtgctttatctctgcgagttttgtctgaagtacggaagatccctgaaatgtctgcagaggcatctcactaagtgtgatctgcgccacccaccagggaatgagatatacagaaagggcactatctcatttttcgaaatcgacggacggaaaaataagagttatagccaaaatctttgcttgctggctaagtgtttcttagatcataaaacattgtactatgataccgatcccttcttgttttatgtgatgactgagtacgattgcaagggcttccacatcgttgggtattttagcaaggagaaggagtctaccgaggactataatgtggcttgcatcttgacactgcccccataccagaggaggggctacggcaagcttcttattgagttctcctacgagctcagtaaggtggagggcaaaaccggcacgcctgaaaagcccctttcagatctcggactcctcagctatcgctcctactggagccagaccatcctcgagatactgatggggctgaaaagcgaatcaggtgaaaggccccagattaccatcaatgagatatctgaaatcacatccattaaaaaagaagacgtgatttcaacactgcaatatcttaatctgattaactattataaggggcagtacatcctgacgctttctgaggatatcgtggacggacatgaaagagccatgctgaaaagactgctgagaattgactccaagtgcttgcacttcacgcctaaagattggtctaagcgcggcaagtggtag

SEQ ID NO: 121313 - DNA, 1386 bp, synthetic construct
  misc_feature 1..1386: note = Description of Artificial Sequence: Synthetic coding sequence
  source 1..1386: mol_type = other DNA
atggctgaggtaggtgagatcatcgaaggatgtcggctacccgtgcttcggagaaatcaagataacgaggacgaatggccactggcggagattctgtcagtgaaggatatctctgggcgcaagctgttttacgtccactacatagactttaataaaaggctggatgaatgggtcacccatgagcgtctggacctgaagaagatacagttccccaagaaagaggctaaaactccaactaaaaacggcctgcctggctcccggcccggatcgccggagcgggaagtcaagcgaaaagtggaggtggtgtcccccgccacccctgtgccttccgaaaccgcccccgcctctgttttcccgcagaacggcgccgctaggagggcagtagctgcccagcccggaagaaagcggaaatcaaactgtctaggtaccgatgaagactcacaggattccagtgatggtattccaagtgctccaagaatgaccgggtcactagtgtctgatcgctcccatgatgatattgtgactaggatgaaaaatatcgaatgcatcgaacttggccggcacaggctgaaaccctggtacttctcaccgtacccccaagaacttaccactttacccgtgctctatctttgtgagttctgcctgaaatatgggcgcagcttaaaatgcttacagcgccacctgactaagtgtgatctgcgccaccctcccgggaatgaaatctacagaaagggcactatttccttctttgaaatagacggtagaaagaacaaatcttacagccagaacttatgcctactggccaagtgctttttggaccacaaaacactctattacgacacggatccctttctgttttatgtgatgaccgaatacgattgcaaaggcttccacatcgtaggctatttttctaaagaaaaggaatccacggaggattataatgtggcgtgtatcttgaccctgcccccataccagagacggggctacggaaagctccttatcgagttctcttacgagctgagtaaggtcgaagggaaaacaggaacgcctgaaaaacctctctcggatttgggactgctcagttacaggagctattggtcccagacaatcctagaaatactgatgggcctgaaaagcgagtcaggcgagagacctcaaatcacaatcaatgagatctccgagatcacctccatcaagaaggaggatgttatttctactctgcaatatctgaatctgataaactattacaaggggcagtatatactgacgctgagcgaggacatcgtggacgggcatgaacgcgccatgctcaagcggctgctcaggatcgacagcaaatgccttcactttacaccaaaggactggtcaaaaagagggaagtggtag

SEQ ID NO: 121314 - DNA, 1542 bp, synthetic construct
  misc_feature 1..1542: note = Description of Artificial Sequence: Synthetic coding sequence
  source 1..1542: mol_type = other DNA
atggccgaggttggcgagattattgaaggttgccggcttcccgtgcttaggcgaaatcaagataatgaggatgagtggcctttggcggaaatactcagcgtaaaagacatctcgggcagaaaactgttctacgttcactacatcgatttcaataaacgacttgatgagtgggtgacacacgaacgactggacctgaaaaagatccagtttcctaagaaggaagcaaaaactcctaccaagaacggccttccgggttcaagacctgggagcccagaacgggaggtccccgcatccgcacaggcttccggtaaaacgctgccgatcccggtccagattaccctccgcttcaatttgcccaaggaaagagaagcaatcccggggggtgaacccgatcagcccctttctagttccagttgtctgcagccaaatcatcgttctaccaagcggaaggtggaggttgtgtctcccgcaacacccgtaccctcagagactgcaccagcctcagtctttccacagaatggtgctgctcgcagagccgtagcggctcaaccaggcagaaagagaaaaagcaattgcctgggaacagacgaagattcccaggactcaagcgacggtattccctcggctcctcggatgaccgggagcctggttagtgaccggtcacatgatgatatcgtgacccgtatgaaaaatatcgagtgcatcgagttggggagacatagattaaaaccgtggtatttctcaccttacccacaggaattaactactctcccagtcctgtacctctgtgaattctgcttgaagtacggacgaagtctgaagtgtctgcaacggcacttgaccaaatgcgatctaaggcaccccccagggaatgaaatttatcgtaaaggcaccataagcttttttgagattgacggaaggaagaacaaaagctattcccaaaacctgtgcctgctggcaaagtgttttttggatcataagactctctactacgatacggaccccttcctcttttacgtcatgacagaatatgactgtaagggcttccatatcgtggggtacttctctaaggaaaaagagtctaccgaagattacaatgtagcctgtatactgacgctgcctccatatcagcggcgcggatatggaaagctgctgatagagttcagctatgagctttcaaaagtcgagggcaaaaccggtaccccagaaaagcctctgtcagacctaggcctgctcagctaccgcagttactggagccaaaccatcctagagattcttatgggcctgaaaagtgagtctggcgagaggcctcaaatcaccattaatgaaatctcggagattacctcaatcaagaaggaagatgttatcagtactctgcagtacttgaatcttattaactattacaaaggacagtatatcctgacgttaagcgaggacatcgttgatggccacgagagggctatgttgaaaaggttgctccgcattgactcaaaatgcctgcactttacccctaaggactggtcaaaaagaggtaagtggtag

SEQ ID NO: 121315 - DNA, 1485 bp, synthetic construct
  misc_feature 1..1485: note = Description of Artificial Sequence: Synthetic coding sequence
  source 1..1485: mol_type = other DNA
atggcggaagtggttagccccgtgccaggcgctggccggagggagcctggagaggtgggccgggcccgtggccccccagtcgcagaccccggagtggctctcagtccacagggcgagatcatcgagggctgcaggctgcccgttcttcggagaaatcaggacaatgaggacgaatggcctctggcagaaatcttgtctgtgaaggatatctcggggcgcaagttattctacgtgcattatattgactttaataagcggctggacgagtgggtaacccacgagcgactagacctaaagaagattcagtttcccaaaaaggaggctaagacaccaacgaagaacgggcttccaggttctcggccaggctccccagaacgggaagtgaaaagaaaagtcgaggtggtgagccctgcaacaccagtgccatcagaaaccgcgcctgctagtgtattcccccagaatggtgccgctagacgagccgtagccgcacagcctgggcggaagcgcaagtccaattgcctgggaacagacgaggactcccaggacagttcagacggcattccaagcgcaccaaggatgaccgggagcttggtaagtgacaggtctcatgacgatattgtgacgcgaatgaaaaatatcgagtgcattgagttgggaagacaccgcctgaagccttggtatttcagtccctacccccaggagctgactacgcttcccgtcttatatctgtgtgagttctgtttaaagtacggccgaagccttaagtgtctccagagacacctgaccaagtgtgatctgaggcatcctccgggaaatgaaatctatcgtaagggcacaattagcttctttgagatcgatggacggaaaaataagtcatatagtcaaaatctctgtctgctggccaaatgctttcttgatcacaagaccttgtattacgatacagacccatttttgttttacgtgatgacagagtatgattgcaaggggttccacatcgttggctactttagtaaggagaaggaaagtaccgaggactacaacgtggcttgcattctgacattacccccttaccagcggagaggatatggaaagctcctaatagagttttcctatgagctatctaaagtcgagggcaaaacaggtactcctgagaaacctctgagtgacctcggcctgttgtcataccggtcctactggagccaaaccatccttgagatcctcatgggtctcaaaagtgagtccggcgagcggccgcaaattactatcaatgagatcagtgaaattacgtcgatcaaaaaagaggacgtgatttcaaccttacagtatctcaatttgatcaactattacaagggccaatacattttgaccttgtccgaggacatcgtcgatggccatgagcgcgccatgctcaagcggctcttacgcatcgattcgaaatgcctccattttacccccaaagactggagcaaacggggtaagtggtag

SEQ ID NO: 121316 - DNA, 6222 bp, synthetic construct
  misc_feature 1..6222: note = Description of Artificial Sequence: Synthetic coding sequence
  source 1..6222: mol_type = other DNA
atggtaaaattggccaacccattgtacacagagtggattctagaggccatccagaagatcaaaaagcagaaacagaggccaagcgaggaaagaatctgtcacgcagtgtctacgtcacatggacttgataagaagaccgtgtccgagcagcttgaactgagtgtgcaggatggtagtgtgctgaaagttactaataaagggttggcctcttataaggacccagataatcctggccgattttcttctgtgaagccagggacctttccgaaatcagctaaaggatctcgcgggagctgcaacgacttaagaaacgttgactggaataagttactgagacgggcaatagagggtctggaggagcctaatgggagttcacttaagaacatagagaaatatctccgctcccaaagcgatcttacaagcaccaccaataatccagcattccagcagcggctcaggctgggcgctaagcgggcggtgaataacggccggctgttaaaagatggaccccaatacagagtgaattacggttccctggacggcaagggggcaccccagtacccctctgcattcccctcttcgctcccccctgtcagcctgctgcctcacgaaaaagaccagcctcgggccgaccccatacctatttgttccttctgcttaggaaccaaggagtcaaatcgagagaagaagccagaggaactgctctcgtgcgcagactgcggtagcagcggccaccctagctgccttaagttttgcccagagctgaccaccaacgtaaaggcccttagatggcagtgtatcgaatgtaagacatgcagcgcatgtcgcgtgcagggccggaatgctgacaatatgctgttttgtgactcctgtgatagagggttccacatggaatgctgtgaccccccactgtctcgcatgcctaaggggatgtggatctgccaggtttgtaggcccaagaaaaagggacgaaagctcttgcatgagaaagccgcacagatcaaacggcgctatgcaaaaccaattggacgacctaagaacaagctcaagcaaagacttttatcagtaacaagtgatgaggggtctatgaatgctttcacaggccgcggatctccgggacgcggccagaagactaaggtgtgtactactcccagctcagggcatgctgcctcaggtaaggacagctcttcgcgcctcgcagtcactgaccccaccaggcccggggccacgaccaaaatcaccaccacatccacctatatcagtgcctccacactcaaagtcaataagaaaaccaaggggttaattgacgggctgacaaaattcttcacaccgtcaccagatggtcggaggtccagaggggaaataattgacttttcaaaacactatagacctagaaagaaggtctcgcagaaacagtcctgtacaagccacgttttggcaaccggcactacccaaaaattgaagcccccgccttcttcactgccaccacctacacctatcagcggccagagccccagttcgcagaaatcgagcactgctacatcttccccatcccctcagtcctcctcatctcagtgctccgtgcctagtctgagttccctgaccactaacagccaacttaaagctctgtttgatggtctctcccatatctacaccactcagggacagtcacgtaaaaaaggtcatcccagttatgccccacccaagcgtatgcgccgcaagacggagctcagtagtacagccaagtcaaaggctcatttcttcgggaagcgagacataagatctcgattcatctctcactcttccagcagctcctggggcatggcccgcggcagtattttcaaggcaattgctcacttcaagcgaaccacatttctcaagaagcaccgcatgctgggtcggctcaagtataaagtgactccacagatgggcaccccttcacctggcaagggatcactgaccgacggccggattaaaccagaccaagatgatgataccgagattaagattaatattaagcaggaatcagcagacgtcaatgttatcggcaacaaagatgtggttacggaagaggatttggatgtgtttaagcaagcacaggaactgtcatgggagaagattgagtgtgaatcgggtgttgaagattgtggcagatacccatccgtcatcgagtttggcaaatatgagatccagacatggtattcctcaccctacccccaagaatacgcccgcctgcctaagctgtacctctgcgagttctgcctaaagtatatgaaatctaagaatatactgttgcgtcacagcaaaaaatgcgggtggtttcatccccccgctaacgaaatatatcgacgcaaggacctctctgtcttcgaagtggatggtaacatgtccaagatatactgtcaaaacctttgcctccttgcgaaactgttcctggaccacaagacactttactacgatgtcgagcccttcctcttttacgtgcttactaaaaatgacgaaaaagggtgccacctggtgggctactttagcaaggaaaagctatgtcaacaaaaatataacgttagctgcattatgattatgcctcagcaccagaggcaggggtttggacgatttctaattgacttttcctatctcctgtcccgcagggagggccaggcaggcagtcccgagaaacccctgagtgatctgggtaggctctcatatctggcatattggaagtccgtcatccttgagtatttgtaccaccatcacgagcggcatatatcgatcaaggccatttcccgcgccactgggatgtgcccccacgacattgcaaccactttgcagcaccttcatatgatcgataagcgggatggacgtttcgtgataatccgaagggaaaagcttatcctgagtcacatggagaaactgaagacctgttcacgggccaatgaactcgatcccgactccctccgctggacccccattctaatctcaaatgcggctgtcagcgaggaggaaagggaagccgagaaggaggccgagcggttaatggaacaggcctcatgttgggagaaggaggaacaggagattctgagtactcgcgcaaattcaagacagtccccagcgaaagtgcagtccaagaacaagtacctgcacagtcctgaaagtcggccggtgaccggggaacgcggccaactgctggagttgtccaaggagtctagcgaagaggaggaggaagaggaggacgaagaagaggaggaggaggaagaggaggaggaggaagatgaggaggaagaggaagaagaagaggaggaggaggaagaggagaacatccaatcgtctccacctagactgaccaagccccagtctgtggccattaaaagaaagagaccatttgttttgaagaagaagagagggcgcaagaggaggaggatcaactcctccgtgaccaccgaaactatttcagaaaccactgaggttctcaacgagcctttcgataattccgacgaagagcgtccaatgcctcagctcgagcccacctgtgagattgaggtggaggaagacggcagaaaacccgtcctccggaaagcgttccagcatcagcccgggaagaagaggcagacagaggaggaggaagggaaggataatcactgtttcaagaacgctgacccatgtcgaaataatatgaatgacgactcttctaatctgaaggagggtagcaaggataacccagagccactgaaatgtaaacaggtctggccaaagggcacaaagcgcgggctgagcaagtggcgacaaaataaagaacgtaagacagggtttaaacttaacctctacactccccccgagactcctatggaacccgacgagcaagtcactgtggaggagcagaaggagacttctgagggaaagacatctccttcaccaatccgtatcgaggaagaagtgaaggagacaggggaagcacttttaccacaagaggaaaatcgtcgggaagaaacctgcgccccagtgtctcccaacaccagtcccggcgagaagcctgaggacgaccttattaagcccgaagaggaagaagaggaagaagaagaggaggaagaagaggaagaagaggaagagggcgaggaagaggagggaggcggcaacgtggaaaaagaccctgacggcgccaaaagccaggaaaaagaggagcccgaaatctccactgagaaagaggactccgcccgattggacgatcacgaagaagaagaagaggaagatgaagaacccagtcataacgaagatcacgatgctgatgatgaggacgactcccacatggagtccgctgaagtagagaaagaagagctcccccgggaaagcttcaaagaagtgttagagaaccaggagacatttctggatctcaacgtgcagcctgggcactccaaccctgaagtgttgatggattgcggtgtcgatctaactgccagctgtaacagcgaacctaaagagctcgccggagatccagaggccgtgccagagtccgacgaagagcctcccccgggcgaacaggcacagaagcaagaccagaaaaactcgaaggaggtagacacggagtttaaagagggaaaccctgcaaccatggaaattgatagcgagacagtccaggcagtgcagtccttgacccaggagtcatcggagcaggacgatacgttccaggactgcgcagagacccaggaagcctgccgatcactccagaattatacccgcgccgaccagtctccccaaattgcgacaacactcgacgattgccaacagtctgaccactctagccctgtgagctcagtgcattcccaccccggacaaagcgtacgaagcgttaatagtccgtccgtcccggcactggagaacagctacgcgcaaatttcccccgaccagtccgctatctcagtcccatcactgcaaaatatggaaacaagtcctatgatggatgttccctctgtctccgaccactctcagcaggtggttgacagtgggttcagcgatttaggttctatagaatctactactgagaattatgagaaccctagtagctacgatagtaccatgggggggtccatttgtggcaatggttcctcccagaactcttgtagctattctaatctgactagttcttcacttacccagagttcatgtgccgtgacccagcagatgagtaacataagcggttcttgcagcatgcttcaacagactagtatatcgagtcctcctacatgttccgtcaagagcccacaaggctgtgtcgtggaacgcccaccatcaagcagccaacaactggcccagtgctctatggcagctaacttcacgccccccatgcagctggctgagattcctgagacttccaacgcgaatatcgggttgtacgaaagaatgggacagagtgattttggcgccggccattacccacagccctctgcgaccttcagtctcgctaaactgcaacaactgaccaataccttgatagaccatagcctgccctactcccacagcgctgcagtgacaagctacgcgaattccgcttcactctccacaccactatcgaacactggactcgtgcaattgtcccagtcaccacactcagtgcctggaggcccacaggcccaggctaccatgacaccccctccaaaccttacgccccccccgatgaatctcccacctccactgctgcaacggaatatggccgcgtctaatattggaatttctcacagccaaagattgcagactcaaatagcatctaagggccacatctcaatgcgcacgaagtcagccagcctgtctcccgctgcggctacacaccagtctcaaatctatggacgatcccagactgtcgcaatgcaaggcccggctcgaacgctaaccatgcagcgaggtatgaatatgagtgtgaacctgatgcccgctcccgcatacaacgtgaacagcgtcaatatgaacatgaacacactgaatgccatgaacgggtattcaatgagccagcctatgatgaattctggctatcactcgaatcacggttatatgaaccaaactcctcagtaccctatgcagatgcagatgggcatgatgggcactcagccttacgcacaacagcccatgcagacaccaccgcacggtaacatgatgtatactgcccctgggcatcacggctacatgaacacagggatgagcaaacagagcctgaatggcagctatatgagaaggtag
